United States Patent Application Publication US 2006/0134663 A1 - sequence listing, part 138

SEQ ID NO: 465705 - DNA, 1000 bp, Homo Sapiens
tttttttttttttgcagcagagaaagagtttaataatctcaaagccaccagccccattgggctgcctggaggagctgaattagcatttcccattctggctggaataatacacacataacaaaacagatactagtcaccatactcaggacccaagtattgacctggcaagactcaaacttggttccattggcccttgtcatctttgatccactcaagctggagagggatgaccttcgatcagaagttcagagggtaaagctgacacggatgcatctgggagtaggagaccagccattctccatacatgtaactgtggtctgcgcttttggaagagcgtagccaggatggcaggcaacgtctatagatttaccctgtacaaactttcttccatgattttgattatatccattttccaaataaggaaaataacattttctgaggcatggtactgctggcgaccatccatcttgtgtgcaatgaatgtgatcccagtaacttcctgacggagtctcaaaatgttcatcacagtaataggagtaatattttcctacagctactggaaagtatggtctacgcatattctcatgatatagacctccatgtttaatgtctggataatcacaaggtttcaaggtacatctcggagcaggtatccagccagtacttgtgcattttgctgtatttccccgggttgcaggataaaaaccatttctacactggtacgtgatttcatctccagttctgtgtttaatccttaaaggtgagtagtcaccatttggaatataaggattatcacatgatttttcttcacatgaaggcaacggacgccatccagattcagtgcatacagcatctcctctttcactgtattcataacccatgttacatttatattgaaatcgttcattctccttataaataatcttctgagatataggagatccatttataacatctggggatttgcatgaaatttccacacactttggtttctctttac

SEQ ID NO: 465706 - DNA, 1000 bp, Homo Sapiens; identical to SEQ ID NO: 336036

SEQ ID NO: 465707 - DNA, 1000 bp, Homo Sapiens; identical to SEQ ID NO: 336037

SEQ ID NO: 465708 - DNA, 1000 bp, Homo Sapiens; identical to SEQ ID NO: 336037

SEQ ID NO: 465709 - DNA, 616 bp, Homo Sapiens; identical to SEQ ID NO: 157566

SEQ ID NO: 465710 - DNA, 1000 bp, Homo Sapiens; identical to SEQ ID NO: 336038

SEQ ID NO: 465711 - DNA, 1000 bp, Homo Sapiens; identical to SEQ ID NO: 246406

SEQ ID NO: 465712 - DNA, 1000 bp, Homo Sapiens; identical to SEQ ID NO: 336040

SEQ ID NO: 465713 - DNA, 1000 bp, Homo Sapiens; identical to SEQ ID NO: 336040

SEQ ID NO: 465714 - DNA, 1000 bp, Homo Sapiens; identical to SEQ ID NO: 336041

SEQ ID NO: 465715 - DNA, 1000 bp, Homo Sapiens; identical to SEQ ID NO: 336042

SEQ ID NO: 465716 - DNA, 974 bp, Homo Sapiens
ttttttttttttttttggctcagccctgccacttttattattgatgtcaaaagcgccaggctttgcagggacaccagtgggaggtacataggtgcgtgtctgggacccgagaatctcagttctgtaacttcgtcctcagtccaaggtgcgctgctgctgttgggagctaaggctggtcaagcacaggttgtagaaggagttggggtcaaaggctgcactcacctcttgccagcccacccacccagcagcctgtagttcactggggctttttggagtgccccagtagtgagggtccaataccaggacataggcttccgtgcctgacccgacgcagactcccagcaaggccttggacctggcatctgcgtcccccccaaccatgactgggcccccaccccctgcgaagtgcgagtaaagcctctccacctccccgtgcagccccactccccggggtacgtggcagaggcgtccctggggccctccgaagtgagcgaggcagaggctggcctccacgcagccgatccagtcccgggagccccggaagccggggggcttgtcgcccatgtcctccagggccgcctgtacggcggccagtccaggtacgcccgcgggctggccctctggccacgagcacagcgtctgcagagtgcggtagccgcagccccagccgcggtcgtccaggccgtcgcagccgtagtggtagtagaggtagtggcccgagagcagcgccaggcggacagggccgcggctcggcggggacaggcccacgtggacgtccctcagcggctccagggcggtgggcgggagcggaggtcccaggccaggcacagcgtcctcctagcggcgcggagcgacctcaggctccaacacttcctttcggctccgggtcttgggccagctgccgcaggaccggcgcgcagactggggacgcgctccccgggcctcgttgatcaccgcaggccgcaataggcagc

SEQ ID NO: 465717 - DNA, 1000 bp, Homo Sapiens
tttttttagaacatgggaataggttttattttcatctcaagaacatttaagttgggtgaagaaattcagcttttgttgttagaatctgacaggcttcaaacacttgtgatggaggggttgttgtcatatcaaagtccacctagtaaagttttaggtgaccagtgactttgtcaattaggtctgctggtcctggcccaatccctaggacagtttgagagcctggtgcaatctgagtacgtccagcatcttgaattaaacttacagtcagtcccagcatttttgcatgggccaataatgcaatcagggtttcttcatcaggagctttgaccaccaccttgggctggccacagtattcccattgtttgagcatttcaggatttcttctttgaatctgcttgtaggctgaaacagcagcatgagagcactgggcagccactttcccttttcccatctttaagtcatttcgaaccacaagaatcatcttgtactccccgctgtctcccaagatgcttgcttcactttcagtatctgtgtgtgtcttgctcgtcttgcttttggggagcatcccaaagcatactcgaaggctccagcccaggcacatgccacaagcaactccaacagccaagccgagtgtactgggatgagccaaatattccataaccaaggatttggagggcatcattaatttacacagctgaaagcacagtggtcctgaaaaatgtttgaagcactgaaatagaattaattgctggatgatggggatgcaacagggtcctcaatttctctctcttctgatgaacatcgagaataggtggtagaaggcattgggacatcaacactagttgatggtttagcaagcatagtgttgttcttcaggaagataccaagttttgaccgtacagcttgtttcttcttttcactatatatttctctgtagcaagcaagagcatcctgtatctgcgcctgtcaactgtggcgaatctctcgtaattgacgtcca

SEQ ID NO: 465718 - DNA, 1000 bp, Homo Sapiens; identical to SEQ ID NO: 336043

SEQ ID NO: 465719 - DNA, 1000 bp, Homo Sapiens
ttttttttttttggtatgaaatgattcagcttttattaattagcatcttacatcttaaaagagaaaaaaataaagacaaatgaggtggcagagccaggagagctccctgaacacacacaaagggaacagaggcagacagggctcaggaagccatctgagcacagggaggcagcacccttcgggagtgggcctgaacccaggggtgcttcaggatctgggccaggggcagtctctccaagggctggtatctgagaagcctggaaatcaagtcccgggcccccagaggcattgatagtggaaacctcacatctaccttgaggatgcgtctgtaagtctcactgtgggaggcgctctcaaagggtggatatcccaccagcagctcatagcagagcactccaatgcaccacaaatccaccttttcatcatatgttctcccctcaatcatttctggcggcaagtagtccagtgtcccacacattgtcttcctcctcagggagggggtgtgcacagaccagccaaaatctgcaatcttcacctcacccctgaaccccagcagcaggttctctggcttaatatctctgtgaatcactttcttgtcatggcagtaggtcagggcatctgccaactcctctattatcgtggctgtgcgctgttcatctaatttctcgcttttctgcagctccttgtagagctcaccccttggagcatattccagaatcaggtacacccggcgtgcatcatggaaatagttatacaggcgcaggatattggggtgttgtagatgagcctggatctcaatttcccggcgcagctggtgctccagtccttccttctctatctgcgacttgaagagaaccttcagggccacaatgaaatggctttccttgagccgagccaggtacacattcccaaatttccccttgcccaggggacgcccgatttcaaagtcatcgactgtgaggcgccgcatggctgggctgctgggctgctgggctgtttg

SEQ ID NO: 465720 - DNA, 1000 bp, Homo Sapiens; identical to SEQ ID NO: 157569

SEQ ID NO: 465721 - DNA, 1000 bp, Homo Sapiens; identical to SEQ ID NO: 157570

SEQ ID NO: 465722 - DNA, 1000 bp, Homo Sapiens; identical to SEQ ID NO: 344237

SEQ ID NO: 465723 - DNA, 1000 bp, Homo Sapiens; identical to SEQ ID NO: 336047

SEQ ID NO: 465724 - DNA, 532 bp, Homo Sapiens; identical to SEQ ID NO: 336048

SEQ ID NO: 465725 - DNA, 1000 bp, Homo Sapiens; identical to SEQ ID NO: 336049

SEQ ID NO: 465726 - DNA, 1000 bp, Homo Sapiens; identical to SEQ ID NO: 157571

SEQ ID NO: 465727 - DNA, 1000 bp, Homo Sapiens; identical to SEQ ID NO: 336052

SEQ ID NO: 465728 - DNA, 1000 bp, Homo Sapiens
aatgaagtagaattttattacagaatttcacaaagaacttaatatctaagtgtaaagatagaaagcattgaaattcattagcatctataaatacaagatgattttctcatacctacctctaccacaaccctaaatcaaaacaatttcttatgaagcttcagttttcccagaggtaaattccagtacaatatttggcatgctattaagtgagtgggtgctgaaatcctacttcgttttccttttctttcaaagaaggaaaataaggactgtgcatatcgaaaatcagcgtttctaggaagttgaaagtttgggacagtcttcttggacactcaatcctaaatacatgaaagccagctactagcgcagccaaggctgtaacacagtcgtccacctttgtgagcctctccctttctaaatataaagaaaattcgcagacctccatgttgaaagggtttttaacttccaacacaggtgtggacacttgcacctgttcattcatgatgacaaaaaggctgggatcatccccaaaaacatctgggaggagtaaacatgtggctgtcatcttcatgtatttcaacatgtcttcatctgtgtaatgtttcattttttcttgcaatacaatattgattggattgtccaccactgaaaaagaagtcagtatattttctgaataggattccaaaatgtgccttgttttcttataaatatctgttcttgtaagaagttggaattctctgaacatctgataagggcacttcaagaaaggaaacagtttaagaatgtccttcagaggtgttcggctgccaatcatctttcttcttatttccaaagtttggctcattctcttgtcaatttctctccagtccttttctgttttcacgtattcttgctggaaccacttaatatgttcatctagctcagaatcaaaacaaacagcttcttcttttatctggacaagtttaatttcatcaaatcttatatcagcaagagatttccttgt

SEQ ID NO: 465729 - DNA, 1000 bp, Homo Sapiens; identical to SEQ ID NO: 336053

SEQ ID NO: 465730 - DNA, 1000 bp, Homo Sapiens; identical to SEQ ID NO: 336054

SEQ ID NO: 465731 - DNA, 1000 bp, Homo Sapiens; identical to SEQ ID NO: 157572

SEQ ID NO: 465732 - DNA, 1000 bp, Homo Sapiens; identical to SEQ ID NO: 157573

SEQ ID NO: 465733 - DNA, 1000 bp, Homo Sapiens; identical to SEQ ID NO: 157574

SEQ ID NO: 465734 - DNA, 1000 bp, Homo Sapiens; identical to SEQ ID NO: 157575

SEQ ID NO: 465735 - DNA, 1000 bp, Homo Sapiens
tactgtaggacttatctctttattacactaacatgcactgtgaatctctaagaaaaagacatcatgtgtaatctcttccaaagcttattttaataggaagtctttatgcatggcatatgtcaagattaatggtacatggaacacattttgtatcctatccatgagtcacacgggaaatcaccttccaggcctttctctgtgaggtctccctgtccactgtgccctgatcaaccctccaccccttcactgtctttacttccctcatttcccttaagcagacaaaagtccaggtctctggtccacagcttcagacatgacaaggaagaggcccagtatcaaggtgaagctgaggaaggccaagggaaagccaggccaagaggcacccgttggtgatggtcacaggagagaggtgatcagtggagccagggactgggccatcctgctatagatcacactgctgagttttggttgtatttgttttagaagcagccatcattcaccgagggggagagaggaaagggaagagaggggaagagaagaatggggagggatatttacacgtgtgaagcaaaggccaagccagagggctgaaagccgccaccccctgacaagcctccacctgctggcgtagatccctctgccctcagcagcagttctccatccatggagggttgggggttcccaaagtggttcccctctggctctacacaatggctgccctccagcctgggggcccctggctgctgacaggagatgagggtcactgaggggaagccataggtctccagcccagggggccgcccagcttcagaagcttccagaatgagatccacatcagagaaggctaccagggcctgggtagaatcacaggagctcttctccagctccccggccgcagcataggctaggggccctgagtcccctgcgcggggccgaagccgccgaaggtcatcccggaagtgggggttgaagagcaggtacagcagtgggttgaggcagg

SEQ ID NO: 465736 - DNA, 1000 bp, Homo Sapiens; identical to SEQ ID NO: 158672

SEQ ID NO: 465737 - DNA, 1000 bp, Homo Sapiens; identical to SEQ ID NO: 157576

SEQ ID NO: 465738 - DNA, 1000 bp, Homo Sapiens; identical to SEQ ID NO: 157577

SEQ ID NO: 465739 - DNA, 1000 bp, Homo Sapiens; identical to SEQ ID NO: 336060

SEQ ID NO: 465740 - DNA, 1000 bp, Homo Sapiens
tgctgactttaattacaaactttatttgtcaatacaattcacagtttatacatggcgcattccaccatataaattttcggaacagttatttgaggaaatgggtgtagctttctttctaaaagagcctgactttctaaaattttggttggattttttttaactttataaaagtacttttaacaaattaattgaatatttacatttctagcttaaatttaaattttggaaaataagcgtctattagtttatttgcttcttttaaagattctgggtttatttttcaagaccctaatctgaatgccacttattcagatacagctcccacccccacacacaaaaaagtaaaagaaatcagtttgcaattatatttagggaaattattttctttctgcattttaaaaattatatatatatacaatgtacagcagatctaagtatgaaaataaaggaaagggtagcaatttacggggtgcatttactgaattttttctgaatcttggaaccatccaaagaattacaggatataaaattaaactaaaaagaataatcagcctcttttatgtgaaaaaaaaacacagcaaactctcaaaatttaaattgtgctataacagctttttctctaatgtcagagatgaattatgcctgcaatctgcatttttccatgtgcaaagtcacagtgatcccaacttcaacttctgccctcacagccaagtcacaactccaaaagtatacccacagaaggctaggactgtgccctgcactcaccactgtgccacctcctctcatctggcaaaagtcacccaacgaaaagaaaattatataagcctttcatacatcaaaaagcaattagaagctggcagtatactgtttattagcaaatacttgtaacacattgttttgctattttctttccatcagaatgataattcacacccactgttttaaatcccctccaataatatccatttttaacagttttcttctgtcaggtcatttagat

SEQ ID NO: 465741 - DNA, 1000 bp, Homo Sapiens; identical to SEQ ID NO: 465740

SEQ ID NO: 465742 - DNA, 1000 bp, Homo Sapiens
atttttagtagagatggggttttgccctgttggccaggctggtctcgaactcctgacctcaggtgatccgcccacctctgcccccacttttaatttgcaaaatgggctgagtaagaataaagcagtttgttctcaggtttcatctttttaataagctctgtgaaagacatcctaagcactgtatgagacacaacagaatattttttcttccagtattaaaaaaaaaaagacatttgcaaacattttaaagccaactcttctatataatcagtttgatgatctgaattagaaaataccgctggataatcatgttcttgatacacatttcctttttttttgagatggagtctcgctgttgcccaggctggagtacagtggcgcgatcttagctcactgcaacctccgcctcccgggttcaagcgattctcctgcctcagcctcccaagtcactgggattacaggcgtacaccaccatgccaggctaatttttttatgtttagtacagatggggtttcaccatgttggtcaggctggcttgatgcacatttcttataggtacattgggaaattgcttcctaaccacaataaacactgtgtacaggtttttaaaatgtccctggatacacattaattttttgaagtcagtctggccaaacttgccagaaccaattattgctagctccaataaacctaagagctcaaactaaaaaactggtaaaaagaaaaatactcaggttctacaaacgtcccataatttgtctttaaataggcagaaaaaatttaaaaaaaaagatggaactgtctaaaaggtcttcagctaccttggcaggtcaatttaaaaacaaaaggttgatatactataaaataagatgcttcggtgcagctccaaaaacctttataaatacagccatttggaaggacgatcctggatcagaaattattccttgtgtatctatattatgtgcatgtctcatttcagttgtcataattgtctctgtaa

SEQ ID NO: 465743 - DNA, 1000 bp, Homo Sapiens; identical to SEQ ID NO: 160936

SEQ ID NO: 465744 - DNA, 1000 bp, Homo Sapiens; identical to SEQ ID NO: 336061

SEQ ID NO: 465745 - DNA, 1000 bp, Homo Sapiens
ttttttttttttttttttagtagagatggggtttcaccacgttggccaggctggtcttgaactcctgatcttaagtgatccacctgccttggcctcccaaagtgctgggattataggtgtgagccaccgcacctggtccttaatgcttcttttctatttcagatagattctccccttctggggcagttgagcaatcaggtgtggagggaagatggctatggtaaggcctttaggttacggactcttagctccatggggatcactgaagaggccaatgagaatgttctgatttgaggtcttttaagacagatgttcttcaggggttgcagctctgcagacctcctggttatacaaccaggatgtgtgacgtgctgaagtctaaaagtttcatctcagttcatctgtaccatcacggtgatataggaaaaggggcccttcctagcaggggaattccagaccccccctgttatcttggtgaaatggtaaaaaatgtaatgactatgggcctttggagaaatagtgtggcaaaatgacccaatagggtttgagacctgcagttaggaggagcagagcttagcagcttctgcaaggaaggagagcaaggacacagtaaacacagatcccaggacatgtgaccacacgtggccaggccagcccaaaccagggagctgtcctgggtggttgcatccttcattttctgtccatgccctcatagggcctcagggaaactgctagatttaggtgaagagcaacgtgcaaaactgtctttgatttatgacctgagtctggacttaaaccgagtacgaggcatttggaataaaaggtaaacttttctctctcagttctgaaacatatcgctttatgattctatgaatgggaagttgggaggggcattattgtcaaaagcagctgtccatttttcataggctcttttggataactgcaagatcgtagaccatttgtcaagtgagatttgagacagggcaggtattgagaaaga

SEQ ID NO: 465746 - DNA, 1000 bp, Homo Sapiens; identical to SEQ ID NO: 339275

SEQ ID NO: 465747 - DNA, 1000 bp, Homo Sapiens
ttattctatcccggtccacagctcaggaaccatggacaagagtccaaggaccagaggcatggagttttcattagaaggttctgaattcatctaatggctggttatttttacagatgccaagtttacaaaacatacaagtgcacagacaggtgtgggaggtagctcgaaatatacagagtgttcgcaacactagagacgtcttctggctgccatcaggggactcggaggtagggtaggcttggtgaggcccgtggcttgtgtccgtggcacagcctcctgcaaaggggctgccctgctcccctgttcccatggtgccaggccgtgctccccaggtgcctccggggtgctgaagatcttttcatagtactcgatcagcagttcagtgaacatgttcaggggcacaagggcactcagggaggagaccccctgggatggccagatcaaattcagcccgaagacacaggccaggttagagctgttcattttgttgaagatgctctcccgggacaccgcatgcaggaagcccatgaggtagcggaggacgacgtagttgtgctctgggaggctccgtaagatctggcggcagccagtgacacgcaggctgctctccacacaggtgatcccgagaatctgctcgtaggcctggaaggtcagaagcggctggggcagctctcgcaggaaggtcttcaggatcacggcagggatgtgaatgtccccgtagtcgtcaaagttcacgggcttcccttggttgtagagcctctggatctcgcggacggtctgcacgctggcggatctccggaacaggccctcggtgcgcaggcctttctctctcaggtacgtcactgtgaacctcagcacaggggggatgagttcgccttgatttttgtctttgaggtattgcagactgacgccaaactgctgtgtgggcagcgggggccgcggcggtggtgtcttggtgggaggcggcgtccggccctcgtgcaggctctggagcttctca

SEQ ID NO: 465748 - DNA, 1000 bp, Homo Sapiens; identical to SEQ ID NO: 157580

SEQ ID NO: 465749 - DNA, 1000 bp, Homo Sapiens; identical to SEQ ID NO: 157581

SEQ ID NO: 465750 - DNA, 882 bp, Homo Sapiens; identical to SEQ ID NO: 157583

SEQ ID NO: 465751 - DNA, 1000 bp, Homo Sapiens; identical to SEQ ID NO: 336065

SEQ ID NO: 465752 - DNA, 1000 bp, Homo Sapiens; identical to SEQ ID NO: 336066

SEQ ID NO: 465753 - DNA, 1000 bp, Homo Sapiens; identical to SEQ ID NO: 157584

SEQ ID NO: 465754 - DNA, 1000 bp, Homo Sapiens; identical to SEQ ID NO: 336068

SEQ ID NO: 465755 - DNA, 1000 bp, Homo Sapiens
aaaataaaaatgaatatttttattgaacagtaatttaacatctagtaacttaaatttatattaagtaaagcttaagacaatttttaaaacaatttaaactcgaggacagctgagagaactttaagcaatccatggatgtcaaataggatttttctaccaactacatcacttgtaagtataaacaatttttactgcaacaatttttaaaacaaactcataaaacagctaaattttaagcaatgcatggatgtcaaataggatttttctaccaactacatcacttgtaagtataaacaatttttattgcaacaattttcaaaacaaactcataaaacagctaaattttaagcaatgcatggatgttaaataggatttttctaccaactgtatcaaatggttatgtgtaagtataaacaatttttattgcaacttattcttaaaagttaattaaaataaatgttttcaaatatgagagatttttatattcctatctggtatcttataggagatgcttgcgccaggaggacttcctggaatgtaatcctgtgggagttcccaaccataaaacttcaagaacatttaatgcatagagtaaacaatgtcatgtgattaaatttaatttagttcttaccagcttcagtgtgctcaaattaatcaatattattaacatattgattcagaaaatgtggataatcccaagttatttgctctgaggagatgaattatctggttaggaattcatctacacactacttcttgttttccttttctaaggctctgtgtgtatgtgtgtgtgcatagctggccaggagctctgtgccatcgtggctgtacacaatgcaggtgatgtttgttggaaaatcacaattaaccagatgatgaagagtgaatttcttgagtactccattgttttctttctcatcaattctcctctggtcataaatccttaaaaaccgatcatgtccacccactgcgaattggtaaatattggcaggattca

SEQ ID NO: 465756 - DNA, 1000 bp, Homo Sapiens; identical to SEQ ID NO: 336071

SEQ ID NO: 465757 - DNA, 1000 bp, Homo Sapiens
tttttttttttttttttcaaatcagtgatttctttattcctaagaggaagggatttttcctaaggattatggttctaccacccaaggagcagccctactcttcaaaagtggctgcaaaggctggcaaaccgagaggtctgctttggctcagaaactctgtttggctcctgccacccctggcaccctcactgcatgtctcagaggcgtgtgatccacacacagtcaggccagtctgcttctacttaggagggatcacaaccagaggtggcccccgcttgggcctccacatgaggacctgggcatcattggcattgggtttcactagtgcattaggggggatgggttccatccggctcaggatccggggctgctcctgctgagtcctgcccaccagccgggcccgctgccccaagagctgaagagggtccacttcaatgtccaccctcatcctccacttgatggtctgcagaatgatcttctcctttgtggtggtgttcatggccaccagccaggtcgtgaaactttggtctctcttgattcttgtgagcagtggcacattgctgtcactcacaggcactgcccatgtcacactggggtagaagttgtcattcatgctgacggagaacctggagatcttgttggtggggccaaccagggtcacagtttctgtggtgttcccgtaccaagggtagctcaccccatctgagtcactgatggcttttactctcccttccctcaagtcaggcagttcccagcttgacatgcccaggtcgctgtaggtgttgaagaactccatctgattgcacgcctgaatccagcccaccacccaggtctcgtggcgggggatggggggcatgaccacgcgggcggaggctttgaagtagggggtcttgtagcgcaggacgatgggcgaggtctcctcgatgcgcgtggggcactggtcgatggtggcgcacacatcgtacaccacgatgttctcgcgccggatccgcgccttgca

SEQ ID NO: 465758 - DNA, 1000 bp, Homo Sapiens
cttttaactcatctgtatttgttacaactttaagcagaatgtgactcgagcactacatttccatccacaagactgggtctgagttatttttgaacagctttacgatatgcttaggtaggcttttaactttgctcctccaaacaatacttttctttggaaaacaagccctgtggagagatccttccatcaagttgcttcagtttaacctatttctagaggactagtacatgcagaattgtcaactacagggaatgaaaagttcaaaaagtagatcctacaagatgtaacgaatacttttctaaacatcaagatacagctcagaacacttcaataacaagatttggtctacttaggcatccggcttgacagctaaacactttagaccacacaaagttaacatcatgttacatacgtcttacagtgcacgttaccccaatctgtgaaaataaaccaacatgaaactcaaaaagcattactagctctgctttagtgcctaaggtatcacagcatcacttagtagacagaaatcttatcttccccttaaagtagttgtcatgccatacagactttttaatattaacaaaaataaagaaaaacatccttgaaaatatattatcagaggaattgtagagtactgaacaggtaagtcatccctcagccagagattagtctacttcttccatgcgtgatgtgtcgtcatctccttcaaggggtggcatttcttcagttacagcagcactggtatcatcagcagtagggtcatcttcatcaatacccagaccaagtttgatcatcctgtagatcctgttagcatgtgtctggggatcttccagactgaagccagaagacaggagcgcagtttcataaagcaagatgaccagatccttcacagacttgtcgttcttatcagcctctgccttttgccttaaggtctcaataatggaatggtcagggtttatctccaggtgtttctttgctgccatgtaacccattgttgagt

SEQ ID NO: 465759 - DNA, 1000 bp, Homo Sapiens; identical to SEQ ID NO: 336074

SEQ ID NO: 465760 - DNA, 1000 bp, Homo Sapiens; identical to SEQ ID NO: 157586

SEQ ID NO: 465761 - DNA, 1000 bp, Homo Sapiens; identical to SEQ ID NO: 336077

SEQ ID NO: 465762 - DNA, 1000 bp, Homo Sapiens; identical to SEQ ID NO: 157587

SEQ ID NO: 465763 - DNA, 1000 bp, Homo Sapiens; identical to SEQ ID NO: 336079

SEQ ID NO: 465764 - DNA, 1000 bp, Homo Sapiens; identical to SEQ ID NO: 336080

SEQ ID NO: 465765 - DNA, 1000 bp, Homo Sapiens; identical to SEQ ID NO: 157588

SEQ ID NO: 465766 - DNA, 1000 bp, Homo Sapiens; identical to SEQ ID NO: 340063

SEQ ID NO: 465767 - DNA, 1000 bp, Homo Sapiens; identical to SEQ ID NO: 336083

SEQ ID NO: 465768 - DNA, 1000 bp, Homo Sapiens; identical to SEQ ID NO: 157590

SEQ ID NO: 465769 - DNA, 1000 bp, Homo Sapiens; identical to SEQ ID NO: 336085

SEQ ID NO: 465770 - DNA, 1000 bp, Homo Sapiens; identical to SEQ ID NO: 157592

SEQ ID NO: 465771 - DNA, 1000 bp, Homo Sapiens; identical to SEQ ID NO: 157593

SEQ ID NO: 465772 - DNA, 1000 bp, Homo Sapiens
ttttcatgctgtttaaaaaatgtttttattccatctttccccatgattgtaagttcttccacagacgagtcgaactatcatttatattcttccttctttgtgccaggcattgtgcaatgtacattcaggtacatttttttctgcaaagactagagtgccttccatctagttgtggatcttgcatttcaaaatttttcaaacagcagctgctccatgaacagagcctctgtgagcatgtacaccaaggtggctgccttagcaggcatcatgatggcatactggagcgtggggccttctgagtctcaaaggacaaggactttcttccaagaggtagcagcaagcttggtccactgtatactcctccaaatgcatctttgtcaataactgtcaggtatttattcttgtttaggtaaacagcatccagctttgtcccattgaaagcatatccttggactgaagtaaagccattgttgtacagcttcagtgtcaaggtttcattgcatagtccctgaaaagcattcacagggattgacgtcatgtaagggttgtctgtaatttcaagtataaagaatatatcagtggaataaactttggtcaggtcagggaacattttaagtccagtgttgaaaatgccaaggaactttaggagggggagctctttgagggcatcagggtctatgtaagttaagttcctggtattccgaatttctatgtgagtcactttactcaaattgtagaaggagtgtgattccagctgctgcagagtcacatctatagatacgtagattctggaaatattgggcagattagaaaatgcatgacttggaatagttctcaggtgagtctcaataagcttcagagtctgcgtactgggcggtaagctggggatgcgttgaatatccttgcaggtgactctgaagtcctcctcctgatggcactcgcagggtggagacgaacaccccattccgcccaggtccctgggcaggtcgagcagcagcac

SEQ ID NO: 465773 - DNA, 1000 bp, Homo Sapiens; identical to SEQ ID NO: 336088

SEQ ID NO: 465774 - DNA, 1000 bp, Homo Sapiens
tttttttttgtctttttaaatgcttttatttgccaaaagttttgggtgattttgaaatacattagacatcccattcattgaggaaaaagacagtttattccaaaacattctttaatagtcctaaactgattttgtctatcagagcaaaaggaacaaaggtaaaaatccacctgaaaaaagatctttgtatcatggaaattatgaagctggatttcttagacattaaagaaattcacagacccacatagtttaaaaatttaatttttaagattaaattttcacaacacattatgactgtaaatgagttacctgaataccaattattacctctagttatttttagcaagggagctggacttcactttacttaatgctagcttataaatttaactttgtaaaattatagtggaaatgtgtcctggctagctgcctcttcgtcaatgtagacagccggcctcttggccatgaggaaatactgcaccttcctcagattccagcccatcacatactggagccagccgcagacagccgcggtggagcggcccaccccagcgttgcagtgcacgtacacgatgtgtcccttctccagcagcgcatgcagcaggcacaccgcctggggcagcatctgtactcggccttcggtgctcatatctggtgttggcatccagatgtaggccaagccttcttccctatatagtttaatcatagtgtctggagtcatgggctctgggtagcggttacagcctgaggaattctgtacaatatcccattcagtctggaaattcattacagctgtaatccccaattcatgcttcagtttgatggttacatgttccacctgacgagggcagctacccagccagatatttggtagaattcttgaataatgcatggcttggtggcctgcaatattaaaatagaagtctgttgtgtgcttcatttcattggtgtgcccagtggcctcaatccagtgtcctattgggagacaatacacaccatc

SEQ ID NO: 465775 - DNA, 1000 bp, Homo Sapiens
taattaaaaataattttattttatgttcttattacaaaagcaatacatattactcgcatattttagcatgattttattaatccaggagataaacacttctccagagaaatgcatctcttggtttacacttacaataaaaatcaatgagaaacaaagtattcaaaaaaaattcactgtcccttaacatcgttattttccttttacagaagacagatatctacgttctggaaatttaacttaagttaatatgacattagacttaaaagctctaactacctaaatttctacaaaaaaaaccccaaacaaacaaacaaaaaaaaacctgacaacataaattatattacattctgattaaatacatgcaaacagtgacaagaaaactcaaaaatgccttacatggatagaataaataactaaatataaacattgtctgatcatcaaaagacagttttcgatgcagagagaaatccatatcacaactaaatcattatagtacagcatgcggtaggcagccagatgaaaatcatctgctacagggtaaggagccttcctgaaggcagctttgtacgtagaaaagcagctcctagttgctggatgctgaaccgcctgcagcccagcttatcacatcttaggtaacagagtcctgtatcatccacagtataaaagaaccatttgagaaaagctacatatcattacttttcttgctactcacccttttgcccagcaagtgagcatttgagtgaaaaggaaaagaaagaaaagtaaagctaaaaacatactattctttaaaaaatagactttccttgcaagatataatatcctgtggggattccatactctccttcagtaacagtgacatgtcaaaaccacatttacagagatacattcatacatttgacaatcactggggaagagttatctgatttgtctgtaaggaaaagcgaatgactaatgcactgaggcgctggtccatgaccccgccaccctcacttttatatga

SEQ ID NO: 465776 - DNA, 1000 bp, Homo Sapiens; identical to SEQ ID NO: 157594

SEQ ID NO: 465777 - DNA, 1000 bp, Homo Sapiens
ttttttttttcatggttaagctgcttggtttaattttttagcacttgaaaaaaaatgtacagtagtttgaacactcagtctttgcaaacctccattgaggtcaaagatatcattcatacgtacaaaattagtttataaatttttttggcaatttcatcttagtaacccgttttgtcctattgccattgtcccaaccattgaaaaagtttacaataatttacatagaaatattttcaaagtgcttaagaatagtgattgttctctgggatatttacagatggcctatacaatgtatgtacaggtggtatacactatagcacaagtttcactgctggaatatggctttctagggaaagtgcatatttggccagaggtggcaatactgtctagaaattcaagggttacagatactcggtaaccacatccaaagctgaagtagaatgtggacaagaatatttacaaaagtaatataaaaacggtcaagtacacaagcttgatccacgcaaaggtatcttgatgttcttccagccgagaggaagaaaaagagacttcagctgctggctcggttaccattccgacgggggtattatttgtttagacctcaaaggtcaacatttgtcacagaagtcaagctagatcatcatctgtgcttacaactgatattgctgggtacgtgtgtccaacagaagcactgtgtctaccaatgtctatggagaggtcctcttcagtggttttcaagtacacaggattgtcaaagttcatgcttttcatgttcttgtgttgccaattccgccacatcaagtagccacctactgctgccatcactaagagcaagagaggaagaatggcccatgcggcagaagtcccttttgggggaacactgacctctgatactgctgtggtcacattgatcctttgacagtctcggccattttcctctacattgtacccactgggacaggaacaggtatattttggagagtgatcattaatctgtggt

SEQ ID NO: 465778 - DNA, 1000 bp, Homo Sapiens; identical to SEQ ID NO: 336091

SEQ ID NO: 465779 - DNA, 1000 bp, Homo Sapiens; identical to SEQ ID NO: 336092

SEQ ID NO: 465780 - DNA, 1000 bp, Homo Sapiens; identical to SEQ ID NO: 336095

SEQ ID NO: 465781 - DNA, 1000 bp, Homo Sapiens; identical to SEQ ID NO: 336096

SEQ ID NO: 465782 - DNA, 1000 bp, Homo Sapiens; identical to SEQ ID NO: 157596

SEQ ID NO: 465783 - DNA, 1000 bp, Homo Sapiens; identical to SEQ ID NO: 336097

SEQ ID NO: 465784 - DNA, 1000 bp, Homo Sapiens; identical to SEQ ID NO: 157579

SEQ ID NO: 465785 - DNA, 1000 bp, Homo Sapiens; identical to SEQ ID NO: 336099

SEQ ID NO: 465786 - DNA, 1000 bp, Homo Sapiens
accaggaataccacaagtttttatttgtagtcaatcccactactatgaaaagttcagatggaggtgagagttttaaagaaaatttcattaaaattgacaatggaattcacacacagtcaattaacaccacagtttgttttgatttttaaggatgaaatcaagtagtagtttaggaaacatttattcctgtatttccagttcttgctcaagtaagtcagagccctcagattcctgtctgtcataaggacgaatgatgccatcttcatggatcaggcgagggggacggaggctagatacttcctcagttgattctgctgccctctgaatgccttggaaggtactactggccatatctacgattccaccagttggacgggccacagcacccacaagcccttttccaattcctttaaagaatccagcagctccttcctttttggcaccttccacaggttttgttattattccagtcactccaccaacaactcctcgcagaaagccctttcctcctctggccaggctgtctccaaaatctctgggctgtcgactcaactcttctcttcttttttgctgatattccttgtccattgtaattgctgccaaacctttcccaacagaaccggtgattcgagatacaactcctgctgcaccacctactgtgtgtccaaagaggcttctcactccaatcactaacccctctgcaaattcttcagggccttgaacagcaccctggaagggttcatagaataaagcttcaactccttcagacagacctctaattaatccaaatgggtttccaagtacatctaaccccaatacaaggacatacatctgtttcaagaactgttcactgtaatgcctaacaacactccatataagctgatctctcttgtagaactgatatcgaatttcataataagcaagtttgaatataaggtcatccacatcagtcagagtagcacctatgcttttcaacagcaagttgacagaatgaactgca

SEQ ID NO: 465787 - DNA, 1000 bp, Homo Sapiens; identical to SEQ ID NO: 160194

SEQ ID NO: 465788 - DNA, 1000 bp, Homo Sapiens
tttttttttttttttagtagaacaaaatatatggtatttattaaacacatgtgacataggttataatatcaaagtagagcatgcatgaacagatgattcattcgtttaacaaaaacaccaattgatactgagaacactaaattattaaatttccaagacatataaaattctctttaagttaaagtgagaaagaaaaaaaaatcactagttgaataaatacagtgatttcagctggtccaatgaaagcataaggcacaaattaaaccaagggactagcgcatcagaatgaagcttgtctggcccacacaagtctctcagtgtggctcccacgaccctgcacagatgcttgggaccaagaggaaagagcacctgcaggccgggaaccctcccttccaggttcaagtttggctgggtgcccatgcttcttgtggacaggcctctctgtatcagagaaacgctgcctctaatacttttatgggtaaacaaaaccttcatgctctatcaaacaatcctggcatgaataacatgaaacttcaaattaatgtccttttccctcccaaccaaagtctagcaaataaaatacattgtgaaggaatcctcctgataggatttcagtgtctacaaagaaaacaaatgatgatgcagtacggcagggtatgccgagtgggtgtctgaaatgtgaccttgtatatccctctcttacctgctcactctgccttcactttccttcctgtcttagaagtggatcagagcctcagcgattcccattccggcttacactgtgtgtaggggaaacaacagtcacccttcccaaaggatttgaagccacagggttccagagcttttgtccatctgtaaaaagtgtatgcctctgagtgcctaagtcagagttttcttcatggttaactccaggactcttgtgtatggggtgtagttcctagaaggcatcacaatttcacgagtcctgcctgtttggctgggtagaagatcacagcccact

SEQ ID NO: 465789 - DNA, 1000 bp, Homo Sapiens
tttttttttttttttttagtattattctatttttatataagtcaaaagtgagcaaaatgtaaaccatattgttatacacataactggtaaaataattcttaaaaggacagagggagaattaccatacgtcaggatagttagctctgggggaaacagtgagtgtcaagaggggacacacagagattttggagtgctggcaagacctcctctgcatctagtttgtgattacacagctgttgctttacccattaagctctgttttaagtacttatttgtaagttatatttcacaaaatttaaaagaacaagggagaacctgtgtactaccaaatattaacaccaattaaagcgataattattgacagtgtagaaaaaacccagaaggcccagaaattggcctaagacacaaaagacacataagaatttaatattctataaaaatagcattactaatcagaggggaaatggtggtttcacatactgaaccaattggtaaattcttcgaaataaaatcaaatccctaccttatataatataaccaaatacatttgagatggattaaaaatttccttttcaccccaaacttgtactgatttagttaatgtatataaacaaaatttaaattccttttaaagataggtgtaaaagtgaaataagaaaatactagaagaaaataaggacatttatccattcttggattacaaaaatactttcaagcacatacacaaaggtagactcctaaagaaaacaacttctatactgaaataccacaaactatgttaaatgacaaataaggctaaaaaaagttacaatatatgacaaaggacggacattcttaagaacttatatgccaaaaaaagagcaaattctccaagcaagcaacagaaaaaatatgaatgagcaattctcaaaagaatgaatatagcatggccaatgaatatgaaaaaaaacacaaccttcactaagtaagaaaaacaaatacaaattttaaatgtagccct

SEQ ID NO: 465790 - DNA, 1000 bp, Homo Sapiens
aaagcatctaaaatttgctagaccaagtgatctgtggctagataagaaaccactatcttcagttcatttcccctatttgagaaatttgaattagtttccctgtttaaaattgctaaagtaaggcttgcttcagaaatatggaatagcataaatcactgaaagagaggagagtgtatcaccagcagtgttaatagcatctgggtgctacccggccagccttgcaaggctttctgtatttgtagagaaggccccgtgcaggcccatccagtgagcagctgttgaactcgtgctttccaggcacaagacacagttcctgccctcagaactcccagccagggaggtgagaataaggagctgatgcaacagcaccagtcagtcctgaggcgtgcactctgctgctgttccaagagagaaaggctgcaggctgggatacgagaagggagggccccagcaaggaaatgagactgggatggacctcgagggcttggcagagggagggaaggagggcaggcagaggactggtgtacgcagtttcagatgactcctgagaatggctgcgtagaaagtgtgttttactgttttttacgactgtcttgtagaccgcatagcactgaacactcagtaagttttccacacactgtcgtagagtttttagtgacaattctttttctgctacagatgaaatttgtagcttagggcatcacattttatcattgtctttgtttcttttcagttccagctgtggttatattgtaaatgaagcatctaacatgtgcacaacttgcaacaaaaactccttggactttaaatctgtctttctcagtttccatgtgctgattgatctgactgatcacacaggcacccttcattcctgtagtctcacaggaagtgttgctgaggagactttgggctgtaacctcagaaacgggaagctgagggaggattgcttgaccccgggagttcgaggctgcagtgagctgtgatagcactgctgcactcc

SEQ ID NO: 465791 - DNA, 530 bp, Homo Sapiens
ttttttttttttttttttgaattacaaagctacttttaatactttggggtgagccccacaggaataaaaaacactgggaaggggtaaccccctcacccccgggagtggcccagggggagagaggctacctgaggggaaggaagcacaaaagggacccgctgcagactcagggcaaagggaatgccatcggtgctgggacctgtgagcactacaggaggaaacgcgagcgtggtgggactggctccaggcacacaggcgaagggcaagagggttggacacgaagccacaaagctacttgggttcctccttcttctcgtttgcctttttctgcttctgctgcatgatctccgagtccctctgcttgcgggcggcagcagaaagcccgtcatctcggcgctttcccttaaccgagtcgctctgctttttcatattcttctggcgggcgagctcacgctggttaccgcgggtcatggcgacggcagcggctccaacctgcctccgttacgtcccctcgttctgtcggacgttgc

SEQ ID NO: 465792 - DNA, 1000 bp, Homo Sapiens; identical to SEQ ID NO: 336102

SEQ ID NO: 465793 - DNA, 1000 bp, Homo Sapiens
tttttttttttttttttgaaacagagtctggctcttttgcccaggcttgagtgcagtggcacaatctcggctcactgcaacctccgcctcctgggttcaggcaattctcctgtctcagcctcctgagtagctgggacaggcgcatgccaccatgcccagctaatttttgtattttcagtagagtcagggtttcgccatgttggtcaggctggtcgtgaacttctgacctcaggtgattcacccacctcggcctcgcaaagtgctgggattactccccgtgagccaccacacccggcccatttctttctttctttagcaacaatagacattgttctacttcctggattccacgatctaaagctaaaagataaggagaatctggcttcctcccaaagcagctatgatgaactcctatcaacactgttttggacagctggaccctgaagggtacactcaggaaaacaggaatatttgtggtcatttccaaacccaatgcatcagggccgactttagaaacatagtcacaattttatgcctcatactgcttaaacaaatttagtgctatagtccaccaaagatcttaatcaaaaggaaattagaaagggtctggctggggaacattttgagacccaactaaaacccaagatatagttagtctgatgaaaaagtggtcacccaaacatttacttatttttcactcttgattctgtgaaaaggcttctgaagaccagctttagtttctctccaacctaggaccttattgattggtgctgagggctttttcagaaggtgtaactctttccattctgttttggaggaactgatgaggcttgttttctctgggtgtgcttcttgttcccccagaatgtgtaccatttcctttgatcatcacaacagtcctctgaggcaggcagcagaggccaaccctctccatttttactgatgagaataagcagatgacttgcccagggttttcttataagtaaagctatgatactag

SEQ ID NO: 465794 - DNA, 1000 bp, Homo Sapiens; identical to SEQ ID NO: 336103

SEQ ID NO: 465795 - DNA, 1000 bp, Homo Sapiens; identical to SEQ ID NO: 336104

SEQ ID NO: 465796 - DNA, 1000 bp, Homo Sapiens; identical to SEQ ID NO: 336105

SEQ ID NO: 465797 - DNA, 1000 bp, Homo Sapiens; identical to SEQ ID NO: 157602

SEQ ID NO: 465798 - DNA, 1000 bp, Homo Sapiens
tttttttttttttttttttttttttcttttacctttatattgatatttaaaagaaaaagaacatgatggatacgggaatgggggaagggacaacggttctacgattaacaacaggaactgataggaaccagaagctccagggatttaaaaaaaaataaaatatatatttatacatttatatatatatatatatatatcacgttatgtatgtgagtcccagacaagcaggaagcagcagcaagaagcaactagcacacagaaacacccgtgcgtgtgcactacacattcaagcaaagccattcctctagctaggacgcagcaatccccaccctcccacctacgggcaaaagagaacagctgaaaacaaacttccctctttaagggccactcagtaatttttgtcctcatggccaggaaaaagaaagaaaaacaaaacaaaacagaaaaggtcgatcttgccttgaaagcgggcagtggctattttcttctctctgccaaagcaggacacgttattcttaacacagagggccacatcgctgtccctcacaaatacttcagacagttgtcttcaacatcctgtggttcttcgtccgattcctttttttttttgagatggagtctcgctctgtcccccaggctggagcacagtggtgccatcttgacttactgcaacctccacctcccgggttgaagggattctcctgtctcagtccccccaaatacctgggattacaggcgcccgccaccacgcccggctaatttttgtatttttaatagagacatgctttcaccatgttggccaggctggtcttgaactcctgacttcagatgattgcctgacttggtctcccaaagtgctgggattacaggcgtgagccaccacgcccggccccgactccttctttttttttttttttctttttgataccacagagaatagttgggatgaaaggcatccagcccctgcttcctttaagatggcctctaggcagtgggtgtt

SEQ ID NO: 465799 - DNA, 511 bp, Homo Sapiens; identical to SEQ ID NO: 157603

SEQ ID NO: 465800 - DNA, 872 bp, Homo Sapiens; identical to SEQ ID NO: 336109

SEQ ID NO: 465801 - DNA, 539 bp, Homo Sapiens; identical to SEQ ID NO: 336110

SEQ ID NO: 465802 - DNA, 1000 bp, Homo Sapiens
ctaaggcctttttccagtatgaattatctgatgtttaatgaggctggagttgtatttaaacactttgctggattcaccacactcataagacctttctccagtgtgagttttttggcgctgaccagtattacatttgttgaagtctttcccacattcccttaacttaaaaggactttctccagtgtgagactgctgatgtataataaggctcgatttagtcctaaacaattccctacatttactgcactcatgaggcttctccccagtgcaaactttatgatgtttaatgaatgtagagcggtatctaagaaacttcccacagttgctgcattcataaggcttttctccagtatgaactctctgatgaataatgagtttgtagctatctctaaaaaatttcccacattcactacactcataaggtctttctccagtgtgaactttctgatgtctactcagtgtacagcgatatctaaagaatttcccacatttgctgcatttataaggcttttctccagtgtgaattctctgatgaataacaagtttgtagctgtccaaaaagaatttcccacattcattgcattcataacgccgttctccagtctggattttctggtgaccatctagatgagcctgtgtaaggaaggccttcccacattcactacacacataaggccttggcctgaggtcaatcctcttgtgttgaatgaggtcagacctttttgaaaatgcatcagtgtggattttctcatgctgaactaggtgggactttctaacaaaggccttcgcacattgagtgcattcataaggccgttctccagtatggattttctggtgaccaaccagatgagcctgtgtaaggaaggccttcccacattcactgcatgtataaggccttggcctaatgtcaatcctcttgtgttgaatgaggtcagacctttttgaaaatgcatcagtgtggattttctggtgctgaactaggtgggactttctaacaaag

SEQ ID NO: 465803 - DNA, 1000 bp, Homo Sapiens; identical to SEQ ID NO: 336111

SEQ ID NO: 465804 - DNA, 1000 bp, Homo Sapiens
accttttttaacttttattttaagtttaggggtacaaatgcaggtttgttacataggttaactcgtgtcacggggttttgttgtacagattatttaatcactgaggtattaagccagtacccattagttatttttcccgaccctctccctgctcctaacttccaccctccaaaaggacctagtgtgtgttactcccctctatgtgtccatgtgttctcatgatttagctcccacttatgagaacatgcagtatttggttttccttttctgcgtcagttttctaagattaatgtcccccagctccatccatatcttggcacaggacataatcttgttcttaatggctgcatagtattccatggtgtatatgtaccacattttccctatccagtccgtcattgatggacatctaggtcgactccataaccttgccactgtgtacagtgctgcaaggaacatacatgtggcatgtgtctctataatagaatgattgtattcccttaggtatatacccagtaataagactgccgggtcaaatggtatttctgtctttaggtctctgaggaattgccacactgtcttccacaatgactaaactaatttacactcccaccaatgatgaataagcattcctctttctcaacaacttgccagcacctattatttcttaactctttaataatagccattctgactggtgtgagatgatgtctcattgcagttttaatttacatttctccaatgatcagtgatattgagctccctttcatatgatttttggccacatgtatgtctattttgaaaagtatctgttcatgtcctttgcccacatttttaggggctgcttttctcttgtaaatttgtttaagttccctatagctgctggatattagagccttgtcacacatatagtttgcaaaaattatctcccattctgtaagttgtctgtttactcagttgatagtttcttttgctgtgcagaagctattcagttcaatta

SEQ ID NO: 465805 - DNA, 1000 bp, Homo Sapiens; identical to SEQ ID NO: 336113

SEQ ID NO: 465806 - DNA, 1000 bp, Homo Sapiens; identical to SEQ ID NO: 336114

SEQ ID NO: 465807 - DNA, 1000 bp, Homo Sapiens; identical to SEQ ID NO: 157606

SEQ ID NO: 465808 - DNA, 1000 bp, Homo Sapiens
ttttttttttttttttttcacaagaacaaagttacaatagtttaataatttaaataggaccaacttcaggaacatacatactcatacataaaattaaacaatttaattttgaacagtgtattgaaatacatcaaattcttaaaaatcccccaaatggactcaagatcatggatatgaaaaggtaattttgaagtactaaagactagagtaaaacagacaaagtcattactttgcatttactaataagacaacagcctgtggatacattagacctttataagaacacttctaggaaatgttagaacaacgagtcattaaaaaggaatataaatgagttcataaagataaatgtatagctgacaatttctttggtcctcgaagtcacacttgtttttactttaaaatgccaaacatgagttgagtgctcagaattctacctataaatgtctaaatattaagcaggctaatgtttatactgggctagatttaaaaaggtactcaagccaaccatcactgtacttaaactccagaaagaaaaagctaggaaacagaagtagagaggaatggaaaaaaacaaaaaaacccaatacctctgccatcttgccccatcataacccaaatagcatcaaagtggcagagatgggactaaagttaaagcaagcatcaaagttattacttttagggtaatgggatgaatttgaagagcactatgtcaaccaaatactaaacttcatggaataactgtgtttgtgtttctgtggaggagttgcggttttgtttgttttaatttggcccacgctgccccaatggaggaaattttaagataatcattaataaggcaacagcttccaggattaaaatacctataccatctatacggagttacaatgaggacaagacccacatagaccacaaaggaaaccgggaccagaagcttccagtgcattttcacagatcgttggtacgatacgctttggttaaaacgttggacacagctcat

SEQ ID NO: 465809 - DNA, 767 bp, Homo Sapiens; identical to SEQ ID NO: 157607

SEQ ID NO: 465810 - DNA, 1000 bp, Homo Sapiens; identical to SEQ ID NO: 336108

SEQ ID NO: 465811 - DNA, 680 bp, Homo Sapiens
tacgtatgcaaagatatttattcagggaagtgaaagaaaagtgacaattgcacaggtgttagaagcccatgcccaggtgacagacagacacagaaaacatcaacagcattttttgatggttcccagggacagagctgctggtccttcttccaaagctctgggaactgacactgctgaggacttcctttctcagtatccacctggacagtggcaatatggcagcctcagaaaggaaaccttttgctatcagggatcatcatgggcagatcactggctaagaggaaagaagctaactgtgtatccatggtaggctttgatgagaagatgcaggtgaagctgtggaacaaggtgagccaattatccttatcctttcatgctcctgatgaattctgaagctgttacttgctcttgggtggacactttggctggcagggtggggaaggtgtcacaggaggacatttttgctggcactgctgaggtggggagggctgtggacactttggtggtgggcagggctcagggcacttcgggggtggacatggctctgggcactttggcgtggggcacacaggaggtggctggcagggctgcttgcactgctgctgttgataagacatcctgctggagtctcagaatcaggttctccaaagcagatcagtgctcaagtaccaggagttttt

SEQ ID NO: 465812 - DNA, 1000 bp, Homo Sapiens
agacggagtctcacactctgttgcccaggctggagtgcagtggcgtgatctcggctcactgcaagctctgcctcccaggttcacgccattctcctgcctcagcctcccgagtagctgggactacaggcgcccgccaccatgcctggctaattttttttgtatttttagtagagacggggtttcaccatgttagccaggatgatctcgatctcctgacctcgtgatccacccgcctcggcctcccaaagtgctgggattacaggcgtgagccaccgcgcccagcccagccctgtaatattctttataataaaccagtagacaggaaactctggcccagcacccaggactcaagctcagctccttcaccctgcttgggtctcgccctgtccctgcaccccacccagtgcacaaacccttctcgtacctgtagaagtcgtccaggcagtacacctcgttctggctgcccagggcaaagctctcatccccaatgcaccgggcgcaggtcacacacgtgaagcaggaggggtggaaggcctggcccagggccctgatgatgtggtcccggaccacctcgccacacttgccgcacctctccagtgtgtcctggtagcagggttcgcagaggggtcgcccatccttctggtagaagctctgcccagccagctggcggcggcaggtgcggcacgtgaagcactgggcatggtactgcctcttcatggcctccacagccagctctcggggggacacggtcttgtggcagaaggcacagatgtctgtggatgcccctttctcaacaggttctgccgggggaggtggcagctcttcctccatgggcctgaggggaccgggctggactgaaggtccctccgctggggcctgtggtgggggcgggggcggggacaggtgcagctgctctaagtctgcaatgagtgaggcccccattggagcaggagcctcctcttcagaaggcagaagcactggagggggcggtggagggggt

SEQ ID NO: 465813 - DNA, 1000 bp, Homo Sapiens; identical to SEQ ID NO: 336118

SEQ ID NO: 465814 - DNA, 1000 bp, Homo Sapiens; identical to SEQ ID NO: 336119

SEQ ID NO: 465815 - DNA, 1000 bp, Homo Sapiens; identical to SEQ ID NO: 246409

SEQ ID NO: 465816 - DNA, 1000 bp, Homo Sapiens; identical to SEQ ID NO: 336121

SEQ ID NO: 465817 - DNA, 1000 bp, Homo Sapiens; identical to SEQ ID NO: 157608

SEQ ID NO: 465818 - DNA, 1000 bp, Homo Sapiens
acacaccctttatatttttattgaggagagaaagctttagcatacagagcagcttcttatcttcacaacacagtaatgcaacaataacacatgtattccaaaagggtttcctcccgagcctctgggagaccttgggctgccttcatacccctgcatgcatcccctccccccacccctctttcaacccaagaaagctcccaaagcccacagttcctcttacagctcttatggctgttacatcacaacaaatattgaagatctgggaaaggaaggaagagggtcaaagggaagcccaagcccctcctgccccagagggtggaaaccagctcactgctcatctgctctatccctggctgtagctctgagggttcagggtgagaagcaccatgggaacaggcaggacctgtgctgaagggtccctggaagtgtgggtttaaggcacccgtccttcacacttctccacagggacatggggcagcagggccagagtgttgaccatcagcaaacagggtccactgcctcgaagaatagcaggtcccctcgaagaatagcaggtcccctcgaagaatagcaggtccccttctggaatgcactcttgaggaaatcagataaaatcagctcccactgatgaatagagacctcaccagaaaccagtcagaggactgggtttctctgcgactcctcttcctccagcttttttctcttgcctccaggcccaagatcctaaggtccgcctgagattatcggtcagactcccatgaggaacagaggttgaatttactatgctttcttccctttggccacaaaccctggctgcacttgctctgctgccagtcactgtgcagaaagtccagtgtccaggggcagttcaggccagcagtggatttggctggcattttatggccaaaactgacatagtaagtgtgtgtttttcactgcagaagcagtgctttctggactcaaggcaagcagtgggtctctttataagggcacctgagtt

SEQ ID NO: 465819 - DNA, 1000 bp, Homo Sapiens
tttttttttttttttttttacttgttaaaaacatttaatttagttaaaaaccaaacaaaaaagagctttgtttcttttcacattcatttctcagtttagatcatctttaattaaatataaatgtaagaaagttggaaaatgcaaagaaacgactcgttgtaagcacataactcacgtggggggaacagacatgggtgggcacactagcaaacacctgccagctgcatgtggacccaggtgggcaccggactgttttaaacacaggagagggcccattgtctaactggtgagttggttgagtggaagctggttgagaacttttactgcaaaccatttacagtagaccacaattttatagtcctgtttggcactttttcatatcactgggagcctgaagaaatagaagtgggttggatctctttcagcctcggaaaagcctgccattcccccatctaaaaaccctttccccattctcttactctgtctcatcatgtatgtaacatgtatccatgtatcatcaagtgatctcattttatattgtttacttgaatatttcctgtaacccccctgtctgattccactagaatgtgagctctatgatggccaagcctctggctgcactgtgccccgtgtgtccccagcatcctggtggggctcaatacacagagagctcataagtagcatttgaatacatgaatcaaagtatggaatggcccagtttactgcagcctttttgcaggtgcaaaagatgatcttttagaaagcagaaacagggggtctggtgcatgagatctttttctcaatgtgactgtgctgtgcagaccttcacgtggtgtcttgtgaaagactttgaccactgtgtggactttccttcagtgtatctttcagagtgcaagactgggaatggaaagaactacagagggacgatgtccaaaacaaaaaatggcatcacctgtcaaaaatggagttccacttctccccgcaaacctaggtcagactt

SEQ ID NO: 465820 - DNA, 1000 bp, Homo Sapiens; identical to SEQ ID NO: 336123

SEQ ID NO: 465821 - DNA, 1000 bp, Homo Sapiens; identical to SEQ ID NO: 336124

SEQ ID NO: 465822 - DNA, 1000 bp, Homo Sapiens; identical to SEQ ID NO: 336125

SEQ ID NO: 465823 - DNA, 588 bp, Homo Sapiens; identical to SEQ ID NO: 336126

SEQ ID NO: 465824 - DNA, 1000 bp, Homo Sapiens; identical to SEQ ID NO: 336127

SEQ ID NO: 465825 - DNA, 537 bp, Homo Sapiens
tttttttttttttttttttttttttttttttttttgtttagctttgtttataattaataatttgtaaataatttagacacactgaagaagaatcaaagagaatgtatttccgtgtgtctctggagatgcactttatccaaatatggcattattttttggtggaaagtgctttctctccatgtgagcaaggagactcagcttgatccaggagctcctgccactgttgggaacaggctctttggttgtggtatcagtaaaggactgataggcatccgggaagtgcctcttttgaactctcagtaagctgacttgattgcttcgttccaccaagcagttggattcacgctttttgtttatctcctccaggagatgttgtttgcttactccatgttttttcattatttcaatggttctgtttatagatgccattatggtcacaaaccaattgtcaagtgattcttgctgtcctttagcatactaccatacagcaacccaaagcgtgtttcaagtccactggtgtggattagcccactggga

SEQ ID NO: 465826 - DNA, 1000 bp, Homo Sapiens
agaccatcaaccttacccaattggaagaacagtaattaaattaaaagcaatggtgaaaattctaaggaactcaagttgttgaatttcagaaggaatttctttgataggattatttctcaatttcagtatttgtaaatttttaagacataatatttctgtgggaaagtaatgaagatcattaaatgataaattaagatatatcaactggaaagccaaaggtgttaagtctggacaatttaggataaaaaagccattcccctcaataccatggaaactaatctatattgggaaatttaaagcaaaaataattgataatacaggagggcactgtcattaaaaagatctagcataccttcagattaagtgcatttctcccatatacttgacagtttactatggccaggttggtcatggctgttattgtttcatatcgtgttgctgcaacagtcttaaaaccttcaccacgtacaacgtgtatctctgattctattttttcagttttggtgagaccttcaggtggtcttggtgggatttgctttgggacactttctatatttccattttctgttacaagagtttctatcacagactgcctgtgaggttttcttggtaaaactggtgttggcaaggaaacaaaacctggaaattcagtaactcttagtgtcaatgtagcagttgatttaaaatgttcaggccactgtccttctggtttcatagatacagtcataggtggagggcttggcactgttgcacttaagtctctcgagatgtgctgataagtatagcctggactctctggtaaaggttgatgcttagggtgcattttctcaagtttttgagcgataactgagccaggagtacttttaggtttggaaaacttggaagaaagaattaaaatgttttctagccttttttcagtataaacatctttcatagttttaaactttcttgaactttccattttgtttgtttgtttcccaaaaattcgagtagaagctga

SEQ ID NO: 465827 - DNA, 1000 bp, Homo Sapiens; identical to SEQ ID NO: 336128

SEQ ID NO: 465828 - DNA, 1000 bp, Homo Sapiens
tttttttttttttttaacataacttatttaaaaacatttatatttactcagaacttttccaattttgcagtttcacgatcagcctccaaaaagttgtgctagtgtgtgttcagaattcattaaaatctatccagcatttccacttaagtgcttcaatatgtatgaaaaaatgtcatttgaattctctttgatgatcaagttgaacatccttgtctttgtcatcctaaagctgttcttttcagagagccaaatcccatcagattgctccaggtctgtatttgagaaggaaagttagaaccacttcgtctaactgcaacagattctcttctgaatatttaccccaacctattgatgaagtactcctgtgttctcagtgaactggttttgtttggagctcttgtaataatggtgcatggttcttggaatgatctcaaaatattcccctctttctctttcacactgaagagcaggttcatccccataggatgttaacaagtgtgtttagcttataacccttctagaatcatcgccctcaagtgggcccacaaaaccctcatttgcatcagtgtccacttggttggaattcatgttgtctccttcaggatcttgttgtgaaggctttagttttcccctgccatgatctttaaaagaatattgtttagagctgtgaatatttccttaatgaaagattcttattttaaaatgtctgagtctctttcatggaaggcagccttatcaggatctgagggaacttcagcagaacatggtggtgtttgctgtaaaacgtccacatttgaaaattctaagtctctaagtgagcaatgccattctgctgccttggattgaagagctgtgtcataatcataagtgaacatgcccggaaactcatcccctaagggactattccctggtgacctgggccagggtgacaggccctcagatctatcagtgtcagaggcattttccagatgagtcttgtacatgccagagtctggagcag

SEQ ID NO: 465829 - DNA, 1000 bp, Homo Sapiens; identical to SEQ ID NO: 336129

SEQ ID NO: 465830 - DNA, 1000 bp, Homo Sapiens; identical to SEQ ID NO: 336131

SEQ ID NO: 465831 - DNA, 1000 bp, Homo Sapiens
ttttttttttttttttagaggctagaagggggttgtttaatgaaactaggggcaaggaggcataacgaacgaggaagttaaactttaaaacggagaacaaagaacagagaagctgaacatactgacatatttgttctttgatgaggaactcagaactcattgtacttaatcttccccctcttgaattttaaaggatgtttacaggctaaaatctttgaagaggaattcactgtatcctattcatcaggtgttctttccaccaagctttcagccgtgtcaggtgttctttccgccaagggtgcagcctcatcaggtgttccttcagatgttccttctggattactattttgagaatttttagatatcttttgtttatattccaaaagttgttgatgaacgctagcctttaaatgtaaacacttagagattaaatccacaagcaacagcataacgttctgcaatcattccacatgtagcttcagcacagatgtcaacattttgctgaagaagcttgccaactatctctgatgatccatgacatatggcaagcatgagggctgtgcatttaaacttatcaactgcatttgcatttgcattttttgtcagtaaaaattccacaatttcctcacttcttttccttatggccagtaaaagtggtgtgtggccagccttgttcttcacttcgatgtctgcaccacaggacagcaattttgccaccactgacaaattctcactgttaacagcataatggacagctgtgttgccatacacatctacaatatttggatcagcaccagaatctatgagaatatttgcacaagcctccctctggcattgcagagccttcatcagaatggtcctgttttcaccatcaaggacgtcaagctgacactttctatctaccagaagtgttactacttctgcatggccattggcacaggcccagtatagagcagtcctctccttcgcatctcttatgttcaggtccattgtcgtcttc

SEQ ID NO: 465832 - DNA, 859 bp, Homo Sapiens; identical to SEQ ID NO: 336133

SEQ ID NO: 465833 - DNA, 1000 bp, Homo Sapiens; identical to SEQ ID NO: 157609

SEQ ID NO: 465834 - DNA, 1000 bp, Homo Sapiens
tttttttttttttttttttgtagtcagctatttaattaggttcttaagacatttagaacaccaatttgtgaggataaattccattcgtcagagcaaacacagatcgcaggtagccctggagctgaggaatagctttgatttttggtaaaatttgtgagtccacagctttctgatcaatcttgcgctgctccgtaatctcatatttctctttttctgtgtcgaagatctcaccttcctggtgtctgggcttccgcagcttcttcttcttgaagtaagcatcagtaagatgttttgggatttttacattgctgatatcgattttggttgaagtggcaatgacaaatttctggtgtgttcttcgtagaggaactcgattgaggaccagaggtccagtcacaagtaataagccactagccagctgcttcaggaaaaccaccctcttgcccctgtggcgtccagtgaggatgatcagaatggtcccgggggtaatgctggctcgcagttttctcacgtgctgactgaagggttttttgccgtggctcaacagctttcgaggcacatcttcagtaggataatatctaggcattttgcgaagtttaaccacccgggtaccgccgttcttgtcaccaccaactggttttgtaacagttgcgagaaccttctccttctttttcttttcaaccttggatttagcggctgagtacttcctcttgtacatggcctttctggaatacatggcagatcgggaatacctgccaattcctctgacaaggacagggttgcggctgcaatggggcttccccttcttgggctttttagctttgaggttaccctttttcaccttgccaccagcatcaaccttcttggcttcgggtttcttctctttagtatctggcttctcaactttttcacccgccatcctctttgtgccctgccgcaaacccaaacaacaaaaatgaagcgtctggaaggcctctcagttagccttggacatgtccga

SEQ ID NO: 465835 - DNA, 1000 bp, Homo Sapiens; identical to SEQ ID NO: 157610

SEQ ID NO: 465836 - DNA, 1000 bp, Homo Sapiens; identical to SEQ ID NO: 336137

SEQ ID NO: 465837 - DNA, 1000 bp, Homo Sapiens; identical to SEQ ID NO: 336138

SEQ ID NO: 465838 - DNA, 1000 bp, Homo Sapiens; identical to SEQ ID NO: 336139

SEQ ID NO: 465839 - DNA, 1000 bp, Homo Sapiens; identical to SEQ ID NO: 157611

SEQ ID NO: 465840 - DNA, 1000 bp, Homo Sapiens; identical to SEQ ID NO: 157612

SEQ ID NO: 465841 - DNA, 1000 bp, Homo Sapiens; identical to SEQ ID NO: 157613

SEQ ID NO: 465842 - DNA, 1000 bp, Homo Sapiens
tttttttttttttttttttttttttttttttttttttttttttttttttttttttaggaaagaagggagtttatcactgtaactggatacagggagaaggctggagataattccagcagaccaactcaaagtgctacaattttcttactgtttatataggttggggttatgtgcctacatgcagtacagcaatcacctaagtctactggtaactaattttgttccaaggagaaggtcagaggcaaaaaaaatgcttgctaagtccgattaaaaggggcccagtgccttcaaggcctgtctactgtggtaccggagtgattatttcgattgtatctcctttacagcttggtccagagagctgccttagactatccaattgatctattcaaacagctgcctgttcccttaacttgtcttcagattttgtcgacccgagatgggtcctggcactaggaatgtaaaaccgttcctattattttggcttgctccagcaaaagagaagcccatgcaaggctcctgctgaccatgtttcatttctagctttgatgtctgggcactgatttccctagatttaactatgtgctcaatggtaaggcagtgctgtggaaatctgtctgtgtaactggggtgctatgcaggcctgtctgggtgactgtcagggacaactgtcctaccacaccaaggacacagccctgggggtgcttttcttcatagccaaagaagctgcaggaaacccaccctagtgggacaaagaccaatgcagggtcagtccccacagccaggtgatgcaaacaggctggacgtgggccgcctcccctccagcttgacttgtgacagggaaaccaatgcagcagcagcagggccaccagagtcctgtcctggggacaggcttccttccagcgggcggggagtgggtgctcctgccagaccagcctggcttccacggttccagagaccctgttctccctcagcccagtccccgcccccactccttggcttt

SEQ ID NO: 465843 - DNA, 1000 bp, Homo Sapiens; identical to SEQ ID NO: 157614

SEQ ID NO: 465844 - DNA, 1000 bp, Homo Sapiens; identical to SEQ ID NO: 157615

SEQ ID NO: 465845 - DNA, 1000 bp, Homo Sapiens; identical to SEQ ID NO: 336146

SEQ ID NO: 465846 - DNA, 1000 bp, Homo Sapiens; identical to SEQ ID NO: 157616

SEQ ID NO: 465847 - DNA, 1000 bp, Homo Sapiens; identical to SEQ ID NO: 246410

SEQ ID NO: 465848 - DNA, 1000 bp, Homo Sapiens; identical to SEQ ID NO: 336150

SEQ ID NO: 465849 - DNA, 1000 bp, Homo Sapiens; identical to SEQ ID NO: 336151

SEQ ID NO: 465850 - DNA, 1000 bp, Homo Sapiens; identical to SEQ ID NO: 336152

SEQ ID NO: 465851 - DNA, 1000 bp, Homo Sapiens; identical to SEQ ID NO: 336153

SEQ ID NO: 465852 - DNA, 842 bp, Homo Sapiens; identical to SEQ ID NO: 336154

SEQ ID NO: 465853 - DNA, 1000 bp, Homo Sapiens; identical to SEQ ID NO: 336155

SEQ ID NO: 465854 - DNA, 1000 bp, Homo Sapiens; identical to SEQ ID NO: 157617

SEQ ID NO: 465855 - DNA, 1000 bp, Homo Sapiens
ggtgtgtaggtatggatttagaaatcggtccactcagaacgcaggggctttcaaaagtttcctctaggaagcatctgtcagtataccctcttaatgtttgacagttctaatcacaattatatttagaatttgagaaacccccctgtgtgtctaatggctgccagcgtgatgccagagaaccctggcaggtggcctgcagtaagcagaaggcccacaccttctgcagagccaggagcagtgcccgagtcccccggtctgtgtctatcctttcacccacatggtcactgtggagatgaccatctgaccagacttcggagcccccaggcagaagaaaggctgcagggggcctgggaaggtggcctgggagtaggtgtgcaggtgggacccatcgcttacactgtagaaggacacttccccggcttcgaagtccaggaagatgcccatgtggctgggaggctccatcagcatgaccggggttagggcagagaaggtggataagtacttggtccccttggacagctgcaccacccagaagccgttttcggggcacttggggaccctgtctttccggctcacgttgtccctgcacacacccagggcccacaacgcgtccccggtgatgttcatgcccacctcccagtagtgcctcccagaggagaaggccgtctggcccacagcacaggggtaagccacaaatcggtccttgctgcagaacccactgccctccggcgaagagccgaggtagcgcctctggcggctctcatacaggaggaggtaggggtacgcggaggtggcatcaggcaccacatcctctagaaagcctcttagcacttcaatctgtccgggaactctgcacacagtcctgggtctggttgggggggcaacctctgggcactgcacactcacgttgttcttcctgctcaggggttccttcatgtcctgcagcatctggaggggcccctgtgtgctccgctcctccagctgcagcagcagcagctcc

SEQ ID NO: 465856 - DNA, 1000 bp, Homo Sapiens; identical to SEQ ID NO: 157618

SEQ ID NO: 465857 - DNA, 1000 bp, Homo Sapiens; identical to SEQ ID NO: 336158

SEQ ID NO: 465858 - DNA, 758 bp, Homo Sapiens; identical to SEQ ID NO: 336160

SEQ ID NO: 465859 - DNA, 1000 bp, Homo Sapiens; identical to SEQ ID NO: 336161

SEQ ID NO: 465860 - DNA, 787 bp, Homo Sapiens; identical to SEQ ID NO: 157619

SEQ ID NO: 465861 - DNA, 1000 bp, Homo Sapiens; identical to SEQ ID NO: 157620

SEQ ID NO: 465862 - DNA, 1000 bp, Homo Sapiens; identical to SEQ ID NO: 158806

SEQ ID NO: 465863 - DNA, 1000 bp, Homo Sapiens; identical to SEQ ID NO: 336165

SEQ ID NO: 465864 - DNA, 1000 bp, Homo Sapiens; identical to SEQ ID NO: 157622

SEQ ID NO: 465865 - DNA, 1000 bp, Homo Sapiens; identical to SEQ ID NO: 336168

SEQ ID NO: 465866 - DNA, 1000 bp, Homo Sapiens; identical to SEQ ID NO: 336169

SEQ ID NO: 465867 - DNA, 1000 bp, Homo Sapiens; identical to SEQ ID NO: 157624

SEQ ID NO: 465868 - DNA, 1000 bp, Homo Sapiens; identical to SEQ ID NO: 157625

SEQ ID NO: 465869 - DNA, 971 bp, Homo Sapiens
tttttttttttttttttttactgttatcactacaaattttattcagaaacccatctttgtatgtttttttttttgttgttttttaaaaaaaattccccttatgaactggtttggtcaatcaactacaacactttctagcagacataaggtaaaaatggcatggctcagaatcgcccagatctttcacgatctctcgaccgcctcctgtcacgctcccgtccgccgccacctccaccaccgccaccgccaccgccacgaccacggtctctagaccgagaacgacgctcccgggatcgggatcttgatctatgcttcttgcgacggcggccatacagctcccgccgcagctctctggaaatgggcttcaaatgcatgaagttgcagaagccgcctcgtgtgcattctcccatctcatactgacggcagcaggcttctctgaagtccgtcacgggtgacagctcggcgtggatcggctgtccattaaaccaacggttattcaagtcaatcacagccttttccgcatcttcctcacggcgaaacttgacgtacacgttccccaccaggtggtctcccaggttgtcacagacgttcatctcctctacttccccatacttctcctccatttctgtaaaaacctcctcaaaaaactcatcatagtgttcctgcatctccacatcgctcacggcacagtgtgagccgtcagccgtctgtgcactgttttggggattacgatagatgttttgaatcaagatggtctggctaaacgtcggtttattgtgcaaccgagagcacctgtctccatgacgacatgctccaattttgaaataaaatgaacagttgactttgtctttctcggtgccgaagatggaggccagatactccgccatttcccacccgccgccgccgctgccgtcgacactgctgccgacgccgccgaccctgccgacgccctcgggagacgtcacccggac

SEQ ID NO: 465870 - DNA, 686 bp, Homo Sapiens
aaaacaaaaaccaatttacattttatttaagaaaagcaaacagatgggcctgctaacaatgtcaaagtctcgtttacaaagaaaaaaacaaatctggaacctgaagtcaaacgagttcaaaataaaaagcaaaccaataaacagaaaccaacataaacagaagttactaccatctccctcagcctgtgaaattctggaacttctctttctttctcgccttcttcttctctcacctggaagacgagcagagtgaacacatcaggggttgtcagttccccagatggcaccacattcataaaccaccgactccaggagaatgtaggaagcttagttaaggccaaagttctctttggatcttcctcatgggctgtacatttcttacattttctcctgtgcttccttcttcccatcatcattgcccaagtgtgtcttctttcttctccttgtcacatttcctttgcccgctctcacatatgcagagatggctcttggttttccttctgaaatctcatagtttggaggtaaacttgttagcaaggccacttcatttctaccaggcagtggggccccaagtgcagggccataggaagtacaagtctgggagatactaggctgcactgtctgtagagaatcagtggcagtcttaaggcattccttaagttcgttgtgccccaatttgttcatct

SEQ ID NO: 465871 - DNA, 1000 bp, Homo Sapiens; identical to SEQ ID NO: 157626

SEQ ID NO: 465872 - DNA, 1000 bp, Homo Sapiens; identical to SEQ ID NO: 336175

SEQ ID NO: 465873 - DNA, 1000 bp, Homo Sapiens; identical to SEQ ID NO: 157627

SEQ ID NO: 465874 - DNA, 1000 bp, Homo Sapiens; identical to SEQ ID NO: 336176

SEQ ID NO: 465875 - DNA, 1000 bp, Homo Sapiens; identical to SEQ ID NO: 336176

SEQ ID NO: 465876 - DNA, 566 bp, Homo Sapiens; identical to SEQ ID NO: 336177

SEQ ID NO: 465877 - DNA, 1000 bp, Homo Sapiens; identical to SEQ ID NO: 336178

SEQ ID NO: 465878 - DNA, 1000 bp, Homo Sapiens; identical to SEQ ID NO: 336179

SEQ ID NO: 465879 - DNA, 1000 bp, Homo Sapiens; identical to SEQ ID NO: 336180

SEQ ID NO: 465880 - DNA, 751 bp, Homo Sapiens
ctgtcacccagggctggagtgcagtggcaggatttcggctcactgcaagctctgtctcctgggttcacgccattctcctgcctcagactcctgagtagcagggactacaggtgcctgccaccacgtctggctaattttttgtatttttagtagaggcagggtttcacagtgttagccaggatggtctcaatctcctgacgtcttgatccgcccgcctcggcctcccaaagtgctgggattacaggcgtgagccaccgcgcccagcccttgcgtgtgcatttctttattccggattcgcagcatcatcttttgggctttgggagtctgatgtaatttccagttcatactcctttttcaattgctgcactttcatgtttaggtccagtaaagttctagccagctggtggttttggaaatgcatttccaccagctccgcccgcagcctggccagggtggcctcaacgcccgtccagctctgctcctcccgcgccgccgccgccgccgccgcctcctgcacgcgcctcgagatcgcgcgctgcaccgcccactggaaggcgcgcgtcagccgtcgtctgaggtcctccagcagcgggctggcggcgagggcctcctcctggatgtccgtgctcctgccgtccccgaagaagtcgcacgcgggacgaggtgggaaccaaagctccgctctacctgggagtccctggagcccctgggaaattctctctctgcagcggcggaagtccccggggcccat

SEQ ID NO: 465881 - DNA, 1000 bp, Homo Sapiens
ggacttgagctgcagagcactgagctttatttacaaacttccacagaatccctcaccctccaccccagggtcctccctctctggaactcaggcagcagacaagcttgggtccacccacctgcccaacctaggacagctgggcctgagctgggcgggcaggggattccatctcctgggtgcgcctgccagaggggagaggctggaggcggcgggaatgctgttctcccccaggagtcagtcctcagggcttctgccgtgggacgtggggccgagggacctggggcactgaccaggtcggggtcgggggcagcatctgcattggtgaggccgggtgaaaagggctgctggtgccggacagcttctggtgctgggcctcagcggagacagaggaccagaggtccaggttcctgggggctgagcttttctcagacttcggaggaaaaatgtcccagcccagcaggcagtgccggggcagggccagtgtgtcagaggcgtcaaagctctttcgccggtggatgtggtaccggtgcgggggctccaggatcgacagcgggatgctcaccctgacgtgcgctggctgcgccagggtcccagggccctgctggtctcgcggtgtcctgcacaggcggcagggggtaccgggatccacaggcaccgggaacaggcgccggttgacacggtaacagtacacgcctgcgaggcccatgagaagccacagctctccctgagccaggaacccaggtccccaggctccgtgctgccctcagcggcccccaaccacacaagctgccaatccctctgggaagcccttcggcccatttcctcctaacccctttcctcccagaacctggggcccacgccctaaggggtggggagggacatcctcctggggccctcaggagctgggatggagtcccaccagcacaggggcactgctggggagggtgggatggtgccacacagggcagcccctaattcggtggccaggccttagctcact

SEQ ID NO: 465882 - DNA, 1000 bp, Homo Sapiens
tttttttttttgtgggtctgtagaaatgaattttatttatttaattcagatctttgagaaatttacacaaaattgcagtgaagatgaaggcaacaaaatattttcaaactgaaacacccagccgtcagctattgtggatactgtcgagagcaaaaaccaccagtgccagtcagcatctggtaaaggaggttttccagctcggtccaatcccttcattttcttggcaagtaagaggctgtctcccatttttcaggcaaccttttcatcatttctcatctcttctttcaatgcaccacaagagggcagtgttttatcatattctccttgaattatataataccaacagtggaatgagatgacttccagaagtagaaattgactattatgccaaaactgttcaccaaagttgataaaactctaggtttacaattgtaccccaaggtcatgggactggaccccatcccatagtaagtcatcagtttagcaatgataaagaaaataaccttctgaaaatttgtatagatcagaaataaagtattttttgtggaagactatttttaagtattgaaggtactatttcctttcttgaattcatattgcagatgtacggtgtggatttattggtttatctctgcaaaccttaaagtagaagattgcaagggccaggtgtggtggatcacgcctgtaatcccagcactttgggaggctgaggtaggcggatcacctgaggtcaggagtttgagaccagcctggccaacatggtgaaacgccgtctctactaaaaatacaaaaattagtcaggcatgatggcaggcgcctgtcatcccagctactagggaggctgaggcaggagaattgctggaacctgggaggcagaggttgcagtgagccgagatcacaccactgcactccagcctgggtaacagagcaagactgcttcaaaaaaaaattttttttaattaaaaaaaaagtagatgactgcagcaaagaagagatttat

SEQ ID NO: 465883 - DNA, 541 bp, Homo Sapiens; identical to SEQ ID NO: 336182

SEQ ID NO: 465884 - DNA, 470 bp, Homo Sapiens
cagcagggtctttgcaccacctaggccaactgagggttcataagctaagcaggcgttcagctttgttacccttggagaaatgctgcattttcactaaagagcatttcctgttgcagagaggagagctcggccccctgccgggataatcacaataaagtctccgttgataaaatggccaaggggcagtgtctcaggtttctctggtttgcaggttatcgagctcacttgtgagctccaatccttgtgagtggaagcatctttctgagacgctgcaccctctgctttccactgtacattcatggtgctgggcttggggaagccagggaccaggactatggactgagtgcttcccacacccatcaccccaggacacatgctggaagatgttctcttttctaataaaccatctactaagaatatccgttagtcatgttctcttttctcctgaaagtcaggcgtgggtgtctgcc

SEQ ID NO: 465885 - DNA, 362 bp, Homo Sapiens; identical to SEQ ID NO: 336183

SEQ ID NO: 465886 - DNA, 1000 bp, Homo Sapiens
gtccggggcaccttcacggttttctgtgccaccatcggtcacccattgatcggcccactctgaaccccctggctctccagcctgtcccagtctcagcagggatgtcctccaggtgacagagggtggcaaggtgactgacacaaagtgactttcagggctgtggtcaggcccatgtggtggtgtgatgggtgtgtgcacatatgcctcaggtgtgcttttgggactgcatggatatgtgtgtgctcaaacgtgtatcacttttcaaaaagaggttacacagactgagaaggacaagacctgtttccttgagactttcctaggtggaaaggaaagcaagtctgcagttccttgctaatctgagctacttagagtgtggtctccccaccaactccagttttgtgccctaagcctcatttctcatgttcagacctcacatcttctaagccgccctgtgtctctgaccccttctcatttgcctagtatctctgcccctgcctccctaattagctagggctggggtcagccactgccaatcctgccttactcaggaaggcaggaggaaagagactgcctctccagagcaaggcccagctgggcagagggtgaaaaagagaaatgtgagcatccgctcccccaccaccccgcccagcccctagccccactccctgcctcctgaaatggttcccacccagaactaatttattttttattaaagatggtcatgacaaatgagaaatgagctcttccttgtcggctatggacccctcagcagtgtgaaggcagaaggtagggtgggcaggggaacagcattagagcccaggagagtttgggtcagagaatccccgccagccccaggccctgcaggctggtcatgggccactagaggtcaccagttctcccatttgaggtgtggggcgctgggttccagagctgaaggaagggctgcgcggccgcggtgcgctttttggtgggtcgagtctctctgggaagtctccgggta

SEQ ID NO: 465887 - DNA, 1000 bp, Homo Sapiens; identical to SEQ ID NO: 157628

SEQ ID NO: 465888 - DNA, 1000 bp, Homo Sapiens; identical to SEQ ID NO: 157629

SEQ ID NO: 465889 - DNA, 1000 bp, Homo Sapiens; identical to SEQ ID NO: 246411

SEQ ID NO: 465890 - DNA, 1000 bp, Homo Sapiens
gcttctcatttttagtttacttttgaaaaactactctatatacacatatccagttgtaacacttgacagtagcattatggggcatgatataactttggtacacattgcagatatggatgtttaatgtctgtaaatgatattccttcaccagttagacttctgtacatccaggtgaccagccacctggttctaagtcatatcccaccagaatccctggagtccttgccagagccatcagagacagcaggcgaaagcaggctcactgaatccatattgtgtttcctctctcggttctcctgggttccactgtcagttctccaaacgtggaaaaaaactgctccacttctttctgtagcatgtcatttcttttctcggcatcttcttttgctcgctcggcatttcgcatttttatttctatcattgtgaactttttcctctcctgatccagttcatcatggaggctcatcatttctgtttccaaagtcaagtttcgctgttctaagctctttatcctggactcatactctatcttctgtttggtcatttcctgtttcaggctggaaactaaactgtgcagtgcactgtggttgctgctgctgttgcccacaaatgtctcactgttgtcactgctactggtggcacgactacttcgacctcccacactcctgtggtcacttttgctttcatagtccctggggtgggaaaggtcgtcctgcgggggcccatccaaaacagggtcctcaaagttccccccaaaaaagtcttgctctgggcaggtggtggtagaagagcgacaggagttggagttctcagggagggagatttcacaggaggaagtggaccaggtagcactgtcaatgctctgcttgtcatcaaggttcatcatggagaactgttgatggacattatcataggtggacagtctgttgtgctggcctaactctccagcttgttctttctgcttgttatccctcagggtcacatagccatttggcagcca

SEQ ID NO: 465891 - DNA, 1000 bp, Homo Sapiens; identical to SEQ ID NO: 336189

SEQ ID NO: 465892 - DNA, 1000 bp, Homo Sapiens; identical to SEQ ID NO: 336190

SEQ ID NO: 465893 - DNA, 1000 bp, Homo Sapiens; identical to SEQ ID NO: 336191

SEQ ID NO: 465894 - DNA, 593 bp, Homo Sapiens
ttttttttttttttttttcaaacaaccagacacatgaagtttttagtttattaatgttcttgcgaaaaatccacagtggccacagctaacatcattgcagcacctttactccttcggctttttgccagcaccaacattggcctttgcagtccccctgactttcttcattctgttcttgcgttcctttcgttgctttcttgaggtctttttcttctcatacaggccatgtcttgcaagtctatgtttgggttcatttttctttgcataatccagggaatcataaatcatgccaaagccagttgtcttgccaccaccaaaatgagttctgaatccaaatacaaagatgacatccggtgtggtcttgtacattttggctagtttttcccgaatttctgtcttaggcactgtcgccttcccggggtgaaggacatcaatgaccatttgtttcctctgaagtagtcggttggtcatgaactttctagtgcggatagttacggtgtcgttcatgatggcgatctatcttcagacagccaaggaggaaaagagaaccacgattcgccggccaatcatatcaacgcgcacggaaggacccc

SEQ ID NO: 465895 - DNA, 1000 bp, Homo Sapiens; identical to SEQ ID NO: 336193

SEQ ID NO: 465896 - DNA, 1000 bp, Homo Sapiens; identical to SEQ ID NO: 157630

SEQ ID NO: 465897 - DNA, 1000 bp, Homo Sapiens; identical to SEQ ID NO: 157631

SEQ ID NO: 465898 - DNA, 1000 bp, Homo Sapiens; identical to SEQ ID NO: 336195

SEQ ID NO: 465899 - DNA, 1000 bp, Homo Sapiens; identical to SEQ ID NO: 157632

SEQ ID NO: 465900 - DNA, 1000 bp, Homo Sapiens; identical to SEQ ID NO: 336197

SEQ ID NO: 465901 - DNA, 1000 bp, Homo Sapiens; identical to SEQ ID NO: 336198

SEQ ID NO: 465902 - DNA, 1000 bp, Homo Sapiens
tttttttttttttttcaaagacgactagaaaacctttttattcaccagagctcaatactcagggtcccgaccctgtgccaaaaactgaacaacttaaaatctgacgggggcccttcttctctttgcccctaaaataaaagctaggccattgccattcccatccgggtactcaaacccccttcttatcagcggttccttgacttgaacgttggaggttgaaaaacacaggaggaaaaaaaaatgtcctttagtcaactatcacgatttggggggtcggatgggaggtggtcgagagatatgcttctcgctgggggaaaggacccatcggtgatttggggatgggggcaggtaccgggtgcaatgggctgaacaaggggaagaacaaccagggggcattgaaaggtgtcagctcaccccacggctctccatccacaggtgagcctgcgaagacacggtgccctccagtgatacggtgctctccagagtcctactccgctcctgacggatgtgtactgaggtcagggaaggaatgaacaggcgtggtccacgatgacaccgtggttctgcaggaggctgaagatggagaaggctggtcttaagtcgacatcccatcttgaagttcttgagtaggcacttctcagccagccttgttcagtatctcctaagggctggcttgggacagcaccgtggaatcctggaggttcaaaaatccaagaactccacaaggaacagagaagtcgaaggggcagggctccagtcaccagcaggccccacgaggacaaaagatccatgaaccggggcccagagggcgctacagggccgtgcaggaagggttcccgcggcaccaaggaccctcaggccaacgcccacaggccagagctccgagggctgacaggtccaagggggcggggctggcctggctcccagcagcctccactgtttcaggatccagccagggtggagttctgggggccagaaattccaaagggctgggtgactg

SEQ ID NO: 465903 - DNA, 1000 bp, Homo Sapiens
tttttttttttttttctttattttttattttaatattatactttaagttttagggtacatgtgcacaatgtgcaggttcccattaactcgtcatttagcattaggtatatctcctaatgctatccctcctccaaccccacaacagtccccggagtgtgatgttccccttcctgtgtccatgtgttctcattgttcaattcacacctatgagtgagaacacgcagtgtttggttttttgtccttgcgagagtttgctgagaatgatggtttccagtttcattcatgtccctacaaaggacatgaacttatcattttttatggctgcgtagtgttccatggtgtatatgtgccatactttcttaatccagtctagcgttgttggacatttggtttggttccaagtctttgctgttgtgaatagtgccacaataaataaattcttttttttttttttttttcacagagtctggccctgtcacccaggctggagtgtaggtgcatgatcttggctcactgcaatctctgcctcatgggttctcacattctcctgcctcagcctcccgagtagctgggactagaggcacccaccaccatgcttggctaattttttgtattttttcatagagacggggtttcaccatgttagccaggatggtctcgatctgctgacctcgtgatccgcatgcctctgcctcccaaagggctgggattacaggcgtgaaccacagtgcccggcctgaaatcttctaattttccacttaaggtatcgaattctttttgatgtgtagccttgggtaaacacacatcattctgtaagagagtctcaaggaaactctcaaaatcccaagaattttcttcatcatccttttgtttggattctgatgggaacatctgagctgcttttaatgtttctctgtcctttaattctaaggctttatttggaagagaaactttccttacacaggtaggcttcagaagaccatctttatcaggagactct

SEQ ID NO: 465904 - DNA, 1000 bp, Homo Sapiens; identical to SEQ ID NO: 336199

SEQ ID NO: 465905 - DNA, 1000 bp, Homo Sapiens; identical to SEQ ID NO: 336200

SEQ ID NO: 465906 - DNA, 725 bp, Homo Sapiens
taggggggaaatcatttattttcataccatttcagtaaaaacttaggaaaaagcaattgttccactgagaggtttgagaggagggtgttggggagtaaggaggaggagttatcttgctgtcaaaccagggtgtccttagtcattgggactgcacagatttcatagacttgggaggtcctcatcttgagttcccgggccacctggcagatggaaaaagcccaacagcagtgcaccgccagccagtcttcacacagtgtgccctgtattttatgtctctccctggtgccaattctcagtgcaaaggtggacccaggtaacaacggccaacaaagacactctccataatgcctggcgatgtcacactcaagacacataggacagaatagaccacagaaacaaattctcctatctctgcagacactgaagagaccggtgctccagcccccgccagtctggacaattgctgtgattgtcgtcctgccactggctccccgaacaggctgcttcaccacagcgctggctggtacatggcctctcaagttggaaataaaatgttcatcttcagatgacatgtgtgacaacagaggtgagtatatgttgagtaaggaaagatcctcaggacacctgaagaagttacttccaaaccaattcatagtgagaagtgttttcttgtcctttgggctatcctttttccctttggcaataagctggtttctaaacttcgg

SEQ ID NO: 465907 - DNA, 1000 bp, Homo Sapiens
tccagtaataattttatttcactgatttaaatgccaaaaaaagaaaaataaagccatctgatttcaaacctggtgcttcccactgtcagccaagatttattcttcaaatgaacagaagccagagagctactagccagagaggattttaattgtgcttcatcaattcctcgaattgcttctctttttgttagacatctgttccctctctagccaaggcctgggactcctgcttcaggaaacaatatggcttactgtgcccagctccatggtggcaagggaagaggaagaatgcctcctagatatcaagcacctggccccgcctcttgtctaggtttctccagtcaaggagttcagctttcaaaaagcttggatgaccctcttgaggtccaggatgtagtgacataagatccagggaggtcaacaccatctcactcgaccatcctctttaccaactctcagcagcttttctattccccctgaattctctcactgagcaggatgagggagtgctgcctgcatgttggacagagagacccacctcagtcactatactcttctctttcccttggactgtggaatttctcatactggttggccagtttccacttgttgtgctgacttttgagtagtgcagcgaaggaagtttttcgggtgacacttctagatatttccttgctcttggcctttctggtaggggaagaacttccaactaagggatagacagggaaaatgggcttgccccgaggagctcccaacagctgccatatttccccagaggtattactggttagatactgccatggcttcttcccactgctgtccctgacatttacccgagaagccaacctttgcactagcaatttgatgaccccctggtggccgtgaatggctgcaaggtgcagcggggtatatccacaactggacctcacgtttacatcaaggacaatccctgccttctttgctccagacaccaagtcctgaagggccctgaggtcaccat

SEQ ID NO: 465908 - DNA, 1000 bp, Homo Sapiens
acaagtttcttttccctttattaagaaagttttaaaaaaaagttagggtcttgaaacaataacaacggagcatttcagaggcacaaacgtttgcagaagagaagctggtggcctggccaggcggaggagggggctctagctgttctcggggaggtgagagcagggaagtcagagagagggtgggcctgctgggaggggggggttcaggccagggctccccagctgccaggtggagggcaggtctgagggtgggtgctctcttggggtcgggaatgtaatatttcatcacctagagcctctcccccagcctgctgaccatcttccttccccaggccacccctgggccccttggagctccgactcttgcttctcctgcccattcctgtcccagtcacggagccctacgtgttcaggccaaccagtcacggcaaatacaaatcccgtttctgaggattccggggagcagagcaggaagggggtgttatgatggcagaaggataggcagtgaggacagacttgcttccaagctgggtctgacctggagactcctcccagcgtcgttcctgcctagggcgaggggcgtcacagcgaagcacagatgctcaagtcactggtggtgggtgtgggcgagtgtggtggtgggtgtgggggagtgtggtggtgggtgtggggcagtgtggtggtgggtgtgggcgagtgcggtgatgggtgtgggcaagtgtgggggtgggtgtcagcgtgtgggggtgggtgtcagcgagtgtggtggtgggtgtggacgagtgcacggatcttcccttgctccccacccacaattccctacatttcccccctcaagtgacccccaaattctcctctccaccgtgaatgtgctgagcagagccatcaggcagaagcagagcctgaaggcttcctgtgtgaccctgggcaagccccttccttctcagacctgtttccccacatgggcaggaagcgctgaggtggggaacagagctgctgg

SEQ ID NO: 465909 - DNA, 1000 bp, Homo Sapiens
acttttgagtgctagacttattatttcaaacagacactttttttttgcaaatcaaactttaaatgtgactttattatctctcttccatttttattattgaataagtgaatgaaatattaaactaaattataacttttcctgaactgtttttaaatcataggcagagccagggttttctttttttctctctctctctgtaattgcgacatgaatgtactttgatcccagtaatcattttcaatcaatgggaaaacaaatgaaaaaaaatcccatgctggaatgatgcaaataggtgagcttgcttattagaatctttttttcttttcctcttacaggccactcacataatacatatccaagtcagagaatgctgatataaaccttgcccacctctctcagcccgtctttcttactcagacaatttctgagcagctctttgatgaacacacaatcttcagtttccaggacaaactgagccacagccttccctcctggcagatggctcctcaccatctgacttttgacactgtccaggacaactcccctgatgtctttaggctttcctggcataccaaagatgataaacagacccaggcaatcctctcctattaagttacagaattcttccagcttatcaaatctacttttcttccaggaagactcctctacccttgattctggattggaaaggtcacaaggcttagattccacaggaggaggtgaagacatctgcagagtctgtactgcgagctgaagctttatttgcttgttggatccccaaaaggtccaaatccagtctgcaccaaacaggaaggcttggtgcttggtcatcttggtggtggtcagccactcatcaactcccttttcttggcagaaagtgatgaaatggattaagaagatctcattcagagtatttgcagctgggcagagtttacttggaggatattcaaatccaaggtactccttcagtttctgagctgcatggactatagcttcactg

SEQ ID NO: 465910 - DNA, 1000 bp, Homo Sapiens; identical to SEQ ID NO: 336201

SEQ ID NO: 465911 - DNA, 1000 bp, Homo Sapiens; identical to SEQ ID NO: 336202

SEQ ID NO: 465912 - DNA, 745 bp, Homo Sapiens
taaggaaaagctttttcttttatctaataaacaatattctagaggtgagtgtgggcccagtacaaagtcatacttcaaaccagctccctccagtgctggagggggttcgattcctgtggtctccctcgaggctgccatgtcaggtgtttgccgctacatcagcatccccagaagtgaatccgaaaggagttcatgaaatctggagacttggccattgcatgttcaaactctgagaaggacagcatgttgtcattgtccagatccgactcactcaggacgtggttcgtgaggtccatcaggaggtcctcagacatgtcatcactgttcagcagtcgcaggatgatcctctgcagatcctcctcatcaatgaagccattctcattaaaatcatagatgcgaaaggcatactcaatcttcaggcttgggcaggcctgctcgctgaacacagatgccatgcccagcacatcctcaaaggagaacatgcctttgtgggagaacactctgcagatacggtctctgaaagggttgacccgcagagctggcagggagctgacctggtccatggtgagcgttgcctccttgtagtacttcccaggagggcagagcttcaggaaggtgtcatggatgcacagaatttcatttctggtcaggaaggtcagggcctggtactcttccaggtcctcccagtgcatctgatacctcaagcattgccccatgccaaccacacctttctgtctgccagcag

SEQ ID NO: 465913 - DNA, 1000 bp, Homo Sapiens; identical to SEQ ID NO: 157633

SEQ ID NO: 465914 - DNA, 1000 bp, Homo Sapiens
gagttgggttcattggcttaataatttttattaaaacaaaaagcagaacaaagaaaaactgtcctcccttcccccttgggcaaaggaagtggatttggcccagcaaggataccattcttgggtagaagggagatggtgggcgtgagcagcccttgtctgagaagctgtacagctgggtttgcccctcctgccaccagcaatgcgtgctccaaggcagactcaagtttgtggaagacctggtctctaggaggcaaaactgaccagatgccacaaaactgttccattgtggatttaattccttttgtacaaagtctaattcacatgtaatttgagctaagtctggtagttggtatggtagccaaaaacacatctttgacccgcctgctcctatgtcggctcagcactgcttcacctttgacctaattgacccccagcccccagcaccttggcaacccctccccatcttccctggagtgggggaagctgacttggaattccagtagcctaaggttactgggcaacacaatggtgtcaccagctcactgtcccggctgcctgggtctggtggcagctgggggcttttatgacatcgtgtgtggggacctatggcaggagcctcgccctgtcctggcacacgttggccccaagcaaacgtggaggtcctccagagggacaaggaggcatcatgggcatctccacagctgatggcaggatcccgggtgccctgtaccccttcgtctgctgcctgcaatatggtgggtgggcacttcctgctgcttgccagcctagcctggcgagggacaacctctagtctcagacagcctcctgccatgcatgctcacggaaagcaccgttgttcattccggacccttcctgcgtgttctccatgatactgaccccttctgtggtggaataatctgcctggctccctgctgccgctagcttgcatggccacagcagggggcactcggccaccctttccactttctacccagccctg

SEQ ID NO: 465915 - DNA, 1000 bp, Homo Sapiens; identical to SEQ ID NO: 336203

SEQ ID NO: 465916 - DNA, 1000 bp, Homo Sapiens
tgcaccccagcgtctccctcctgggaggctgtgtgatttattaacgttggaagacatcacatagattgcactctggaagctcgcatgtctgctgggccgtgggggccgtccctctgccaccccgaggtgctggggtccactgtgaagagccagtggccaggccccaggcactggatggtggctgggctggttgtggctgtctggtagcctttggctgggccacagggtccagaccctcctgttccgtgccccacgggtctcctgagcactgtggggagggggcatcaaggggcacgggggagaagggacacagcatttcactgggtgtagcagagtcccagctcctgggggccttgggctgggctgggctgtgcagacccacggccgctgcgggaggcggcctgctgcgtccctcggggaactggtgccgtgcaggggctacggaggaggctgtcccaagggcggggacttcctgggcccttctgtgaggagccttggtctcagcttccggctgtcctgcccccagtctgcctggcacgctgaggggcaaacaaggcaggagaggcggggagagccccacagtgcccagactgctgttgagggtttctgccagccagggcatggagggcactgagtcccctgggctcaaggctgcccacctgggcagacacggggtcccaggcacgggcctgagatgaggacacatcggctggcagaaaggagaaaggatggagcctccacaccccgggacctgtgacttcaccctggttcgcagatgcaccccacaggctagggggtggcgacctttcgggctcttgcaggcccggcccccacccctgcctgctctgctctgcaccgcaccctggcgaggcctggctgcgcacgcgtgtaataggccgagggggagccgtggccgaggcgtcttgttccggaccgagagggtgggcctcttctgggctggtcgccaccttctctgtcacagtctgtggttcctaaccag

SEQ ID NO: 465917 - DNA, 1000 bp, Homo Sapiens; identical to SEQ ID NO: 336204

SEQ ID NO: 465918 - DNA, 1000 bp, Homo Sapiens; identical to SEQ ID NO: 336205

SEQ ID NO: 465919 - DNA, 1000 bp, Homo Sapiens
ttttttttttttttttgggttttttaaaatttaactttttattgaagtataatacacacaagacatatattaagggcatagctctaacaattatcactagtgaacaaaaactgtagccagtaccccgctatagagaggatgcacctgacagcagtaacaaccatatcctgagaacgaccctgtgatctaaaacgaatgtgtgctcagaatcccaaactaaggaaacaggagcgactaaccctgagtttcactccttatctatgaatgacgtctgaacccccagcccatcccttacaacacaggcaatataggggatcaaggtcctttgctttgggttaaatggaggttgctaggtggagtgtgctaaatgaaaatgctatataaactgcatgctttttacaaacagtagtggttcttctgtccagcctactaccactggaccatccctatatataagttcccccaataaacccaagtcttgttcgctgtctacgcatcttctttggactctcggacacagtgccattactattggagtcactaggggtctggcatgacaccagcattgctagcttcctagaatcttcttctggtcactactcttctgtcctacaagtataccattaatcctgcttctaagaacatagattcattttgcctgtttagggactttatgtgcattagttgtacaatatgtgctcttttgtgtttggcatctttatttcaacattatgtttgcaggatttgtccatagtgctatgctcattctcactgcaaaaaggattccattgtgttaatatcccacaatttatccactctactattaatgaacatttgggtagtttccagttggagctattaacaaattatggtggacacaggtatgcatttctgattaatatattcctaggactgaaatgactgggtcatagagtatgcaaacttctagctttagcaattactaacttttccaagtgcttgtaccagtatacactcaaca

SEQ ID NO: 465920 - DNA, 1000 bp, Homo Sapiens
ctgtgatttttttaatgcaaatatgaacatattatctatgcaaaaagttgtttttgatagcaaatcagccccaggccacattcttcatctaaaggaggacttttactctcaggaataatgaagaactaaacacatgccagacacctagcacacctagattctcgtggctgtcggtagcactggaaaagccgttccttgactcgccgcttatcctcctccatcaccttccttttgtcacagccccggaggttgacaagggtcatagcatcacagagaagtgcatcctttacttcttgatcaaggcatgagtccgtggtaaagcttggagagtggtttacctctagcagccagggcttcaacttgtggtccagcaagatgtcaaaaccaaggatttcaaaacaggcacatgtacctccattcagatactggggaaaacaggttcggtagttgtggcgtagaacagaatgggctgagatgatggttttgatgatgatgtcctcgatgtccccccacagctctccagggttgtagctgtgctcttgcagccagatgttgagtgtcgacagcttcctcttactgcccacagcgccatcccggacaaaattctcattgtgtttgttgatagcatagttggtcaggtgcatgcagacattgtccaggttgttatggctgggctccatatagggcgtggtggcaaaacgggctaggccctcctcatatgtgaagatccggagagggtcacaggatgtgatcaggacgtagactcgcatatcaaacttgaagccatcaatgaggaggggcttggagatgtattgctggcagatcatatgctctcctggcttgatctcccggggatttcgggtaatgaagatgccacgtccctgacagccactgtctggcttgcagatatatgtgcgggcttttcgctgacgaccgtaggactggaagtccccatagtctgcggggaggcaccaggtgcgggggaagatgttgtactcag

SEQ ID NO: 465921 - DNA, 1000 bp, Homo Sapiens
ttttttttttttttttttccattcttcaaaaatttattatttattattaaaaatctcaaacaaacacagacatatggggataccagcattcccctcctggataccaggcagcttcagccctggcaggcacgatagaagaaaatacttgttacacatcctcatcaactctcagagggatcctgagccgtagatggaggaaacgcagacggagtaagcacaggtaaaagatctccccaggagctgacacgggcacaacgatacaaatccctgtggaaacagatgctggcgtgggctgcagcttcctgccacatcccactgattttggtcacaccccccatacctgccgtgccggcgggctgtgagcacagcatgctgcatgtgcccatctggacagcacaagtgacaatgcacatggcgaggccgtttaaggacaggctgagtgatacggggccagcgatgagcctcctctggagacccccgagcaaggatcaccatagagaacttttcttcctttggtttcttgttccagctgaaggggatgggatggtacgcctgtgagaagctacaggccaggttggtcaactggggacaagggagttcatggggacacggggcaaagacaaaaccaggtcgagggtccaaaggtgacttctcttttcccttaaggaccagatccctggcatccatgagaaggctgtgcccagcttttgttccattctccaccagtaccaggaaatgacctgtcttacgccataaggtttgaactacctcagtgcggtcagccttgctgggcagttcacttaaggaaaaagctgacactactacatcaaactgcaccttgggtgatacaggtagaaactgtctgaaaaagacacctggaatataaggctccccagattctgaaccacctttcagtagtttttctgccaaaaccaacatggcagctgatctgtccacacacatatattcacgtaggctctggccccaaatactgtgagca

SEQ ID NO: 465922 - DNA, 1000 bp, Homo Sapiens; identical to SEQ ID NO: 157636

SEQ ID NO: 465923 - DNA, 1000 bp, Homo Sapiens; identical to SEQ ID NO: 336209

SEQ ID NO: 465924 - DNA, 1000 bp, Homo Sapiens; identical to SEQ ID NO: 336210

SEQ ID NO: 465925 - DNA, 735 bp, Homo Sapiens; identical to SEQ ID NO: 336211

SEQ ID NO: 465926 - DNA, 1000 bp, Homo Sapiens; identical to SEQ ID NO: 157638

SEQ ID NO: 465927 - DNA, 1000 bp, Homo Sapiens; identical to SEQ ID NO: 157639

SEQ ID NO: 465928 - DNA, 1000 bp, Homo Sapiens; identical to SEQ ID NO: 157640

SEQ ID NO: 465929 - DNA, 1000 bp, Homo Sapiens; identical to SEQ ID NO: 157641

SEQ ID NO: 465930 - DNA, 1000 bp, Homo Sapiens
ttttttttttttttttttaatttacttccatatttttttattagtaaaatgcatttactttttacaggcaagtatgaaccactttgaggttttcttcccactcccaattctcaattcctatgggtgcggtatcatctaagagaataagcattcttgaatattctggacatgtggcatggccttctgtaccaactcttctagatgtgcttgcctggtgtgccatggaccctgaatcgatataaacaagtatacttcgggtgtccccagttgctaaagatattaagtttcacacataataaatattcagaaactgcatgctggagttcaaatgtttgaacggtggttcctgttttgttatatataaactgacctaggaaaatttcttctccttcacatttttttgtgatgccatagacagaaaattccttgggtgcactggagatgtttcctgacggagacaccttctctgagatgtgctccatggtaacagcagttggtatgatctttgtagcaagcttgattagggtatgaccctgggaacctggaaaagcccagcactttccagggtagacatccggctgaagaataatatctggaggcatttcatgatttaggaaacctatcccatgccagtacaattttgctttattatttttataactttctgaggtcccagcttcaatgatggaggctccggccgacttcagggcataatcagccatctcgacttggtcttctctcaactttttaagtacataattgaccaagtttgacacttcctctgtgtggtccgggtcctccacagggtctccatgggtgttccagttgtgattattgtccataccatccttcatatctcttagcaatgccttcaggacatctatttgttcgatcaaaaatagaatttgacgaaaattgttttccagattctggctttccttctttaaaagttccagttgctctttaggcatacgaagtctggcctgatatttataaagcc

SEQ ID NO: 465931 - DNA, 1000 bp, Homo Sapiens
tttacatatacacatctgcagcagatttttattagatggaagataacaagcattacctcataggtaagtggtaagaaatggcaagtacagccaagccacagaggagtgaggacattactggctatgggaatgggtacttatgaaatctaagggttgggtctcctgatgaactctaactacccagtaagctcttctctttggcactcaatatgaccactgctggcatgaaagggtctacagtagctacttcaacttggccaacagttcttccagttctggtcgagctttgaatcgtcccttgaagtcttcttcagtgtgctccttcactgacagtctgactccttcaggaagactgctttggattatttccaagaaaatttctgcaaacgtagcactcaaaccgctgatctgaaccactcgctcatgggtggtaagcactgagtccaggagcattttgctgccttggtcctgcaactgcaacacttctatggttttggttggcattgcataactttcctcgactttaatggagagagagttgcagaggttgtgaacatactgggcataactctctgccagggtcatatcatatgcagtcagatgaatatttaaaaccccatattcataatctgtccccaaattaatggctctcacttccacttttcccttcttcttcttgggctcttctgctttaattaagtgcttgtactttccaatgccgtgggtgggctttgtcttgtagggccgactgatacttagtagaattccacctgtaatcccagctactccagaggctgaggcaggaggattgcttgaacccaggagttcgaggctgcagggagctatgatcatgccactgtactcaagcctgggccacaagcaagaccgtctctctctacagaatagatgggcttctctcctgaagttctaaaccttaagagagaaaaggcttgcttaaaaatggtattgttcctcaggcacagcaccttttccaaggttc

SEQ ID NO: 465932 - DNA, 1000 bp, Homo Sapiens
ttttttttttttttttggagattagaacactttatttttgcagtagttttgcaggactaggtttctggggatcatgctttgggaaatcttgttctcacaaataagatattcataatattttcacgaaatcccaggatctcattcgtctcaaaataatggggagagatggggaaggaaagaggtggatgagtgtcaacatgaaccacaatatgctatgggttgatcactattgaggctggatgatggatacatgggagttcatcgtaggattctttctcttttgtacatgttcaaaaaattccattaaaattttttaaaagatattaaacaaaccagaaatatatatatatgtatacacacatatatgtattatatatacctacatacatgctgtatcttaatacatacaccaaactctaagagaaatggctaacctcccgaggtctacagacccactcgagcaaaagtaaatcatctgcttctttcactaacttggcaatgaagctcttctcatacttcggagcctaatgaggtcaactgtggtgaatggcagtcaaaggagaacccaactgggtcatccagaggcaagtatcatctctactcatgtcaaccttcttcccttcttccccataaagccttttacagaaaaaataggggaatagaaattatatttttaacttaatttttttctgtcatattcctgccagatgtgctactacagtcaaaatcaaccaaggttttgacaggaggaaaaacagaatcagttcttgaataacagagacttgaatcaccaaacattcaatggacgtggtacaacagtagttttgacttgaagactcatgttcatctgtcattttaactgaagctgtcttttgggagtgccaaggtttctagctgccagggaatcctaaggacttgcaattggcctagaacccatttcacttgccaaagtacctaacttattacattaagaaaattctctctcctgataacaacaaaa

SEQ ID NO: 465933 - DNA, 1000 bp, Homo Sapiens; identical to SEQ ID NO: 246412

SEQ ID NO: 465934 - DNA, 1000 bp, Homo Sapiens
ccaagtcttccacgtgggaggttttattatgttttacaaccatgaaaacataggaaggtggctgttacagcaaacatttcagatagacgaatcggccaagctccccaaaccccaccttcacagcctcttccacacgtctctcagagattgttgtccttcacttgcaaattcaaggatgttggaagtagacatttaaagtagcaggaacaccatcagtgaaacagaagcagaagtacgatgactttgagaaacaactgatgaaaaatacactacagaaaaccatttctattgtgttatgatgtcagggtggcagatgtgcccagggcttagtgtccatcctcccaggacactggtcataccgggccttcggtgatcccctccagaggcaagctgggtgcgctgtcagctgtgggcctctcctctttcttcagtgaggctgggactcgcagactaacgtagggtttatggcaagctgtgttggccagaggaggatagtgctgtctgtagcaaatgtatgcaaaaatgaggccgatgactccacccacaaaggaatcttgccagtgatgcttgtagtcgcacatgcgggacagggcaatcatcatggcgcagtacaagggcaggatggcagcacagagccgccagctctttccccgcccactctcggtgaagcagtgcagcttgcccgccaagtagaacgtcgtgaagccaaggcccgaaaaggcaaaggaggaatggatgctggggaagcttttgcggccctcggacaccagatcggggtcacctgtgcaatgcatttccgagttcatcactccatctggaaagcagcggtaaaagaaatcggggcgaggtcttcccactattaatttaatagtgtttgtgcagactccattcaaagcaagagccaaggacaccgctaagaaggcttccttaatttcagtcttgtctgttcgccggataattttcaccacacaaataacagccaggggtgtgaggaaagaaa

SEQ ID NO: 465935 - DNA, 1000 bp, Homo Sapiens; identical to SEQ ID NO: 336217

SEQ ID NO: 465936 - DNA, 1000 bp, Homo Sapiens; identical to SEQ ID NO: 336218

SEQ ID NO: 465937 - DNA, 1000 bp, Homo Sapiens; identical to SEQ ID NO: 336219

SEQ ID NO: 465938 - DNA, 1000 bp, Homo Sapiens; identical to SEQ ID NO: 157643

SEQ ID NO: 465939 - DNA, 1000 bp, Homo Sapiens; identical to SEQ ID NO: 246413

SEQ ID NO: 465940 - DNA, 1000 bp, Homo Sapiens
ttttttttttaaagttttatgattttttatattcattttatttggaacaattatctcaaaaatgaattttctgatgttctgcatggaatgaccacagagtgaagaccttgccacccttacatttgtaaggcatctgtccagtatgaattctctgatgtctaatgaggtgtgaacatgaagtaaaggctttgccacaatcatcacacttgtgaggtttctctcctgtatgaattctatgttttgcataggatgaagcttgactgaagaccttgtcacagtcatgatatttgtaaggtttctctccagtatgagttcactgatgaactacaagttatgaatgacgtctgaaaaatttgccacatttattacacttgtagatctctcttcaatatggattctgtaatgatttgcaatggttgtagcattactgaagactttgtgacaatcattacatttgtaaagtttccctacacccatggattgcttgatggtgaataagtgttgactgtccagtaaaggctttgccacactcattacacttgtaaggtttctctgcagtatgaactctctgatgttttgcaaggcttgctttttgattaaaaaccttgccacattcattacacttgtaaggtttctctccagtatgaactctctgatgttgtgcaaggattcctttttgattaaaaaccttcgcacatttattacacttgtaaggtttctctccagtatgaactctcgtatggtttgcaaggcatgaatcactccggaaagccttgtcacaaaccttacatttgtatggtttttccccagtatgaattctcctatgtctttcaaggtgtgatctgcgactgaaaactttgtcacattcttcacatttgtaaggtttctctccagcatgaagtctatgatgacgtgcaaggttttctcttcgactaaaaaccttgccacattcattacatgtgtaaggtttctctccagtgtgaagtgtatgatggtattg

SEQ ID NO: 465941 - DNA, 852 bp, Homo Sapiens; identical to SEQ ID NO: 157644

SEQ ID NO: 465942 - DNA, 1000 bp, Homo Sapiens; identical to SEQ ID NO: 157645

SEQ ID NO: 465943 - DNA, 1000 bp, Homo Sapiens; identical to SEQ ID NO: 157646

SEQ ID NO: 465944 - DNA, 1000 bp, Homo Sapiens; identical to SEQ ID NO: 336224

SEQ ID NO: 465945 - DNA, 1000 bp, Homo Sapiens; identical to SEQ ID NO: 157647

SEQ ID NO: 465946 - DNA, 1000 bp, Homo Sapiens
ttttttttttttttttttttgagatggagtcttgctctgttgcccaggctggagtgcaggggcgcaatcttggctctctgcaacctcttccttccaggttcacgccattctcctgcctcagcctcccaagtagctgggactacaggtgccagccaccacgcctggctaattttttgtatttttagtagagacgggatttcactgtgttagccaggatggtctcaaactccagacctcgtgatccgcccacctcggcctcccaaagttctgggattacaggcatgagccactgcgcccggccaaaaaacaactctttaaaaatgtaccttagagcaacatgcaaagcttccctgctcagcaatcccaggttggggccccctgtcttcctatcctcctacccgtcacaaccaccactgcaggcttctgatgctctgttttcctcctctgtctcagttcagttgctctgagttagagaggagctctctgggactggagctgactgcgccctggcccatttcctcactaccatcctcaagctcagatgctgacaggaaaatactgcctatgcctgaaggggcatcccttagcaggcggcccagttccttctcataacatttggctgcttgcagcagatctccattctgcttatgaattaatccttgaagataccaataatttggtgcattttgtggaagcagattttcagatacattctgtggttggtctttgatctcttccttgtcagttgattttttgcttatggacaaaccctctaaaccatgttgcacagcagtgtcttcagacttcccattatatttctgaaggttgcagtagcgctgatgggattgttgcttttcagcatcagggacttccttattgaatggtgtctgataacattccgtctccaggaactcagcgagatcggagtatgcattcagaggattcagtcccttctcaagagctttattcgaatagtccatagcatattgctttagtgctt

SEQ ID NO: 465947 - DNA, 1000 bp, Homo Sapiens; identical to SEQ ID NO: 336226

SEQ ID NO: 465948 - DNA, 1000 bp, Homo Sapiens; identical to SEQ ID NO: 336227

SEQ ID NO: 465949 - DNA, 1000 bp, Homo Sapiens
ttttttttttttttttgccaccacattctgtttagtgtcattgaacacagcctgtagccttctccagcatcacatccctcccacttccccaggccaagagagatgctgaagcctgggtgggggactggcagtgggcatttgagcccatgcccttgtgtacataatctctaatatttatatatattgatatagaattctctctataatatatgtcatagaatctctcttgggcctggcgtgggaatgtgacattaagaaaacatgctaagactggccagaaaaatggatatttcccagacctggaggatggtgtgtgggatgtataggtgaggtcgtggagaagataataaactcattccccaagataccctcttcaacacaaggacaagaaggaaggtgtgtggtgggggaggggacaatggagggggaggagtggaagatttggattttcatttaataaagtcaattgaaaatgaaagtgcaccccccctccaaaaaaagaaaatcatttagcaagagcagtttcattcacaagaatataaaaacagccctgttccaggactgctgtaaaacgtgctgcacagccttaaccccaaaggaaaagcaaccctttcccaccccgaaacagcctcttcctgcacatgcccctccccaccccctgaaatagacgataagcaacccccatgcaccctgcccccagcaccagaagagtcctaagatggtcccaggccagctcctcagtctccctcttcagagcgagtaggagctccttgcagaagacagacccccacctgacttccatctgcagcaatatgccagcaccctggggaaagcaggttcatgtatgaaccctgctagagtccttcagatctttagtcatcttttgtcagggaccatttggcttccttgggaaagggaaggaacgaaagctgctgtggtctacctttcctaactcccccgggcctgagcaaaaacgaactgtaatgaatgaacgcactca

SEQ ID NO: 465950 - DNA, 1000 bp, Homo Sapiens; identical to SEQ ID NO: 157649

SEQ ID NO: 465951 - DNA, 1000 bp, Homo Sapiens
ttttttttttttttttttccatgttataaatattgttatttaaaaaacaaaaaacaaaacacacgtacattaggtcctgggtggaggaagaagtggtggagcctcagggccagggcaggcaggagcaggcactgatgctagagggtgatgaccctgccctctgccacccaggctgtgtccaacagcctgtgactcttccctggagaccccttctctcacacttttatctactggcatcacccaccccacatggcatataccacccatctctggtctggggctgagggcaaggactgcactagtccagggagtaggggacccttgaacaccaagagcaaccttgagaggtgccaacaatggtgtgctgggggtggggttactttagaaaaagtggacacagaccagactaaggaagaagtctgaggcagacggtgagggtggcccaggagccatggcctcacacagacccgaggcagagaacagctcattgggtcactggtgatcatccagctgctgtaggagtgtccgccgccgcctctccagctcaccctcactcagctcactttctgacgtgtcccagcctgtcttctccttcttgattccaaagcctggggaacggttagggagctctgcctgttggagctccctgtccttgtcctgttcttgttctttctcatcgctctccttgccagctttctcctcagggtctgtctcactctcaggactattcgacttgtgtcttctcttcttagttttcttttttggtttcttggctttccgaaggccatgatctgctccaagaagatgggaggaaggggagccccgtcctccaagggcagcacccccactttcaactgaatcaagtgaggaagagggctcagagcctgactctgaggggttccgcctcctccgcttggggggccggagagatggtgggggcagctcctcttcttctgactcagagcctgagggtgagtgggaacgcttgtgatggtgcttc

SEQ ID NO: 465952 - DNA, 1000 bp, Homo Sapiens
ttttttttttttttttttttttttttttaaaatggttatcttaagtcaggccagttttattttattgaccatgtatatataacatcagatatttctaagaaagagaagagaacctgattgatgtctctcatgtaacatggaaaggaaaaaggagggagggaaaatggggaagaaaagtctccacactcttcatgcccaaagtggacacagtctttaacctgtacttcaaatgacaggttcagatcatagaaaacattgtcaagtccaacagaattttgatcacaagctcttggtgctcagcgtgcagctgagtagcagaaggcaaacaagcaagttgatggagaaatctctgtgcagggaagaggaagaagacgtgccacacaccaaaggttctgctttatagggtctttctatatctggaggtaatgctgtcattccttgaatcgaccactcagcattgtctgtcttggaacatctcacattcactggcaggctgaggaccagctcgttgaaggagagaccttcctttttagtccatttaaacttattcatagcatccatgaaagaaaggtttttatattgcttgggacttttgataatgaaaggccaggtcgtgactggtctgtagatctccttaaccccaatgaactgaagttgttccataatgtctggaatacttgcacatcgagtaagattaattcttgggtaataaagaaggtatgagagacacatttcactcctggtgcttagtcctccccaagtcatctcagctctatctttcgtgttgtagcgacactcagtaattaggttatctcctggtaagattgtttgttcttcctttagatactgaaactcctggaaattgaagtcaaaatcatcatcataggcaagtaatttcatttccttcccttttcgaaaatgacgcagcctgatgcctctgccagccaggtgagcatggagaagaacagcaaacacatgaattccacttggcttttcggct

SEQ ID NO: 465953 - DNA, 1000 bp, Homo Sapiens; identical to SEQ ID NO: 336228

SEQ ID NO: 465954 - DNA, 1000 bp, Homo Sapiens; identical to SEQ ID NO: 157650

SEQ ID NO: 465955 - DNA, 1000 bp, Homo Sapiens; identical to SEQ ID NO: 336230

SEQ ID NO: 465956 - DNA, 1000 bp, Homo Sapiens; identical to SEQ ID NO: 336231

SEQ ID NO: 465957 - DNA, 1000 bp, Homo Sapiens; identical to SEQ ID NO: 157652

SEQ ID NO: 465958 - DNA, 1000 bp, Homo Sapiens; identical to SEQ ID NO: 336232

SEQ ID NO: 465959 - DNA, 1000 bp, Homo Sapiens
tttttttttttttttcttttttttttttttttgaaaacacaaataagttttggtttaataaataaaataagatcacttaataaacaatgttttaaaaagagcatttcattataatctgttctgattcacctcctagcacacaaagcaaaccaatttcccctggcttttatttctaacagaaaaaaaaattgccctttttattccagactgggatccaaattgttatgtactgtattccaggatcatttcttgggtttagagaggtttttatcatctttggactgttgctcctcttcaaatctcattttgttttcctttgttactcttagaatagtttcaatatcagcaatggtggtcttaaaattggtctcgccttgcatattaggtgctgatatttcttgatggatgatgaagagatggcgagcaaaggtcatgaggaccccctggagatcctcgccgattgttaacattcccaacttgtgtctcttcaggtgctcatataatataaaaacagttccttgcctttcctcaagatcatagccaatgccatgggccctacagatctggagaaaaacatagtggaaaaccagtgagagattgctgtgtcttagctgggtggtcatcactgcatagcgactggttgccagcatcggcattgacagcgcactcatgcatttggttttcttcctttcctttggaacaaagcggggcacttccagggtgctcaaactgcaatccagatggccgtttgtcaggtataaggtgagttgagtcagggccagctggtcactatatgcgaggttaaggccggttgcccacacctgttgttccaaggtgcttggatctataaaagtcaccagatctatcgaaaagtaaccaaccacatctctcattctgcaggcttttccaatttggaggcacaaataagtgagaacttggggatccactgaggtctgaggcacggtggtaccagaggagatgaaggggctttcagcatgaa

SEQ ID NO: 465960 - DNA, 1000 bp, Homo Sapiens; identical to SEQ ID NO: 336233

SEQ ID NO: 465961 - DNA, 1000 bp, Homo Sapiens
ttttttttttttttttttttgaacttggtatcttcatttaatgatatagtgcacacagggtttttccataggcatgattggcagcagagtcttcagccctgaacagattttgcacaggtgttctataatttattaacttcatctcctaccaccagcactgtgataagcaaccttgttttccctatctttatttcttaggatgaattccaaggcttctgataaatagtgattttcagaaaggccatgccagcagtgtgtgagagcctgattcccaaaaccccatggccaggcccggctgggaggtcttagcctctctgggcctcagttccctcatctgtaaatgggtgtgataatagacagtagtggccactccacagaggcttgaggacaaatgcgttaatccgcagacagcgctgagaccagttcttggcgccgcgggtgcaccctggggtgtgtgctgtggctgctgctgctttcagttcccttgtttgtagaggaggaaagagctgcagagagcccaggtgagctgcctgaggtcatggagttggtgaggccaatccggaagagaattctgctcccctccaccgctgctccaacacgcttccagatcattcgagctgtgtccttgtggctggcatttaccttcatgcatcattatttccaaaaacctggggagtggtgaggcagtctgggcctctcccactaccttcctcagctcctgctcattcctgtctggggtgtcggcccagccaggatgcatggaagaaaaatggatggccgggtgcccttgggcccaccgctccgtcagaaccacttgctgcctcttgttttgtgcatagaccatagttccatcaaatggtgttctttcggactggagatcattggtgttcagtttctgaaccaacattcctcctgaggagacggttatcactcgggggtcgtgttctttctccagcacagggatcaggccggtcgtgagaatgtacacacccagagtatt

SEQ ID NO: 465962 - DNA, 1000 bp, Homo Sapiens; identical to SEQ ID NO: 157654

SEQ ID NO: 465963 - DNA, 1000 bp, Homo Sapiens; identical to SEQ ID NO: 336236

SEQ ID NO: 465964 - DNA, 1000 bp, Homo Sapiens; identical to SEQ ID NO: 336237

SEQ ID NO: 465965 - DNA, 956 bp, Homo Sapiens
tttttttttttttttttttttttttttttttttttttttttttttagtagagatggggtttcaccgtgttagccaggatggtcttgatctcctgacctcgtgatccgaccgcctcggcctcccaaagtgctgggattacaagcatgagccaccgcgcccggcaaaaggggaaacatgaacacaaagatggctacgcagcaccagcccagcaccaggtagtagccaatcttcccgaagagcaggcccatgaggaccccgccaatcatcccgacatatttgtagcccaagaaggccaccaggtcgatggtggtgaggtcggtgttgacagtgaccagatagaggctgagcaggatggccagcacctccagggtcagccaggccagggctgagctcgcttgcagccccaggaggtctggggagaacctatcctgggtccccagcgcaagaccagccaccaaaacgtaggtgatgaaagccattgctggaatgtagaggtccggggcattgacgtcaaagcggggggccaccggggtgtcctgttggtactgcacttcccagtcctggtgtaggtaggggaagaacagcaggcccagctttctgcccacatacatggtgtccacagcaaagtaatacttgagcttggtgatggggatgaagcggtcgatgttcttatccaccagctccttgccctgcgcggccaggctgctcccataggccatggccatgttggacaccgggtcagccaggaaggctgcatggggcgtgggagaggctgcaggataactcaggccaccaggtgcccgctgggccccatagccccggctctgggctgaacttgtgtcatcgaaaagctggtgggggtcggccatgcccggctgggacacagggatcctccgcttcgagggcagccggggcgtccccgcagccgccgccgccaagcctgccgggtgcatcct

SEQ ID NO: 465966 - DNA, 1000 bp, Homo Sapiens
tttttttttttttttttttttttttttttttttttttttcaatctttaccaatttattttatacaaaacagtagcaatgtagaatatgggaatcgtcttccgctgccacgcacgcaagttgtgaacattccaagccaatgtatacaatttggaggggaaggctaaacaatagcatcaaccacgctactgaacataggaatttttcatttaaaaagattaaaaattagatagcaatgtcttcttaatattgctctcgtcattgaagactgaggaaaaataaaaagtgactttataagttttttaaaaaaagaggcaatggggaaaaaaacaagaggctgctacaacactgccatacagtcaaaccatcatacttcaatatttgcatactcgatagcagcattatttttactgaaccgtgtgcaactacatgtagaaacacatcaaagcaaaatatcatggcagttatcaatcaagatccaaaaaggaaaaaaacaaacaaaaaaataactctaggatgaacacactataagaacatttatggagaaagaatcagtatctacattcttggactgttccattctgccccaataaaagtgtcaattcaactgtcagctgtggatttttggcggatttgagtttttccagttcttatgatactgcatgcttggaacaaagggggtcataataaatccttctacacaatgaacttcataggcagacagctgaaaataaatttactacttgtaaacacacacaaaaaaaaaatacaagattttttgtatctttaaacaatcagtgcttccaaaagcccattatcttctatatcgacctctctcccctcggtctctgtctcgatcacataatcgctctctttctctttctctatcacgtcctctatctcgctctctgtctcgtctgttatctctagggcggtctcgctctcgttcccggtctctttcacggggtctacttctccggccactgacaacagcttgtgtgc

SEQ ID NO: 465967 - DNA, 1000 bp, Homo Sapiens; identical to SEQ ID NO: 336239

SEQ ID NO: 465968 - DNA, 1000 bp, Homo Sapiens; identical to SEQ ID NO: 336241

SEQ ID NO: 465969 - DNA, 1000 bp, Homo Sapiens
tttttttttttttttgcctttgaaaaatatgacaagttttttttaatgttaaggaaaattctgtaagagagtttttttgttgttgtttttgggttttccccccaccctccaaaagatgaattttgcagcattttctcccagcagcacactggtagctctgacatcctgtatataatgtgttctggcaatgaagccctcaagtaccgcagctgtcatatactccagcacaggacccccagaaagaagtcctgcaggccccatggcatcttggtcttttccacaccctctagcagcacccaatccttgggcatcttgcaatagcggctgaagtccagaacttgaacttcactgagaaaatcaagtccactcaaaatgcagcattttcatcttttggttgggtgattcttggtcccccatggataggaatgatacctgttagatgtaaaattgtaatagccactttcctcaaggacttcttcaatcacagtctgcatctgttcatatgttattccttcctccaattcaatgctggttggtaaacctgtagggtcatttggggacaggctgtttccaccggatgaacgatgtaataaatggtaatctgctgtgaaaaagttgggctcaatcggttctggagatccctgagataactttttaatttcagatttcaaattacaagggttactctgctggctgaagagggatttcttgaatctctctataacccttcttttcaaattgtggtgcaaagctggaggaagctgtgtgatatagattattttgtgcagctgaattaatatctgctgaataggatcactgatctgacgcactttcctctgggacacagcaattcctgctgatgcatgatctttgagatttcgaagaatcacagcaggaaggctatgggactgccaccctgtcactaactcagcctctatttccttaatgtgggccctgagcatatggggtggcactttcagaagcaggtcaagaggcagca

SEQ ID NO: 465970 - DNA, 1000 bp, Homo Sapiens
tttttttttttttttttttttttttttttttttttttttttttttttttttttttcccctggaaataacaaagtcctttatgtttataagagctatttggaaaattttaaagaatttgcttgaagagagcctatgcacccaccatcaatggctttttcaaagtgtgtagtcacagggccacaccatttcatgtcggttctgaagacgtgaattcctgccctcaagcctgggagcgtgctagcccctccctaagatggtggacagcttacctcccccattccaggtcttcaaactcccatttcgagaacttcttgtgtttaattgctttccacctaacagtaaattcgctacttgcaaaaccacttggtcaataaaatctcgtggcagggcggcacagttcctcacacgctcagccttttctctgggatgaaatccaggtagccagggtccttcagcctggggccctgctccatgctcagcggcccaggccctggttacacacccgaccctggcgtccagagcttgctgaccgtcacagtgaccagcactgccagcagcaacccagcgtggagaaggggaaagctcccagccaggtgggcttacagggcagccccgcctgctcttaatgtactgagtcctcttttcatccacggaagcttctctggaggaagggtatgttctggattttccaacgagacagactcttttggttgaaggaatcctgaggcagtcttcgtccacgtgaaacccacaggtgaagcccacttctttaatgaagtcaaggtattcccggtactgagtcttcttactctgcctccgggagtatcttccaatgaagtcaaagaagcagcaggggaggacaaagaagcggcaattgtaggaagacctggctgcaatgacaggtatccatggtgtgagttcatcagaatggttaccgattaaccaatcaacatcagggaaaagggtcttatcattgggtgtgattgcatcttcctctaac

SEQ ID NO: 465971 - DNA, 1000 bp, Homo Sapiens; identical to SEQ ID NO: 336242

SEQ ID NO: 465972 - DNA, 1000 bp, Homo Sapiens; identical to SEQ ID NO: 336243

SEQ ID NO: 465973 - DNA, 1000 bp, Homo Sapiens; identical to SEQ ID NO: 336244

SEQ ID NO: 465974 - DNA, 1000 bp, Homo Sapiens
ttttttttttttttttcttttttttttagtaacataaatcattttttaatttcaaacaattattttataaaaacattaaaacatcttttaatcctacagaacattttcctttgaattaatagcaccaacaaaaaaactatgttatgcaaatagaagatatgtgttatctacaaattaatgctagaatttttaaataggactgtaatattaaagagaagtagctaacaaaattattataatgaggacataaaatatattaggtattattttctatcttaaatatcttgaaagggaacatttttgccagaaaatgcaactgcaaagaatattaaaataaatgctacaaggaaggaagcaattaagcatattttaacccataaataacagcgcatcattgtaatatactgaataatcacataaaaacgctagtacatttacaaatatattattttctaaaaactctaccatataccaaagctattaaggaaatggctatatacaaattaaatacatacattaataatattaaaatgttttaacatgaaccgtgaatatacaccctgaacactgtcagcttatgcttagctactttttctcatttcttatcatgttaatgaaattttcaacatttactgttgttttctaagggcaagtgaaattctacatcctaggtagagattttagaatattagttgttcttatggatttcctgccctccagtggtatctgccttaatatttccactgcacctttcaaggttgcaaagagaaacatcacttctacatgtacattttgaaattagatcacactgtatggcaacatctaatttttcctccattacagattcactctctgtttgtatccctgcatcacaccttgcagcctgcagaacgcagttatcattggttttgttttgcaaaatgtgggctgaattgcactgcaactgtggaaactgatctgtattatttttcactgagaactggtagaaattctcattctg

SEQ ID NO: 465975 - DNA, 1000 bp, Homo Sapiens; identical to SEQ ID NO: 336245

SEQ ID NO: 465976 - DNA, 1000 bp, Homo Sapiens; identical to SEQ ID NO: 157656

SEQ ID NO: 465977 - DNA, 1000 bp, Homo Sapiens; identical to SEQ ID NO: 336247

SEQ ID NO: 465978 - DNA, 1000 bp, Homo Sapiens
ctagggcaacagcggtggcttgaaggagcagttgccagtgcagtggcggggcgtcagcatcttgcaggagaaatggtgcagggcgtcgtgggcttctttcaatttctgctggatggcatagcgcgccttccgctcctggtcgagttcgttacacagggtatctctgacaatttgcagctgttgcaccatttcttctcgataagccaattccctcttcatttgatcctgaaaattatctttgagactctgaaattcccgttccagcttcttgcggagctccatttgttccaggagcagtttttgcaattcctctctggccaggttctcgatatctttctccaccaaatgagttcctgtgacatccaaggtaagcccatcttcgcctctgtctgtatttgcaggacttggctgggagatactcctttggtctggataggatttcctcgtttccaaatcatcggcgggcgagtgattgtcttccttatctggctcgtgggcctcgggggtgcagacgtaggaggccgcgggccccagcgccaccgccgcgctcttcacgtgctcatccctctcgggcgcgaacaccttggccggcgcggggcctcctaggggcccgcaaggctctcgcagctcgtagccgccgccgccgcttggcgggctcctctcaggtctccgcaccaagtcttcggctgccaagtccccaaatgcgggccggccagctgggggtggcccgaggcggcgccgggggcgggggctgccgccgtcgggagagtttgcgggaccgtccgcgccagaggaggtggcggaagggggtccagtgggctgttcaccgtctgggccgccccctgcgctgggtgcgctgggctcggtctcctcttgggcgtcctcgtcgtcggggaagcggttggattccacgtccacctcgggctcgtccgcggtgtccacgtcgggcgaggcggaattgtagctggagctgccctcgctcagaaagtccgggctcacg

SEQ ID NO: 465979 - DNA, 1000 bp, Homo Sapiens; identical to SEQ ID NO: 158353

SEQ ID NO: 465980 - DNA, 1000 bp, Homo Sapiens; identical to SEQ ID NO: 336249

SEQ ID NO: 465981 - DNA, 1000 bp, Homo Sapiens; identical to SEQ ID NO: 336250

SEQ ID NO: 465982 - DNA, 1000 bp, Homo Sapiens; identical to SEQ ID NO: 336253

SEQ ID NO: 465983 - DNA, 1000 bp, Homo Sapiens
tttttttttttttttaagtatggctacaatctgaactgaagtatgtaagggaaggtggtgactcagtcccatgaagcgcatataattttttttattttcactttttttttagaaaaaagtttttaatttttgttgttgttgttgctgttgttgatttgttgttttgtttaaaaaaaaaagggttcacaaacttggcagaacttttctctgctggcttcacggcctgttctgttctcttaggctccacatgagggcacaggggtgtgggagcgggtggggaggtcgaggcgggtgcagagtcggagaggctgccccactgacagtcgagagggcagtcccggagactcggggggacccaagggcagcggcggcggcggcggcggcagcagcagcagcagtagcagcagcaggaagggttgctgatcccggagctgtcacccgccggagggtgggcgcgcggggggctggtgaggcgtgggaggggcggggcgggaggagagcctcactttctgtgcttctcctctttgtcactgcttttggcgttgttgtccgtgtggctattggggttgttgctgaggtacattttgtccatggccttgagggcctcggtgagatagttctgcagggccgtgaccgcggcacacaccgcggggctgccgaagccgtgggagatgaggttgaagtgggtcaagcagctctggatgccgggctccaggatggggttgggccgtgagttccccaggggagatcggtcctgagccagcaggtcggtgaactctttgcatatctgttttgtagccaggagcatgttttttcttgtcacttgctcattgggatcggaatgttgtcggttgagaaattcagctactgctttggcaggaaattcggtttcgcacacgtacccaaagtccctggctaggtggacagcttctccctctactagtgatgtgagcagggtaacgttggcagctttacgtctccctgcaggcagatttaatcc

SEQ ID NO: 465984 - DNA, 1000 bp, Homo Sapiens; identical to SEQ ID NO: 336256

SEQ ID NO: 465985 - DNA, 1000 bp, Homo Sapiens; identical to SEQ ID NO: 336257

SEQ ID NO: 465986 - DNA, 1000 bp, Homo Sapiens; identical to SEQ ID NO: 336258

SEQ ID NO: 465987 - DNA, 1000 bp, Homo Sapiens
tttttttaaatattaacgcacactttttttttattatattaaaatcaggcaatggtctgacaataaaaaggctgcttatggaatactgttatgttaaacttcacttacaggatgttaaatccttagaactaaggttttccccccagaaaaagattaatggaaacatcaattgcttttcagacttgatagttgctgcttcaaaaggtggttttacacaaatactaaattaaaaaaaaaaaaaaaacctttagtacacaatgaattgcttttatttcggtatgcatccacatttcagcatttagtggtcctgaacagcaagtggaaagacgcagcaatttgccaggaggtcaagcccaccaatttcggggatctgctgtgcacaccgggttccttcttaatccctgctgaggatcttgggaagcagcagcagcaccaaaaccaaggcatgcaccggattcaaggttctttttgttccagttgtcagattccaaactagaccccaatggattgcaaggatgaccaaatgaaagccctgtttaaaacttcttcaatttttaaaagcaaaagcagttacaggaaagtaaaacaattcagagggatcatgtgtgcttacaagtatcttcatgcggtctttctccaagttcaaccaccaaggactccgagagctggcaggtctgagtaaccctggtgactattcttttcaccttatcaaaacctgagctaaaaacaatgcatcagctgatgacagcagagggtggcagggctgaggacccaatattcatttcccaggctggtggagagtgagtgagtatggttccaaaactaaacaagggaggtcagaggctctttccaaccttacctgatggcttctggccaaagcaaggaagtgtcatggaaggtgttgggtggtgacggtgcaaaaaggaacttgaggaggagggagaaaaagcagcacccctcgataaaggtgggggagagaagatatggggaaagccctgaa

SEQ ID NO: 465988 - DNA, 1000 bp, Homo Sapiens; identical to SEQ ID NO: 157658

SEQ ID NO: 465989 - DNA, 1000 bp, Homo Sapiens; identical to SEQ ID NO: 336262

SEQ ID NO: 465990 - DNA, 1000 bp, Homo Sapiens; identical to SEQ ID NO: 157659

SEQ ID NO: 465991 - DNA, 934 bp, Homo Sapiens; identical to SEQ ID NO: 336265

SEQ ID NO: 465992 - DNA, 1000 bp, Homo Sapiens; identical to SEQ ID NO: 336266

SEQ ID NO: 465993 - DNA, 1000 bp, Homo Sapiens; identical to SEQ ID NO: 157661

SEQ ID NO: 465994 - DNA, 1000 bp, Homo Sapiens; identical to SEQ ID NO: 157662

SEQ ID NO: 465995 - DNA, 1000 bp, Homo Sapiens; identical to SEQ ID NO: 157663

SEQ ID NO: 465996 - DNA, 1000 bp, Homo Sapiens; identical to SEQ ID NO: 336269

SEQ ID NO: 465997 - DNA, 1000 bp, Homo Sapiens; identical to SEQ ID NO: 157665

SEQ ID NO: 465998 - DNA, 1000 bp, Homo Sapiens; identical to SEQ ID NO: 158504

SEQ ID NO: 465999 - DNA, 1000 bp, Homo Sapiens; identical to SEQ ID NO: 336271

SEQ ID NO: 466000 - DNA, 1000 bp, Homo Sapiens; identical to SEQ ID NO: 336272

SEQ ID NO: 466001 - DNA, 1000 bp, Homo Sapiens; identical to SEQ ID NO: 157666

SEQ ID NO: 466002 - DNA, 1000 bp, Homo Sapiens
ttttttttttttttaaaagtatttattatagtaaaggttactgttgtaaaacattagtgactttggtccatatcttatttgccatttgtctttaaaacattttacattatttgcatcataaattgtaatttttatgactatacataattggtttttttcctgacccttggaatgttagtttcatgtaactttttaaaaaattaaaacattgcagactaaatgtactgataagtacatactgaacacatttaattaccacagtaattaaaaagtcctgatctttacttcttaagatgaaaattcattaacttgcaatctctgggatttctctattatccacaatgagagtatgaataatcccttctttccgcttcccactactgacagcctttatgtaacagtcatggttcccgatactgaagtgagtttcagtcccatcatctacaaactcacccgctgtctccaattttttaccattgcaccatacgtccatagcatctttttccaaaacaattctaaagttctcaccatccatgtgtaatacccaagtattggtggtttttgatctgtcctccatatacttcttgagacttttcccattaatttccagagtatattcataagcaaaaccactgatagcgtctatatttatggtcgcttttgtctttgcagctccaacatagaatgtttctttgcccactaatttgaacatccactcttttcttatctcttcctttccatctacatatactactcgtttgcctgatgtagtcccatgttcaaattcgatcttgtggactccgtcacttaaagcaacatcccaaacagctacgagatctgtcattttttctaggctgtaaggagggctcagagtggcagagtccggagataccaagagatgattatagcacaacagtgggagtgtccttataaagggaagcagcataggatagaatgggccatagaggaagggtcgtagctctgccgaagaaggctttgg

SEQ ID NO: 466003 - DNA, 1000 bp, Homo Sapiens; identical to SEQ ID NO: 336273

SEQ ID NO: 466004 - DNA, 1000 bp, Homo Sapiens; identical to SEQ ID NO: 157667

SEQ ID NO: 466005 - DNA, 1000 bp, Homo Sapiens; identical to SEQ ID NO: 246414

SEQ ID NO: 466006 - DNA, 1000 bp, Homo Sapiens; identical to SEQ ID NO: 157668

SEQ ID NO: 466007 - DNA, 1000 bp, Homo Sapiens; identical to SEQ ID NO: 336276

SEQ ID NO: 466008 - DNA, 1000 bp, Homo Sapiens; identical to SEQ ID NO: 336277

SEQ ID NO: 466009 - DNA, 1000 bp, Homo Sapiens; identical to SEQ ID NO: 157669

SEQ ID NO: 466010 - DNA, 1000 bp, Homo Sapiens; identical to SEQ ID NO: 157670

SEQ ID NO: 466011 - DNA, 1000 bp, Homo Sapiens; identical to SEQ ID NO: 157670

SEQ ID NO: 466012 - DNA, 1000 bp, Homo Sapiens; identical to SEQ ID NO: 336281

SEQ ID NO: 466013 - DNA, 1000 bp, Homo Sapiens; identical to SEQ ID NO: 336282

SEQ ID NO: 466014 - DNA, 1000 bp, Homo Sapiens
catgtttgagaaatcttttattagaagatgtcccagaaggcaacattttaaaatcaggcaatcagtaatcacaactaaatacaaaatttcaggtgaacttgcctttcaaaataaatcagacccttgcaacaggaaattgccccaagagtttttttccttgtacaaaaacagttaacaccactttgcaaaaggcatacaaaaatacaatataaaaaaaaaagactcccccagcataatagccaacagcagcttataaaacacaagctattcagttgagacatcagtaacctacacccaaactgtcctccatagacaattccagaagtcagctggcttttgtaaaccatgctccagaagggtagagaggctatttccaaacatcccctggggtcctctgaggccaagaagcaacctcagaaagaaaccattatggacaatagatttggaagtagcagctggttttccagagccatatatagtacttaccaccccctacccaccccaacttccaaacccagagccagcaggcacctgctgtcctgggcagagttctggaggggctgctggtccttcttccaggacaggcttagaggtgcctgaggttacccacatgacaactgctaggttgggtgactttcccagactagaagctgcacgtggattccacttggagctgccgagtccagctggggtaaaatccatcatggttggctaagcatatctcctggaggctcctttaaaacccaccagaagcaagtccaccttctggagcactggatgagtcccaacagctctccccaaaacttcagaaacgcccagattctgggaaagatatctgattcatggcaggctggaaggggcccaagggtggctgcagagccagcaagctccttggaattgcatgaggaggacagatttgcatggttccagaagaacttcaaacttgccgctcaaggattgagatgaggcaggtgggaaagaggcagcagtacagttctcc

SEQ ID NO: 466015 - DNA, 1000 bp, Homo Sapiens
tttttcaaagttatacagctattttattcaacaaacacttattgggcagttactgtatctgtgtctgtacagtctctgtatgttgggggaggcagaggtgaaggctgtttggggtggaggatctttaagggtgaaggaattttaaaacctttcattttcacatgggtgatacatgacattgtattacattttcaaggggatagtacatatgagaaggaacactagcttcgaattaggcaaataaaaaagaaattggtaaagagctgtcctaccatgcatttctttcttccccagatgctgggaccagtagctgctgagaacagcgtgtgcagaccctgtcactgggtcttcagccacaccaacccacggtgcaaaatatcttgagtaaaagtcaaatgcttgggtctgcccaccaggctctcctttaagggtaagaataagccctttcaccttccctgtgttttcaacttgcagcagattctccgtgttcactttcaggttctccagaaacgacctgttgtaaacgtcactgaggcggacgaggagcttttgggtatctggagaataacagatgtcctggaccagtgtgttgcctatggcagtctttatcaagtcctctacttcatggaagtcctgggggtgggctggataaagaggcaagtccaggacgatgccatcctctgctcgtctggcccttagttctccactcagagtgacaaacgtgagcgtgctattcatgttttttattttgtgaaacagcacagctgcagaagccagggtggcatggccacagagtgggacctcactcgctggtgtaaaccatctcagtccaaagcaggaactttgtgcaaagttgtctgtcgggtgcagttttcggataaaagcagtttcagagaggttcatctcccttgcaattttctgatgcatgtcttcatccaattcattttctaggaggcaaacagcagcaggattcccacgaaatgctcttgctgtgaatgca

SEQ ID NO: 466016 - DNA, 1000 bp, Homo Sapiens
ttttttttttttttttttttttttttaagtatttaagaatgaggtttattgtaagtatttaagaatcatatcatcacacattaacatatcacaactaagcatttattatactgtttaagaagggaagcaattgcagtagtatttcagaagctttatctttctttaaatgcaatatatgctcataaactctaaacagtattttaaaatatacaatctctccaaaagaaaatattcaactaaagatagataacttttagtataagcaaaatgtcacaagattttaaaattaaagtcatcagatttttcacagcacattgtacagaaaatttgcaagcttcctgtacagagcagtataatctttactcttgagcaagtcgttcaataacacgccggtaatcttccactagttcctgaaaactctcttccagctgttcatgttgcatgcttatttctatttggttcatctggtttgtcagttcttctggtctgagacattttctcatcttagcaagatctctctgctttttcttatatgggctaattagtcttcttttaatatccagtctgtagcttctgtattgttcggcatcactcatgtcagttaccagtagtcgaagaatttcataaacccttctagcgtgttgcttatttattttgaacttctgttgtgcctctatcgccatatcttcattgaatccttgcattaatttttcccgggaaaaacagggcaaatcttgacaaagcttcacaagcacaaagtctcgtaatttcacatagcttttggatggatcttccgctgtaatatcaagaactgtaggaaattcagtgtagtatctatgaactgtttcaagaagttgagcaccatggccttgaccttgaaatggagtcaaaatcagcatctgacttacacgtggccgggttttgtctgggtacacatagtaattatagactgtcatgtagcctacggtcgcaaagagcgtagctccatccttattatact

SEQ ID NO: 466017 - DNA, 1000 bp, Homo Sapiens; identical to SEQ ID NO: 157671

SEQ ID NO: 466018 - DNA, 1000 bp, Homo Sapiens; identical to SEQ ID NO: 157671

SEQ ID NO: 466019 - DNA, 1000 bp, Homo Sapiens
tttttttttttttgccaaacattagagtttgttttattgcatgacgtttgcataagaaaaaaagttattgaaaactgtaaggcatcatgcaatcattgaataagctaattattaactgtacacttaagataggtggacatataatctaaaatttaaaaactagttccagaaaagtacataaaaaatttaacatgatgagcttttaaatatggtttatagtttcatgttgttaaaaagtgcttcaaatgtactgctggaaagttgctctttacaaatggcgctggggtgatgtcagattataaactgtaaaaaccaagtacttttatggaattagaaagctaacattgtgatactcaaacttacttgaatcagttttcaattctcattcaaattaagttgatttaatattaataatctaaaaaacatctgttttataaccagcaaaagtctattgaattcaagttatgcatgttgagcaatcaaatctctgagtaagcctgaacgttgagacctggaaccaatgtgagtttgtgttaatcaatgtactgtgccatccagcggaagccttctccgtaaccttgtcttttgagcacactacacatgaaaacttctaagggtcgggcattcagttctttcagagatatactcccctttcctgttgtctgaccatataaaccaaacatctctcgcaacctctcttcactgatggcttcaggtctgtcgatcttattcccaagaatcagtataggcacattagcaatggtttcatctgtcattagtgaatcaagttcttcttttgactctaacagcctttcgtggtctgcacaatccaccagaaatacaatgccattgatagcaggaaggtagtttttccacactcttcgagcttgaacatgtccacccagatcaaaagttgtaaacgtcatgccagcaatggtcagttcttcggaagtgggatgtaatgttgggacatgttgtccaagtctgtcatcttttagca

SEQ ID NO: 466020 - DNA, 1000 bp, Homo Sapiens
tttttttttttttttgagggaaacataagtataaatttactatccacctagtggtagctaggtaaaattgcaggcataaagataaaaaagaaatcatcaactttgtagttcctcagcttcaaacccaaacctgcaagggagaggagagacccagacgcctcagggaccaggcagataatacaaataaatgaaacaggccaggtgagagagtacaagtcttgccaaaagaagaaacccctacttagtttcaattgattgtcctcttctgaaaatgcagatcagaattgccacacattctgaccgatcgagagaggccagaaattctaattttaatgtgaaacctcttgatttcttagacggtggctcaattttcttgaaaacactaggtgagctaaataaagctgacagtccaccagttttcaatactcctcttgcagagagtgaatggcatctcccctaactgtagtattagactgccactcaccagccacagtttgcaactgcaaaagaggcataaactgacggggatctcctgctttactatgcacacacagctgaactctccagccgtggagaacaactaactctataggaaaaagtagaaggctaagctgagccatccagggatggcggcaggggccttcatggctagctgctggcctgtaggcactaaattgcagactgctcctgcaggaagccttcagggcctgggaggcctttatctggctcagaagctagggctgcttctcgaaggacttccaaatgctcctcagcagccgacagagactggtcaatccagtccaggcctcccgtcagatggcaggcattccttgtcaccagcaccaggtgactgacagacaggagcagggcagtcgtccgtgcgtccaggagtttggggtccaacggagggtacatcgacttcacaacatcatccaccctggggctgatccgcttggccaccacaatgatgtcgctgacactggctgaagtcttcatcttg

SEQ ID NO: 466021 - DNA, 777 bp, Homo Sapiens
tttttttttttttttttttttttttttttaccattgaaactgttttaatgttgttgcaactccaaaatgcaacaatcatcagcttgtaaaagacccaaatttcaaaaattcattttaattactcctttatacctattttacaaaataaaggtaagacacatttaaatcctccttgtcctaattggctatgttcctaacttgttttctatcactacagtgaatgctgcaatactgatataagaaaaaataaaataaaatagtaacctctgcttcaatgtacagtttccagaatctgccagaactggggaactgggcaacaaggcgttcataagtcttccgtgctttgtctataggttgattctaaaattgaaaaccaataaacagcatttacaatgttaggattatgaaaatattattcactgcagaaccaagtagtgtgattggacccatagagaaggaaatgtaatcctatatcactaaacctgtgcctctcgaatgagaatgctccaagcatcaaggtcatatggattctcttctaatttcttttccgctttcttcaccttctctgggacatactcagctgcctgctccgtggctccgtctcctgacatggcctcagctgattacaacgtgcgcactgaccgtcgatgggaagctagaaaagaaaaattaaactaaaaaccacccccaaatcagtaaagttaccccctgcccagctgagccagaccgccaacaccaatcgccaccgcccactcaaatatgaattaaaatggctgc

SEQ ID NO: 466022 - DNA, 1000 bp, Homo Sapiens; identical to SEQ ID NO: 336285

SEQ ID NO: 466023 - DNA, 1000 bp, Homo Sapiens; identical to SEQ ID NO: 336286

SEQ ID NO: 466024 - DNA, 1000 bp, Homo Sapiens; identical to SEQ ID NO: 157673

SEQ ID NO: 466025 - DNA, 979 bp, Homo Sapiens
actggttagtcatgaaatcggcaaaattccagatgagctctccaaccacgtattttctgcgtttttgatccagacccagatggtactgctctagcagacttttctggtactcttcactgaacatcagaggtggatcctggtgaaaccctataagcgtttccactccatacgcgctctgaataatgggattgtgatgtcttacaccaattctcaaactgggcgggcagctgcagctgaatcaactccaggtgcccgtagttgcgataccaagagtagtagctgttcacacggatcacatccacatacagagcccccttgtctgctgcgtaggtggagttggtcacaaaggtcacaggctgggaggggtccaaggctttggtgtgagcaatcaccatcctcccacgagtacaggtaggcggggtgttcgtgcatcaggtacggccaccagaggttggcacccagcaccttcagctggccctgggtcccagcctggttgtccacgactttgttttctgcattcaaaagacacacttccaacttgaactggttactgcacttgacggagatctggtaattcaccagcctgtttgaaaaatagtctaaggctggttttacagggttgctcctatccatcacctgatgtgaactttcttaggaagcttcaggactacaccaaagaaccagaacctgctccttcactctgttgcattgtgtggagtgcaggccatcatgactgctcttgacaatgaaacatctcctcatggagcttgagttctcatatgtaatgacagccactggcccaaaataaggggatggagaaaatcttgagctagacacagcatgctgattggtgcatttacaatcctccagctagacgtaataagttctccaagtacccaccggactcaggagcccagctggctttgcctagtgcatcccggccgcgggcggagctgcccgccagtctctggcgcgctcc

SEQ ID NO: 466026 - DNA, 1000 bp, Homo Sapiens
ttttttttttttttttgcgggtgtgagcctgcagtgtgtgcgtggcagtttggtttattggtagtgtcgtctcagcagcgtgccacatggccaccatctgcgggctgcctgctgccctcccaattgtccttggccctctccctgcccagggagcctgcagggaccctcggtgccaggctcggctgctgagccagcttgggtgtgaagcctgggctggcagctgaatgatggagagagggtcaagaaggtgagagacccccaccatggagacccagcagagccttctcaaatgctgataagccaaatgtcacaaggtgacaagtccaaggagtgagaccaggcccatgagtgcagcacaccctgctcttccagagatgccacaaagccccttcagggagagaggggcccaggagggcagaatgcctgagaaggtcgctgagccaggcagaggtgagcacagggcggggccgggcgtgctctttctccatgggcgggtggaggaaagacagtccgggtggtctgctcaggaagcactgcctggggctgggccactctgcccgctcttcctgggaggaaacatgggcagaggggcccatggtgggaggggagagagtctctggctgcagttgtcccaccactcagagaaaagaagtggctgaagctggtcctgactagtgggaggcctgggagcagacacggtggcatttccatggaaacacaggtgtgcaggccgtgtggagctggggatgtaggagtggccagtgcccggtgtccacggggtgcgagcggggacccgccatctggggaggcaaaccacagagctgctcacagggcgaagagggcatcctctgaccgctctggcttcttccggccagaagggtttgaggctggggcaggagcctccatggggggcgaggggaggtcgggaaccatttcagcagctttggctctttcttcaaggaatttatcaaactcttcacttgtgacaccctcctccaga

SEQ ID NO: 466027 - DNA, 1000 bp, Homo Sapiens; identical to SEQ ID NO: 336290

SEQ ID NO: 466028 - DNA, 1000 bp, Homo Sapiens
tgagacagagccttggtgtgtcgcccaggcgacaaaagtgctaggattacaggcatgagctaccgtgcctggcctgtctatatttttaaaaagcatttgtcttaccttcaacccgtgattccaagtgcttatccaactctgaatcttttttcaccgcttcatctgagaccttgggagcatttgaaaagcaaactagtacaatactcatgttatctcgacttcccttgtgtaaacaagtgtccactacccaattgcacacattttccaggtcatcagatacctcaagcctagatttaacatattcacagagctcctcattactcataacatcccagatcccatcacaagccaagatgataaattcatcctcttctgctcttaaaatttcataaacctcaggctctggagaaacaagttgttctgttgggcccttgccatcaacacacttgtaatcatagtcccccagagcacgagatactgctaatgaaccattaacacgttgtatcatcacgctgcctcctgcattttggattcgctccttttcccttggattgcaaggtttgtgatcctgggtagaaaagcagacttgtccattcctatacagaacagcacgtgaatcaccacagttgataaagtagatatgcttaggtgaaatcataactcccactgcagttgaaccactcctgtccatcccgtttctgaggtctgaaaagttacgcatgtattcatcaattttcaaaaatccagttctgataccattcttaacattttccactgaaagctcaagagcagatcctgattttccagctgccctaaagtcttcgttagtagtgatgtgttctaataaatgtgttgagcagtaatttgccactcgggatccagcatgaccatcataaactgcaaaaaatgaccagtcttccaagccgtgaggaatacctacaacagctgtgtgtgcatcttccatttccactctccatccttgcatgctgctcaggccata

SEQ ID NO: 466029 - DNA, 1000 bp, Homo Sapiens; identical to SEQ ID NO: 157674

SEQ ID NO: 466030 - DNA, 1000 bp, Homo Sapiens; identical to SEQ ID NO: 336293

SEQ ID NO: 466031 - DNA, 1000 bp, Homo Sapiens; identical to SEQ ID NO: 157675

SEQ ID NO: 466032 - DNA, 1000 bp, Homo Sapiens
ttttttttttttggattttattgtagtttttatttttattttgatgggttttctccccttggatgcactcaagttacttgaaatcagtttgatcctttcaaatgttgctcttaaactctgttagggcaagtccagagtagtcttcagtctattcccatctccctaacctaaccctaaccctactttgccaatatcttgctgaagactctactcaatgatccatgtactatattaaaagatccactattgttgaaacacatattctacccagccttgtatgagctctgaggaatttttctttgtttttctttttttttgagacaaagtctcactctgttgcctaggctggagcacagtgatgcaatctcagctcactgcaacctctgcctcctgggttcaagctattttcctgcctcagcctcccaagtagctggaattacaggcacctgcccatcatacccgactaatttttgtatttttagtagagtcggggtttcaccatgttggccaggctggcttcgaatgcctgacctcagataatccatccacttcggcctcccaaagtgccaggattacaggcatgagccaccaagcccagccctctgaggaatttttcatcactcctttctccttcctgtcattttttctccagcctcaggcaatttcctgcctcgattttgttttcttcctttaaggaatgttctatttttatttggcagataaaatgaggttacttagagatcatcttgagtctctcaaggcttatttttaagctttcttaaaattggtatacattagcctttagtctagctccagtttggatctcttatgaaagtacaacctttctgagtctctactcaatgccccacatgttcaagatctttccactttaactggttggcattcaaacttctcccagctcagtgtgagctctgagagtttttcctcttataactccctggcagtttttcttttcacctaatgcaacacatatgcatct

SEQ ID NO: 466033 - DNA, 1000 bp, Homo Sapiens; identical to SEQ ID NO: 336295

SEQ ID NO: 466034 - DNA, 1000 bp, Homo Sapiens; identical to SEQ ID NO: 157676

SEQ ID NO: 466035 - DNA, 1000 bp, Homo Sapiens
ttttttttttttttttcttactaggaacagaaattctttattatttacctttcacaaatgagaagactaagagtcaaaggggttaaatttttacaaaatatccttttggagatataaactttaaaactgtatgcttctcaaatggcaaaggattaatatgacacagaccaagttctctgataacaacatacttcagttaaaagtaataatataaatgatgaattttcccattatatgttgggaaactaagaaacatacctctaagatatttatagattttctgtaagagaattggttggaaaaacctagaaagttggcaggtattggctgttccttgctgtttttgggcaaactacctcaataaagagatgatctcaggctagcatctgcctatttgaaagcatagatgaaaaaaaaaagaaatctgcaaagaagggccctcttacaagcaacaatataagagtctaggctggaaaagccaactacttatgtaacctaggcagtgggaaacaaaggtatttgtcacagcttttcttaaaggcctcccatgaagacttagccagacaatgggaggcagcccagtggcaaaaatcagatgaaggaattcagctttcctctagatcttcttggactatttacaaaatattcatgttaaagaatgtggtctcccagactgggcaacatagtgagaccctgtctctacaaaaaaaaattttttaattacctgggggtggtggtgtgtgcctgtagtcccagctattgaggaggctgaagtagaaagatcacttgagcccaggagaccaaggctgcggtgagccatgactgcaccactgcactgcacttgagcctaggttacagagcaagaccctgtctcaaaaaaaaaaaaaaaaaaagtctctccaatccaaacaagatgaactttatctaactggccctgaacgccactggcagatgtaacctcatgagatcaaaacgagtaagagtgtggccctgcctgtga

SEQ ID NO: 466036 - DNA, 1000 bp, Homo Sapiens
ttttttttttttttttttttttttacattgcattattcataatttaattgtttgaaattacattaaataaatcaactaattaaatactaaagttttgttcctttttaaaggaaataaccacaagatttttcccagcccaaattccagcgccaattttaggccaactttggctgttttcttccaaaagtgcttatgtggaattgggatccccagtgtagtgacagacagtcatgactgctgctgagtttgatctgtgaaggtagtgaaatgtggccctgatgtttcttaaccctgatttggtaactaccagccctgacaccatcagtgcttgatgtagcctggaaccccaggcccactgacgcactgggcacggggctctgggtcgaaggctggagccgtcactgttgttcatgtgcatttggagcactgtgggaatagtctggcagctgtgtgctgattaaatgtctttggcaaggcagggggcaggaaaaggccttgtggaaacaaaggcaccaaggatcaccccagcccagtgaaggcagaagaggtcacgtggatcagcctgtgtctttccagcagaatctgattaaagcctgtaatgctgtagggtgaaggttcagggcagatgtcagcataccgcagtggagactttctgcagtgaaactttatcgatccctgaggcagcgctcggatggacgtgacaccagcctggtcttgtgctgtctggacagtgtagctactggggctgcccctggggagctggaggcaagcccagaccactaatttcctctgaaagctgcctacacccatagccgtattggccaggaccagtcccaggggccagaggcggattattgcctccaggagcctggtctgcagcggcgaggtgctcagggaacagggagcttgagagaagtgtttttcttccacaccatccagctctttagcagcaaggcaggccattctgattctccacttctgccatgcacgcttgatgact

SEQ ID NO: 466037 - DNA, 1000 bp, Homo Sapiens
tttttttttttttttttttttttttttttttttttttttttttttttttttttttttttttgtgaacatgacttgtaagttttaatgtactagacaagcaaggcggtagcactagttctctcttctgatcatgcggtaccttgctctctgcccccatggatcacttactgcattctgtactctagcactgtgtatgcatcactcttccttatgccccgtccaccccaccacctggtctccagactcagcagaacagaggtgactgattccttggaggtagcacagaggggcccaaagtcctagatcctcagggaaagaccaactccaagtccagggaaaagctctatgcaaagggctgcccgtcatctctgccaaacttaagtggcgtggcttttcttctgaccttaaagatgttgttctgggtaggggtgtcaatgcccaaatggagcatggcctctctggtcacctcaaaacaatcctcttctaagctcctctctgggttgggcagccaggagaaggcagctccctcaggaaggtgccactggagcctctcgtcctcactggctcctttgcaaatctgatagaagatgtggaagttcctctcactggaagcctggcaggccactcgagttttctctaggaggtaggtctggactgcggctccagtcatttgctgagccctgttcagctggagctggatgaacttcccaaagcgactgctgttgttattcctcagtgtacacgcattcccaaaagcttccatgacagggttggagttcaggatcctctgttctatcctctctgcaatcttgtggctctcccaagatgcaggtgaggtggccaccacagcatagaacttcattaggcagcgagacgtccatgtctttccagcaccactctctccactgacaacaatagactggttgactggttcaatcaggctcttgacattcctgtaggtctgttcacccacagtgaacacatggggcttcagtttctg

SEQ ID NO: 466038 - DNA, 1000 bp, Homo Sapiens; identical to SEQ ID NO: 336297

SEQ ID NO: 466039 - DNA, 1000 bp, Homo Sapiens; identical to SEQ ID NO: 336299

SEQ ID NO: 466040 - DNA, 1000 bp, Homo Sapiens
agaataaatagaactttattctttatccagtagatctcagtggaaagcccaacagtaacaggtgcacccacgggctccaggggaaggggccccaacccctggtgaaggaggtcggggcagagccagctcccccagctgggggtgcaggggtgaggggagacccccctgtaggcccgtcctgcggggtaaggagggggcacagggacatgaaaggagagtgggggccccttccgagccactccctcccccggacccaccccctccagctctggatccagctccccccaatacacagcacaaattccttcagtataaatgtgcttaaaatgaaaattcttattaaaaaaatcaaaacaaaaaaattaaaataaaaacaaaaccagcgagaattaatacctggggttggtatggcagggtatgtacagggggaaccccccgcccctgtcccaccccctctgtcaccaaccgaggcaggggggaggttgaggttccccagctggggagcaatggcttgtgagttctgaggatgggggagccaagtcctggcgtttgctggtgatgaagatgtggtgagctgggcagaggggtgtcttgatgaacacgaggcccccaggacccatcctgagacccaggaccaggggcctcactcagttcctggcctcggcctctgacgtcagcccaggctgtgggagcaggcagtccactgagggcccaggcctctgtccaaggagtcgctgcctcctccctccccgtcccccagggaaggtccccagtactgcccgggagggcaggtgggggcagggctggtgcggggtcacatggtcggtagaaaggcagagaaaagccggggcggagggcgagggctgtgtccatgtggcgtgggcggtcacggggagtgggtggccgggctgcttctgttggagctggggctgaggctggggctacagctgcctggcgggggggccaggccacccccgtcccgccccccaccccccggctg

SEQ ID NO: 466041 - DNA, 1000 bp, Homo Sapiens; identical to SEQ ID NO: 336300

SEQ ID NO: 466042 - DNA, 625 bp, Homo Sapiens
gacactttattgctggggcctcagagaacactagagactaggggctggtggcctcaaagatccagggggggtgagtccaaactggcgttgctgctccttgtgcctggcgtgaagtctcagtgctgccccatcccactgctgcttgatggctctcagcttggccaagagcctgtccagactgtcgtgtaagatttcctcatacttcgcctccatgtctgccatgtgggcccgaagctgagccagggcctggtcccgctctccgagagcttgttcagcctcttcccgggcagctgcagcctccctttggcatgcctctagctgcccccgaaggcctttgacttcttcctccagctgcttgctgtgggtttgcatatcctcctgcagggcatggcactggcgactcatctctggggtgggggcagtgggccaccagggacccaggttggagatggagggatggagaaaggaaatgaagttgtgggtggggaagactctacttggtctagtggaacaggagcacaaaggccttcttggttctttttgtgattctgagaagctgcagaccatgaaaacctgaggaagggacaggaagcccgacctacctcccccagtccagctttggatg

SEQ ID NO: 466043 - DNA, 1000 bp, Homo Sapiens; identical to SEQ ID NO: 336301

SEQ ID NO: 466044 - DNA, 1000 bp, Homo Sapiens
aagaacaagagaatattttatttataaaaccagcaaaggtaacagcataaaaaatacccaatagttctatcgtgtagtgctagtggaaatgtgaattaataaacattctttctgaggatcatttgacaaaacataacaaaagccttaaaaatatgcgtatttcttggtttaacaattccaatttcaggaatttatcctaatcaaataaataagcaagtatgcaaagatatattctttaaaaatctttattgtctaactaggaaaaattaaacaattattaaccattcatgcagtggcccaccaagcaacaactaataatgatgtagatctatatgtattgacctaaaagatccccactaaacatgtgtgtgtgtgtgtgtgtgtgtgtgtgtgtgagaaaccccctggaaactctctggatacttgcagggtgatttgcctatatttttaaagttttcttcatggaatatggaaataccatgggtcgaaagcaaatgccatttggggataagactgccatgcaaaggaccttggacttcctgcaggagagaagagggtcattgctaggagactcccctcatggtgtccatgaacatggagccctgacaccatgttgtttctgaaaatgagccaacgttgacatggtcctggcccactgggtgttgttcactctgttgattacttttggaaattactttaggtaaatgccatgcttgacagttggtttttaattttaaacacaagctgccattgatttgctttgattattccacgatttcaatcactttcccaaaactttgtcttccttaattttcctgtatcaaccagatgaaggtgttcacagagggatactcagaacagtgtattaacaatagctctgtctacgagttggccgttagacacacttataagggatgctgatgttccagggaaggatcctgtgctaactgataggtgccaagcgttctggttttcactctgccttactgggcctctcaag

SEQ ID NO: 466045 - DNA, 1000 bp, Homo Sapiens
aaatcggcaaattctatgttgacaaatactgtaatccagaaatctgcttttctacttcatattggacaggcaactaaagtagtcacattgaacaaggatatgccccaccttcaagaccagctgctacaatgtgaagcctgacaaagcttctatgacaatatcatcaccaacctcaaactggaactaatagaaataatcataatggatatacacgaggattaaaaattcaagtgtgcagagtttaagatacttggctatataaagtttaaaatactcaaatatatctttatgtatatatacttgtctatatttcatatttttcaagaggctgaatctcctgaagaaatccaatatgcacccctaccccgggaaaaaaaaacaaaaaatgaaaaacaaaaaagtctcctcatctcagtgtaatgccagacactatttggaaataaacacaccaaggcagttccagtgtcccgtggtccccacctggcacctgcactgtgctctctcttctgggactgcccttccctccctcatgatgttcttggcttgccacctcatcgcagcagaggatcggctccagtgctacctgctcagaggcactgccgtgagcagcctctctaaaacagtcctgtctcttcatcaaatcccaagcaatctctaggcccctcctgtcctgcttgagctctctctctctagcacgatttcctactaacatactatatttttacttatttactttatcttccctactagaatgattctaatttactggcatttacatatgaaactacagtttaatcatttgagggagaaaaaagccaaccttaatgctattctattatcaagcatattcatcttaccaaagaggaaagtgaaacccctctgttaggcaaaacacaaaccaggatgtggctaagtttctacccttcatttctactggactcttgagatcatcaataacccactcagcggtggggccaactcgatgtgaacacagtacaca

SEQ ID NO: 466046 - DNA, 1000 bp, Homo Sapiens
ttttttttttttttttttagagaccatgtgcagtttaattgtggggaggctgaggaaagcagcattttcaccaaattggtgtaaaaataaaatggggtccacacgtgtacactggcagctacagtaaatttaaaaatctgagcagcaatttgaaccatttcttggaaaaacaaacactgacaaacactgagttggtgcctggcgcggcccgcagggttggaggccagctccgcatcatgggtgcagccccgcactgtgggcctgcatcccggggatcccagctcctcggggagtggccggtgacctcccacgcagtgggctgagccaggcctggctgagagggggccgcagccagcaggcccggatggcctcccgcgcctgcaggggacatccaggaaatgggtgcagtgtgcgggacccgcatgctgcccgaggagtctttgcagggtggacaggcttgggagtctctaccagcaatgcaataaataagcaaatccaagcggagaaagaccaagcacaaaccccactggcacacaaggcccagcccggttcctgcgggcgtcagcggctcttcacagaccaggagtctccaagttggcggctccggtgttcccgacgtgccatgggaggcggcgggtgggtgggacacgcctaacgcccacgtctagcagcctcggggggcagtggcactgggcctggcagggtcccatcggcaggacccttccagctctgctgcgcggcggtgaggtggggatggcggagcggtctccagtggcaggtgggggcgagggcctagccctcccgcacgctcacacgtggctcagccagggtgctgatgatggactccaggccgctgccctccaggagtgtgcggtggtcaccctcgatgacgtggacggacaacttttcaataaatggtgcatagacgaacagggtgaattcctcctcagtggtgacttcaaaattcctttggtttatctgggctttgtaggatcctgca

SEQ ID NO: 466047 - DNA, 1000 bp, Homo Sapiens; identical to SEQ ID NO: 336303

SEQ ID NO: 466048 - DNA, 1000 bp, Homo Sapiens; identical to SEQ ID NO: 157677

SEQ ID NO: 466049 - DNA, 1000 bp, Homo Sapiens; identical to SEQ ID NO: 157679

SEQ ID NO: 466050 - DNA, 1000 bp, Homo Sapiens
tttttattggtacgtattactttattgcagtgggcacttcattgtatttgaggagattcacctaaacagagcagctccactacttacaagggaccataaagcattactccattttggcataaggttgagattttttttctgaattttcagtacagtacttttcttctaataacagcagttgactgacagctgttactaaaaaaacttgtatgaataaccttcaagtgcagtttcataaagtaagacggaagatcacaactaatgaatggaactgtccttctggaacacaaacataaaaaacttgcatagctatgtctaaagaggttttaaggcacttaatcgatatttcagtgtcgacaaagtgtcggtttttttctgtttctttaactgcttaaagcttttctggatacagtcactagcaagtaccatgggaaaaattagactgcagttattatcttttggagtgagttcagaccctatgagtcacaagttggataccatgatgacattcaagtgtttaaattttcaggtattacacattcgagatttcatacttctctagccctttccttcatgcttccatcccaacaaactgaactagttacctcagaactggaaaacttgaaggcatttgcctagagattacttgattcttcgccttccttcttcgacattttgacaggttctctcccacagtgtatgtccattaggcacaaaaagccaaatcaatttcaaaatagcacagattttcagcagttttttttttaagggaggcatttagaaaatgtcacatttcagatatgttgcagaactgtaaaaaggggactttatttcatgggaagttgactgtccagaattgtcgcgcttctttgattcagatttatccaagctgatcttcatattgtttacgaaagcagtcaccggctgggaagaaatcccaacacctttcttggtacatcttccagacataagattcctgacccgtgtgctctgtttcatc

SEQ ID NO: 466051 - DNA, 1000 bp, Homo Sapiens
ttttttttttttttttcaagtccaagagtctttatttcatgaacaaaactacttctgtaaagagacgaggctgaatgggcccctttctaggtggccacagttcaaggctggtgagagagggcgaggttgggccggggcaggagtgcattacagggaggggggaccccaggtccagccggaggaagcgggaggggaaatgatgccggggagggggagtcggagtgggtcccagaaccccctgccccaaactgctccagcccatcatcgcgacccctgccgccaggcagggaggaggcggggaggggctggccccagaagtgcgtgtctgaagcggccaatgtgtgcaaatcagcaaggaggaggggtgcggggccgctgcccccacctcaccgcccccctccccaaacaggcagcagaagcagggtgggggcagcggcagtattgctttacccatcatgcatggcggtgcgcggccggcggggcaggagctggaggaggcgaaagtgggggtgcgagccaagccccctgccccctcccaccccagtggctccgtcggcaggactctgaggctttctggggcccaggagtggccacccccacgctgggggcaggcggtgcctggagagtccccattacggctggctcttccttgaggcggggcccagggccagggctattcggccacctggacgcccgtgcagttctctttgctttcagaggtgatggccaggtattccgaggcattctcctgtgcagcagtctccgtggcggcagcgatcttcttgtagcagtaaatcatctctgccacgagccatatggtcaacaccacaatgagcacatacatcatgatctcagacacgatggatgccatgtctctgttggctttgtccactacctcaatgtggatcttcttgacgacgctggtgttgtgctcgtagttttcgaagaagagcaggcggtagacgtggcactcgtagtcgcccgagtggttgtaggtgac

SEQ ID NO: 466052 - DNA, 1000 bp, Homo Sapiens; identical to SEQ ID NO: 336306

SEQ ID NO: 466053 - DNA, 1000 bp, Homo Sapiens; identical to SEQ ID NO: 157680

SEQ ID NO: 466054 - DNA, 1000 bp, Homo Sapiens; identical to SEQ ID NO: 336308

SEQ ID NO: 466055 - DNA, 1000 bp, Homo Sapiens; identical to SEQ ID NO: 336309

SEQ ID NO: 466056 - DNA, 1000 bp, Homo Sapiens; identical to SEQ ID NO: 157681

SEQ ID NO: 466057 - DNA, 1000 bp, Homo Sapiens; identical to SEQ ID NO: 336311

SEQ ID NO: 466058 - DNA, 1000 bp, Homo Sapiens
gaattcctttttttttttccattgtggatgtcttttattgtgcttagggacccacacgatgctgaatagagattggtcaacagacacggacaacacctgggttgctacacggagcccctccccagaaggcgatggggaagccgctctctgtgctgtcttcaacaaccagaaggcgatggggaaactgtcctctgtgtccctccccagaaggcaatggggaagccgctctctgtgctgactgcagcggccagaaggcgatggggaagccgtcctctgtgtccctccccagaaggcaatggggaagccatcctctgtgctaactgcagctgcctggcagttcacaggctgacggctcccaccgagcattacactccagtccctggagcccacgtccacttgcaggggacagccatgactggccctgcacggcccctgccctcgggcagcacgtaggcaggcccaccgacttgaggcatgaattcaaactatggcatccactttcctgtcagtggcagagggcagtgtgccatggaaagcagcttttggccaacatccttcactcagtattgctaattattcttgtaaacaaaaactgcaatatcagcaagcaggctcgcggatactgcattcttgaatttgttttgattcacaggtaaatatgattttaaaaagccattcgcaaacataaaaactgttgttattgatgtggcacgcacctgagagaaataaaattccagtggggtcccttcctggaggtcacggctcaaggccaggcagagtgtggtctgcaggctgcctgcatgggggccctgcatgcgtcctggggtagtacacgctcctgtgggggccctgcatgcatcctggggtagtacacgctcctgtgggggccctgcatgcgtcctggggtagtacacgctcctgtgggggccctgcatgcgtccggtccggggataggacacgctcctgtgggggccctgcatgcgtcctggggtagtacacg

SEQ ID NO: 466059 - DNA, 1000 bp, Homo Sapiens; identical to SEQ ID NO: 336312

SEQ ID NO: 466060 - DNA, 1000 bp, Homo Sapiens; identical to SEQ ID NO: 336313

SEQ ID NO: 466061 - DNA, 1000 bp, Homo Sapiens; identical to SEQ ID NO: 336314

SEQ ID NO: 466062 - DNA, 1000 bp, Homo Sapiens
ttttttttttttttttttttttttttttttttttttttttttttttttttttaacagcataatacatctgtttatttagttaatattacaatggtaacaagttaagagcactaaatttgtatcctcttagaaggataatgattaagattttgatttgtaaatttcacagttcttaaccattaaaaatctattttccaaaggagtagtaatatatatttttattaagggacagatctaaactttctgatttatgacccaaagcatatttgttcattagtttaagcaaaacattagggatatcttaactcttggttactgctttcaggaaagcacaaagttgttgaagcaaatatacacaaaacgtatttttcaatagtgattttaaccattgtatatcatgtcaatgagtgaacctgagaaccccagatttagtatctccagattgttgtaatacactctggcttaaacaatcaaccaacaaacatgtatttagtgcctactatgtacaagccagcatactaaagcaatacaggaaatataaataattaaaattattggtcctcgccctgctcaggcttccaatgtagttggtaatattaaacacagacacaaattatttcactttcaatgtcctcaaaaaaagtgatgatgttaactggatcatatgtaagaatcacctctgctggaacccagagggagcaggggcatcttcagcagtgattaaagtctctgtctgaattagattcctcagctccaggtttgagtgctgcttgcactcctgaaactgaaagtgttccagccagactcacacctgtcaccatcagtggctatacttagactcatggactcatgacaatggagcaagataagtatacatatgtccacatcatatatataaatatatatacactcaaattatatatagggtgatgttcccctatatatgtctcctggaaagccaggagttcaggactttccactgtgcatggagaggaggata

SEQ ID NO: 466063 - DNA, 1000 bp, Homo Sapiens; identical to SEQ ID NO: 239939

SEQ ID NO: 466064 - DNA, 1000 bp, Homo Sapiens
tagttgatgccccaagacactccatccctggggggaggccagtctgcacccaccttttgcctgctcagccaggtcagcccagcaacagtgccctccaaacctctcatctgacatagctcatccaggctgatgactcctatccctgagtcacagaggagaaaacaaggcccagagagtagaagcaacctacccaaggtcacacagcaagacctggcagcaatagcatcaaagtccaggcccctcaacatcccatcatgggcctgtggcaccttgggaagtaggccctaggcacacccacggcttctgcctcttcctcgggccatcctggctttccccaggccctacaggtagctgatgcgcatcgtgctggacttctccccagtggaagcctcttggggtaggagctgctgctccttgctggccactctgctgggcggccgctcctgcccgctggtgccaggctgcgtgatctggctgacccggccgttcatctccttccccttgcccccctccctgctctcctccccatcctcctcctcctcatcctcctcctcagtcttctccgggggccccacagtgggctcctggctgcgcacacggcgggagggccgcagcaggaccctgcggaagccctgcttgaagcggtaggagaggaagccataaaggatggggttggcacagctgttggcatagggcagcgccaccaccaggaagtagagcccaaagaaggcaggctcctcgggcagtgggcacaccacgttgacgatgttgagcacgtagaagggcatccagcagagcacgaagagcgccaccacggccaccaccatgcgcgtgaccctgcgttcggagcgccgccgccgctggcacgagggtgcccacacccggcgcccagctgagcgcaccttcaccacgatgagcaggtagcagaggcagatgaccagcagcggcccgaagaagcccagtgcggccgtgtagatgatgaagccggctcgccaggccg

SEQ ID NO: 466065 - DNA, 1000 bp, Homo Sapiens
tcagaaggtggtggtcctggtgagggggatgcgcttgcggccgggttctggttgcagggcttcctgctggcattttagtggggggcacatgcaccctgccccacctttgctcttgagagcagtggcatagtagtccaggggctcctcctcagcacctccagcaccttccaggaggcagcagcgcaggcagagaacccgctggaaggatcggcggaagttgtcggagaggaagccatagagaatagggttggcgcagctgttggcatagctgaggataagggacacgtggttgacggtggcatcaaggctggtcacgacgaggttcagcagctgcaccacgtagaaaggcatccagcagagcacaaagacgaccacgaccatcagcaccagcctggtgattttcttctccgagcgcctgcgctgctgccagccagcgcgcagggccacggcgcgcatcttgcccacgatgagcaggtagcacaggccaatggccagcacgggcagcaggaagcccagcaggaaagtgtagaccacgaagactgccgaccaggccgggtgtggccactgcaggttgcaggccacggcctggccgccgcgagccggtctggtgtctgcgaagatggcgatggggagagtgaccaacagggatgccagccacacgcccaggttgatgagcttggccacgctgggccgccggtaggtcgccgcgcgcagagggtgcaccacggccacgtagcggtccacgctgagcacggtgagacagaagacgctggtgaacatgttgaggccgtcgacgctgagcaccgcgcggcacagcacggagccgaagggccagtggcgcagggcggccgacgaggccacgaagggcacgctcagcatgaagagctcgtcggctacggccaggttgagcaggtagatggtggtagccgtcttcatcttggcgtagcgaaggatcacgaagatgaccagggcgttgcccaccagccccaccaggcacacc

SEQ ID NO: 466066 - DNA, 1000 bp, Homo Sapiens
catcctgaaatgagcactcgcatgcagccaaagtcacttccagaaatggaatgcattgggctcttgaggaaaagctggtccgaccttttattttacaggctcagcaaagttcagtgatttggtttgagtcacacagcatgagggtggcaaagatagggaagaattgagattttttgactcaaggatggaatgttttccctaacccatactgaccctttttgcaagtcccagtgtgagggtgtttctgatggttccagatgaagggaatttccatgcatgaagggaggcaggtcaaaggcagtgggggctgcacctgccaaaggccctgtggcctaggagagcacattggaggagaagctgaagctctctgtcatggtcttggagtcacttcgtgaagagcagttggaggtcaggtccagggacgagggtgtggccttggggccgtcctctggctcctcctcgtgggcccccaccactgtggagatggtggtctccaggcggctgactttgtacacactgccctgggtctggagataccgggtggatttcatttccagcccctcatagtcgccggcgctgatgaaggggcagcaccggaaggcatgcttgaagcccagacggaacctgtcattgaggcagcagtagatgatggggttgtacatggtggagctcatggccagccacatgatggccaggtagacctgctggataaacttcttcaggtagagatctgggttgatgtagggcaggaggaagaagatgtggaagggcagccagcagatggcgaaggtgcacaccacgacaatcatcattttgaccaccttgcgcttggcagagacttgctcgtggtagcggtcagaggagtccccggggatctcactggcccatagtgtgattcccactacggtgtatgcatagccaatcaccagcagggggaggaagtagatcagcacagtcacacagatgtggtacactttctcataaatcttgttcggatgct

SEQ ID NO: 466067 - DNA, 1000 bp, Homo Sapiens; identical to SEQ ID NO: 336315

SEQ ID NO: 466068 - DNA, 1000 bp, Homo Sapiens; identical to SEQ ID NO: 157682

SEQ ID NO: 466069 - DNA, 1000 bp, Homo Sapiens; identical to SEQ ID NO: 157683

SEQ ID NO: 466070 - DNA, 1000 bp, Homo Sapiens; identical to SEQ ID NO: 157684

SEQ ID NO: 466071 - DNA, 1000 bp, Homo Sapiens; identical to SEQ ID NO: 336318

SEQ ID NO: 466072 - DNA, 1000 bp, Homo Sapiens; identical to SEQ ID NO: 336319

SEQ ID NO: 466073 - DNA, 1000 bp, Homo Sapiens; identical to SEQ ID NO: 336320

SEQ ID NO: 466074 - DNA, 1000 bp, Homo Sapiens; identical to SEQ ID NO: 336321

SEQ ID NO: 466075 - DNA, 1000 bp, Homo Sapiens; identical to SEQ ID NO: 157685

SEQ ID NO: 466076 - DNA, 1000 bp, Homo Sapiens
ccagcttcaaatctcagatataactaatccctttttcccttctttccttttctagcaaacttccagaaacaaaacagacaacactttgtgatgataaatagcacggttgccacacaagccagcaggaacccaatcacatccaaagagtggtactggaaccaggtgaggttgtgggctgcaactcgaagatgtttggctcctttgtggcgcatgacaaattcaatccagaagactgctcgatccaggggcttcactggttgatcatgttgaattcttgataatttcataatattctctttatatgaaggatcattaattactgtcttcagtgcattcagcaggtctgtactcgacattgtgttgaagtccactctaacagctgctcccttggccttcatgtgagcaatattatcaggttgatcaaaaaacaatggaatgcccaccatagggatcccatggtagattgcctcatagatgccattggctccaccatgagttataaaagctctggtttttggatgacctagaaggtcattctggggtatccacttgtacagtcgagtattgagacctaaggcatctggtttattcccatcaaatctccaaagaaccttttgtgggatcttggcaagggctgttgcaattacgttggccctttcttctgtcatgttactgaccattgaccccagagaaaacaccacaacaccattttctccagagctctgtacaaactcctccatttccttaggtaggggtttggcaggtttgcagtggagtcctccaacaaaatcaacatttggtaagaatggatgaggaaatttaaaattccaggagtttcgcataagccatatgtcagctttcctcattgtctcagataatgtagtgggtcttcctaaaacttcactgtaaaactgatcccacttcttcatattaaatatttggaaccaaaagtcaaaataaagcacatagagcatattttttaccctctccatgaaagtca

SEQ ID NO: 466077 - DNA, 1000 bp, Homo Sapiens; identical to SEQ ID NO: 336323

SEQ ID NO: 466078 - DNA, 1000 bp, Homo Sapiens
tttttttttttttttttttttcaagagggaagctgggtttattctggtgatctacgcctgaccacctgaggatgcccaggctccaatgtcagggcccaggggaaggcatccgtgtaagcaatgccctcagctcagggccctccgggagccaccagcccaggacaggctgcacagccgcaccctcccggacctccctgctccccagccagagaggacagggggccaggcaggcaatgcaaggccggtgtggcctgagacaccccctaccacagcccagctgtgtgtggagacaaccaagcagggctcagccagactgcaggacctggggtggggctgagggtggggaagagccggcgtggagggctcccctgggcagcgggagctcaggcacaggcagcctcagccttctgtgtgctgcctgggggcccttccaccttgctggccaggctgtagtaacaggctcgcatgcgctgctccacggtcaggaagtcggggcgatcctcccacttgtagatccagcagtcactcatgagtgcgtacagttcgggtggacactctggtgggcactccatccgcttgccctgctcgatgaaggccatgacctccggccctttcatcttcttgtagggcttctggccgtaggacaaggcctcccacatggtgaccccatagctccagacatcgctgcggctggagaacttgcggaagttgatgcattcgggtgcgtaccacttgagcggccacttccctgctgagcgggcagtgtagtagctgtcgtcggcacccagtgctttggagaggccaaagtcgctgatcttggcgtagtgccggttaaccagcaggacgttgcgggccgccaggtcacggtgcacaaagttcttctcctccaggtacttcatccccatggacacctggtgcagcagctcggccacattgctcacagggatctcctccctcttgccgaccaggaacttgtgcagcggcccgcccccagccatct

SEQ ID NO: 466079 - DNA, 1000 bp, Homo Sapiens; identical to SEQ ID NO: 336324

SEQ ID NO: 466080 - DNA, 1000 bp, Homo Sapiens
aatgtttcctaagatgatttaatgtcatggaaagatgctcacagcatattattatatgaacaacctggacagaaaaaaaatgtatgtgagataaaatagcaaatttttttgattgaggtagaattcacataccacgaaattcaccatttcaaagtgtccaattcaatagcatttagtgcactcacagtgtcgtgctaccttcgtcagtatctaggtccggaacattttcaccatcccgggaggaaaccccatactgattagcagtcgctcctcagtcccacctccccacagctgctgaaagccaccaatccgctatgcatctcttcagattggcctgttctggaaatttcgtataaaaggacagtacactatgtgaccttttgcatctgacgtctttcattcagtatcatgcattcaaggttcatccacagtgtagtagggatcactgcttcattcctttttatggctgtgtaatactccattgtatggatggaccacattttgtttatcctttcatctggtaatatatagcttggggttgttttcatcgtttggctactgtgaatagggccgccatgaacattcacgcacaagcgtctttctgtttgaacacttgtctcaattattttgagtagatatctaggatggaatacaggactgtggaacagggtcttagggtaattctaggcttcacttttgatgaatcaggggtcattttagtggggtcagagtgggtctctgcagaactcagctcaggggctccacccgcagccaaagtccgccctctgcgcgcaggaccagctccggcttcctgcggggctcggtgtggtcaggcaggacgcggaagcgcagcagcgtgagcgccaggaccaccttcatctccgccatcgcgaacgtctgcccgatgcagttcctgggccctgccgagaagggaataaaagccagaggtgacctctccttgatgttctctgggtcaaagcgaaaggggtcgtagacctca

SEQ ID NO: 466081 - DNA, 1000 bp, Homo Sapiens; identical to SEQ ID NO: 160553

SEQ ID NO: 466082 - DNA, 1000 bp, Homo Sapiens; identical to SEQ ID NO: 157686

SEQ ID NO: 466083 - DNA, 1000 bp, Homo Sapiens; identical to SEQ ID NO: 157687

SEQ ID NO: 466084 - DNA, 1000 bp, Homo Sapiens
tttttttttttttttttttttttttttttttttttttttttttttttttttttttttttttttttttttttttttttttttttttttttttttttttttttttttttttttttttttttggcaatatttgctcacatttattctcttgcatcgtaaatagtagccaactcacaaaaataaagtatacaagaatgtaatattttttaaaataagattaacagtgtaagaaggaaaatctcagaaaaagcagatagacaatgtagaaaattgaaatgaaatcccacagtaagaaaaaaaaaacagaaaagtgcctatttaagaattatgctacatgtggaacttaactagaccattctaagaaagaccaatttctaatgcaaattttctgaggttttcagattttatttttaaaatatgttatagctacatgttttactatagattttcctttagccactcaatatactgatttataagtctgtgactaattttaagtcccagaaatgaaaatgctccatggaatccatcctcaacatggttatgagtcacctgaaccccagtgttgcgaagtcgggtgacatacatgagtccatcatctcttaagagatcatattgacaggtgatgacataggtcaggggtaagccacgtaatttgttgtcatcagccaacaaaggggctgccctcacatctaggaaccctggatattttttagccagctcagaactgccataatttggattgttataaacatgtccttttataaacctctcagggagcagggaactccaattaacaaatttgaagagatgacttgattccacaggtacatgttgtctggaaagcatggctttttcaagtgatctatcagtggtaaaatattcactccagaatctgaccatgagtgatttggatagaaatagaaaatttgaattttcttgatatgacggtaaatctacatcaagaggctgaagggcaggataaattaaagactggatcttg

SEQ ID NO: 466085 - DNA, 1000 bp, Homo Sapiens
ctgggaagtatattttatttacatttttaaaatctttaactagtatctcttcctcctttccacccccagagacttgggaagggaaagaacgggaacctcaaacacctactccccacatacaaatacacaccccatggctcacaccagcaaatgaaagtgaaagagaaacaggtccacccctccctctgaagggcccaccaggtctgggcaagggtgggagggccctgggctgggtctctaaagagaagaaaaggagaggggagcaagtcagttgaagaggctggaaagtcatccagggccccaccctcctcttccctctgtgccctactgcctctgctggcagacaggggcaggggtcccttcgtcccctcaacaccagacacacaggcaggggctgcagccattaacggtcaggcctttggacacaaaatactttcgctttgtggtctcctgacgtggtcaccaccagggaggcatctttgctgagggcaaagtccaggatctcagccgtgtggccccggtagtcagtaagcaggcggccggtccgggcgtcccagaggcgcacgatgccatccaggctgcaggtatataccacggcagtgcctgcctcccacagcagctgcacgatgcccgactggtgctgacactgatgcctaagagtctgcgtagccaggtcatagatggccaaggtcccatccaggtagccaacagctgccaggggcatcacactgcagaagcccaaggactccaccgagttggactcactctcctccccttctcccaggctgggctgggaggccacagtctcaggtctaaaaacacccaccaccttgccggtggtggcactgaccagcttggcctggcagtccacagagccagttaggatcaagctgccatcctggttggcagcaacacaggtgagtgggccctggtgaccctcagtccctttcagtacatggatagggcttccctgcttcaggtcccaaatcctgatggtccc

SEQ ID NO: 466086 - DNA, 1000 bp, Homo Sapiens; identical to SEQ ID NO: 336326

SEQ ID NO: 466087 - DNA, 1000 bp, Homo Sapiens; identical to SEQ ID NO: 336327

SEQ ID NO: 466088 - DNA, 1000 bp, Homo Sapiens; identical to SEQ ID NO: 336328

SEQ ID NO: 466089 - DNA, 1000 bp, Homo Sapiens
tttttttttttttttatatctatatatatatgtttatttatttatttcatctttcctttttctcaggagtgaagggctcactgggtctgttgagaaccaggtcagatcaggaggtcgaggtcagttctgggagctctgtggtctccatgtcataatggttctttccgtcggaataggtcttccccttcaagacctctatgagctgctgtaggcgcttggcaaaagaaagtccttggggaagttttgtggtagatgagggtgtaggtgggggtgggggtgggggtgggggtaaaggtgaggctggaggtgggggtgggggcgggggtgaaggtgggggtcggggctgggctgccggtggtcggggtggaagtggtcgagggggcggttggaaataccaaggaaggtgagcagagatagggtgggagaaggggggtcgaatcgggggcggtcgagtggtgggcggtggaggggtggccgattgaatcatacgcaaagcgttagaaccaatcttggaggcgatccagttcagataaggccaggtggccgtgtagattccggggcgcttggcacgggcacagcctaccccccagcttgtgattcccacgaccacataggcgctttccttgctgtctttgcacatgagaggcccgccgctgtctccctggcaggtgtcgatcttgcctacaggataccccgcgcacacattggttggctgaacgcgcccattgtaccactgggtcgagttacacaagtccaggtcgatgagatccacacgtgcctccatcagtatagatgatggcctgggggctttctcttctatatatccccagccggccacccagcagctctgggagcctctggggaggcctgccttcaagtggggcaggcagcccggcccaatgaagcgcccacacgaaatgggaggggtgatctccacgagggcaatgtcatttccctctgtcgcagagttgtatttttcatgaatgatgattttctccac

SEQ ID NO: 466090 - DNA, 1000 bp, Homo Sapiens
ttttcacagaacagtcactggttttggattcttgttttccttgcaagaacaaaaggttctctagaatccttcagccaccaatgaaatgatcaggcaggagaaaaactttagatgggagtcttgtcatcaaaaataaatacagttgcatggagctgcttaagatctgaaccaaactcaaaataggaagacgggggctaaaaagttattttaagaacccccccaccacaaccacagtcactccgtgggctaagcggggagcaggaagcatgtctggtcacaccatcttggaataggaagccatggctggacggatcggatccactgatggcacacgtggagctgaacttgacgccagcggcggggcggggaggcactgccctcactgttgcagttccttcattctgttgagggcactgccagcgcggaaccactcaatctgcgtctcgttgaaggtgtggttcaggaggatggtctcctgggtcccgttggggtgcttgatgatgcacttcaggggcttgccaggggtgaagtccttcaggccctgaatggtcagcttgtccacagggtgaatcttgttgtagtcagccgggtcagcgaaggtcagaggcagcaggccctgtttcttcaggttggtctcgtggatcctggcaaagctcttggtgatgatggcccggcccccaaggtggcgaggctccagagctgcatgctcccggctcgagccctcgccgtagttctcgtctccgatcaccacccacctgatgccatgtttcttgtagtagcgggcagtgtcagggacggggccaaactcctgagtgacggcattgcgcacggagttggccttgccgttttcaatgttgatggcaccaatgagcaggttgttggagatgttatccaagtgcccacggaacttgagccaggggccagcagctgagatgtggtcagtggtacacttccctttgaccttgatgaggatctgcaggtcctccaggtccttgccatc

SEQ ID NO: 466091 - DNA, 1000 bp, Homo Sapiens; identical to SEQ ID NO: 336330

SEQ ID NO: 466092 - DNA, 1000 bp, Homo Sapiens; identical to SEQ ID NO: 336331

SEQ ID NO: 466093 - DNA, 1000 bp, Homo Sapiens
caaaagattttctttaatatcataaaatattttcatggacaagtgagctagcaaacacacacgcaccaatgtgccttttgacaagagtaccccctaccccgactcccacaccaaaatggacatgagattggagaaatgaatacagcagatggaacagatagaagaaaaaaaaatcagtaaaaaggatggaatataactttgtgcttggttattttcctatgtcgcaacaaaacaagacatttcggtgcaaatagttaatctttcctctttttttccatttgtctggtggagaaaaaatactttttctataataaaatatgtagttttttggtttttaacgtaacttttttttcttttttgcagaaaataattttgtaaactgtcacttcgcgggcagggaggatcgatgccacgtgggccccagctcacccgggtggaggctgggagctgaaaccgaacccaggcaggagatgggcgacggcggaggtgcaaggcagggcacggcgcacaagacgagggcggccgggcggggtggattagaggtcactctcgccgtacagcgccgtggagaaggacatgtagtccagagcacctggcacggagtcggggccggtgtagggggccatccgcgcgatgcagtactcagcctggtcgggtggcagctcgcggcgcagctcgtccatggtaatgtagttcttgtccccagccaggatcttgaaggaagccatgacttggtctgctgtatctgtgtcggctgtctcgcgggacatgaagtcaatgaaggcctggaatgtcactacccccaggcggttggggtccacaatgctcatgatgcgggcaaattctgcttctccctgggggtcgttgccaatatcataacccaagctgatgaggcaggctttgaactcctcgggacccagtgtgccggagtgatcccggtcaaagtggttgaaggaggcccggaactcattcatctgctcctggctgatgcccttggcat

SEQ ID NO: 466094 - DNA, 1000 bp, Homo Sapiens
gaattcctgctttattctctacaagctgtcaacaagatggaaaaacaggggggaattatagcctacagcagtatgagcaaaaagaaagaatgaacattcaacagatcaagatgtgctagcaggagtgcatgtagcatcctgtgtcatggagcaggcctttagacacagaaccagacatgggacttgttaggatacactgtccaatcccaggggtgaacacacaccgcacactagctaaaatatctagttattcctactacacaaaacatatgtaaagcttccgcaaaagaaagaactcacctccactgctgctgagaattagtcctctcctactctaactctggcttctccttaaccggtcataaaactagaggcataaggaagtcctgactggagagctagaaggatactggtttctgacttgccttgtgatgaaccagtcagtactacagaaacctgcttatttataaacagagcacttttatgtggtcatctcttgagaacctgtactaataagctctaacaaaaagcatgggaacctggaatcaataaataatcctaaaaacctcatttcacctagtgattgcatccttctctctggcaattaaactgacttccacgtgtccttaggtctctattctggaggataagagaagcatcaaaaaatcactgactgagttgaccatccagccctaaataatgaagagatgacataaactattttaaaaattgtaagtgccaaaaatcttttgggtagtctttttaatccccggcagttccatctcacaatattaagttcatttgaagatacaatagtaatctttggataagcatgaaaataaaacattagaatcccaaatatactcccctagggccaatcacataagcatattagagataaatgaaattttttacaaatagcaaacctttatttaccaatttgtggttttttccccccggtcttaaatcttgggtattttgtattttcacatttttcact

SEQ ID NO: 466095 - DNA, 1000 bp, Homo Sapiens
tgacccagagagggatctttattcagaagcacttggctggcttttctcttaggcccttgctccgagggacggatgggatcagccacagggtgcatcctctctccatcttgcatagagaacctcagtggttggggtcaaaggtcgctctccccatagagggcactggagaaggccacgtagtccagggctccagccggggccccggatcccttgtagggcaccatacggcggatgcagtactcggcctgcttggcagggagctcgcgccgcagctcctcgggggtgatgtagttcttgtctcctgccaagatcttgaaggaagctacaacttgctcagtcgtgtcagtctcggctgtctctcgggtcatgaagtctatgaaggcctggaaggtcaccaccccagctgcgttggggtccaccatggtcatgatgcgagcaaactccacttcccccaggtcatagcccatggagatgaggcaagctcggaagtcatcaggctccatcatcccattccgcttcctgtcaaagtggttgaaggatgctcggaactcgttgagctgctcctggctcagtcccttggcgtctcgggtcagtacctggttctccacttcattgatggtgcgggcaatggaggtgagcagctgctcccagcccacgcggatgtgctccatgctgtagacggtgtgcttattgtcgaacaccaggctctcctgcagcagctggtggtcaccctccagccggtcaatgttagtcttgtagttgataatgttctgctcctgctgccgtagcccagccatctgctcctccagagagccagctagccctgctgccagccgccccacttcctccaccttcgcctggatccagggtccaatggcattggcctgggccgcaaactgtcgccggagcctctcgtttacctgctgccgtgccagctcctcctgcagtgtctggtcacggctgggcaccagctttcggaccatatcccacttggtgttga

SEQ ID NO: 466096 - DNA, 1000 bp, Homo Sapiens; identical to SEQ ID NO: 336333

SEQ ID NO: 466097 - DNA, 1000 bp, Homo Sapiens; identical to SEQ ID NO: 336334

SEQ ID NO: 466098 - DNA, 1000 bp, Homo Sapiens; identical to SEQ ID NO: 336335

SEQ ID NO: 466099 - DNA, 1000 bp, Homo Sapiens; identical to SEQ ID NO: 336336

SEQ ID NO: 466100 - DNA, 1000 bp, Homo Sapiens; identical to SEQ ID NO: 157688

SEQ ID NO: 466101 - DNA, 1000 bp, Homo Sapiens; identical to SEQ ID NO: 157689

SEQ ID NO: 466102 - DNA, 1000 bp, Homo Sapiens; identical to SEQ ID NO: 336340

SEQ ID NO: 466103 - DNA, 1000 bp, Homo Sapiens; identical to SEQ ID NO: 157690

SEQ ID NO: 466104 - DNA, 1000 bp, Homo Sapiens; identical to SEQ ID NO: 157691

SEQ ID NO: 466105 - DNA, 1000 bp, Homo Sapiens
tttttttttttttttttttttttacgatgtgtcagaccatctttattgatttaccctaatgttatgcataaagtttatctcttccccccattcgttctcatcctcccttctctctctctctctctctttctctgacacacatacacacacataaagaagcaaagtcaccagctgagagcgaagtttggggtggaagttttgaggtttgagaaaaaagaagtctgaaagtctaacctctttttgaaatgtgcctgtgatgaagagtgacaatcggcaaagcaaatctaataggatctctaaagagccttttcctgttgtttacaattgtggctaaagccctgcactagaaaacaacaaatgctaagatcctccctgcatcccctacccccgaccccctggggcacacacaaccctcctccaccacgttctaaaaagactggaaggacttggaaaaacattcctatgggatgaactagaaggtggcaggactgctatcatcagacctcatttacccaccgcttccagctgaaaaccagggatttcacaaaggaaaaatcatgagagtcatagttctgtggttttctcaaaaggagaaggaagggacgctcttccttcccacccctgagaacaggccaaatgagagcaagcccactggctggactgagggtgaccaaatgaatgtgacgatggcatctcatttcccaggtggacatgtgctgggcagcatgtgcctaggactgacccagaagacacacagcaccacacaacaggattgatgtgatgacaaggccaagacagaaggctgtgggaggagtgaggagaaggtggccaagtgcctgaacaatcaaagcaggtttcactcaggaagctctatctatctgagttgggtcttgaaggacaagtaagaatttattatcaggtagacaaggattgggaagagcatcaagaaatgaagaaaggtgatgtattcattggaacatgattagtttagcatggtcaa

SEQ ID NO: 466106 - DNA, 1000 bp, Homo Sapiens; identical to SEQ ID NO: 157692

SEQ ID NO: 466107 - DNA, 1000 bp, Homo Sapiens; identical to SEQ ID NO: 336344

SEQ ID NO: 466108 - DNA, 1000 bp, Homo Sapiens; identical to SEQ ID NO: 157693

SEQ ID NO: 466109 - DNA, 1000 bp, Homo Sapiens; identical to SEQ ID NO: 336345

SEQ ID NO: 466110 - DNA, 1000 bp, Homo Sapiens; identical to SEQ ID NO: 336346

SEQ ID NO: 466111 - DNA, 1000 bp, Homo Sapiens
tggtgttttggtctctgaggtttttgtgttttttgcttgtttgttttgttttgttgaaaatagtagggcacagaatggggagaggagagacgggaagcgcgctcctaaatagaaatgctgttctcaatcagcaccgggtccaggtagtagtaggggatgggaaggcacttgttgcgctggcggatgtcgtgtgagatctggttcaggcgctggcggaacgcctctatgctcctccgcggggcctcctccacgaagtgaatgtccgggaagtgtcccaggggccgcctgtcgtcaggctctcggctgagggtccagagcaccagcagcgtgatgcacgtggtcttcacatccggcaacgtgtccatgaaggtctccagagtggtcagccccttagtctgaatcggtggattccgcatggacgctgggaagttgggcatccaggcggtgaactccatctggcctgtgttgacagcagcgtgcttggcagagcaggtgtagatgactatagtgacatatcggatcagctcaggcacggttcgcaagcacctagggaagcctgagctctcccgccccaggaggcactctttaaatatttcctgcacccaagactgcaattccggatcaccctccacggctgcgtcactcgggtaataataggtgatgatctccgtcacatacttctccagtgcattccacaccgccaagctgtcatcgcggtagtaatatccaggcaggtcctggaccccacgctccacaaagtcattggggaggtagaggctgtcataggtgagctccgacagagcccgtaccatcaccccagcaaagccttccacgcccagggacatgcccttggcagagagccccccctcattgaggagaacggcccggccaatgctgttgatctggacggtgtatcgggtatgggggatgaggagcttgtagagggggtggcacatgggcaggttcctcagcaaggccaggcagaaggcctcagcaatga

SEQ ID NO: 466112 - DNA, 1000 bp, Homo Sapiens; identical to SEQ ID NO: 336348

SEQ ID NO: 466113 - DNA, 1000 bp, Homo Sapiens; identical to SEQ ID NO: 336349

SEQ ID NO: 466114 - DNA, 1000 bp, Homo Sapiens; identical to SEQ ID NO: 157694

SEQ ID NO: 466115 - DNA, 1000 bp, Homo Sapiens; identical to SEQ ID NO: 157695

SEQ ID NO: 466116 - DNA, 1000 bp, Homo Sapiens; identical to SEQ ID NO: 159979

SEQ ID NO: 466117 - DNA, 1000 bp, Homo Sapiens; identical to SEQ ID NO: 157697

SEQ ID NO: 466118 - DNA, 1000 bp, Homo Sapiens; identical to SEQ ID NO: 157698

SEQ ID NO: 466119 - DNA, 1000 bp, Homo Sapiens
tttttttttttttttgcattaagtggtctttattgatgtttcacattcagttattatcaattcttcagttaattgtacaagtatgataaattattttctatttgctgtgggaatttaaatgtaaaataaatacaaaatacatgtgtggtttaatgaacactcaatgaagcatctcttctgaggtattcctttcagtctggttttatcccagatctttttacttcccctaggaatagtctattaaaccacacaatggatctgtgaacttgtagatcaagttcactgtaaatctgtgaacttgtgttttaattacattagacatattttttgatctcatcatacaacaccaatacaaaagcaccgcccatgcctctcagcacattggaccaggcacctttgaagaaggccttggctccttcgtcttttgcaatcttcctccagcagtcaactgtccccgtgtacataatatcggcccctttccggccggactgcatcatcattctacgacgaacagtgtcaaaggggtaggacaccagccctgcgactgccgtcacactctgggcaatcatccagctcacaaaaatgtgcacgttcttggggtcaggcagcatccccttggcagtatcatagactccgaagtaggcagctctatagataatgatgccttggacagagacgttgaaaccctggtagagccccctcaggccatcagacttgaagatcttgatgatacagtcgcccagaccatggaactcacgctgggcggcgcccttgcccacatcagcagccaacctggtcctagcaaagtccagcgggtagacaaagcaaagggaggtggccccagcggccccaccggacgccaggttaccagcaaagtagcgccagaactgcttatgccgatccacaccccctaagaagagctgcttgtacttgtccttgaaggcgaagttgagagcttgggtggggaagtaacggatcacgttggccaggttacccctcc

SEQ ID NO: 466120 - DNA, 1000 bp, Homo Sapiens; identical to SEQ ID NO: 157699

SEQ ID NO: 466121 - DNA, 1000 bp, Homo Sapiens; identical to SEQ ID NO: 246416

SEQ ID NO: 466122 - DNA, 1000 bp, Homo Sapiens; identical to SEQ ID NO: 336357

SEQ ID NO: 466123 - DNA, 1000 bp, Homo Sapiens; identical to SEQ ID NO: 336358

SEQ ID NO: 466124 - DNA, 1000 bp, Homo Sapiens; identical to SEQ ID NO: 336359

SEQ ID NO: 466125 - DNA, 1000 bp, Homo Sapiens; identical to SEQ ID NO: 336360

SEQ ID NO: 466126 - DNA, 1000 bp, Homo Sapiens; identical to SEQ ID NO: 157701

SEQ ID NO: 466127 - DNA, 1000 bp, Homo Sapiens; identical to SEQ ID NO: 336361

SEQ ID NO: 466128 - DNA, 1000 bp, Homo Sapiens; identical to SEQ ID NO: 157702

SEQ ID NO: 466129 - DNA, 1000 bp, Homo Sapiens; identical to SEQ ID NO: 336362

SEQ ID NO: 466130 - DNA, 1000 bp, Homo Sapiens
ttttttttggaaggaaacactggactatttattgcaaagtgagaattgtcagcttgagaagcaaggaagtggccaggcccccaacaaagcaatcaagcaagaaatggggtgcgggaaatgagctgatgtgcagaaacagcctccttgtccaactcggggacattcctctcaagaaacacgctcgtgttgtggtgtttgcactgctctctgggcagtgcgggcagcgtgttccccaggctggggtctctgatgagcacaaaggaattccaagaacctagagcctcctcagcagtcagtctatctgagaaagcaggcccaagcagtggaagcagggggtcgctcctctgggcctctgccctggcaggaaatgcaggaactcccctgtcctcagtctgggacaggtgagctgaggacacctggagcagcaggaatcccacgagctctgcttcaccgagccttcaggatgaggcgggtcttcccatctccaatgaagcacctaatgagcagtccaacaagcaggccagccaggagtgggcccagccagtagatccagtggaagttccagtggttggccaccaccgcaggtccaaaagcacgggcgggattcatgcagcctccagacacagggcccccagccaggatatccacggtgacggcaaagccgatggagaacggggccagagggccctttgtcttctcattgatggcacccatgcatacagccagggccagcagcgtcgtcaggatgatctctgccaccaacgcccctgccacctgcccctgctcctggactgtcacaaaggccgccccagatgcattccagaacctctcctcaggactcaccgccttggccaaggcagccccgagcatccccccgagcagctgtgagacccagtacgggaggagcatcaccaggttgaggcctccgatcagcatggctgccagggacaccgcagggttgaagtgtccaccactgatattccccagcgtggcaatcacg

SEQ ID NO: 466131 - DNA, 1000 bp, Homo Sapiens; identical to SEQ ID NO: 336363

SEQ ID NO: 466132 - DNA, 1000 bp, Homo Sapiens; identical to SEQ ID NO: 157703

SEQ ID NO: 466133 - DNA, 1000 bp, Homo Sapiens; identical to SEQ ID NO: 336364

SEQ ID NO: 466134 - DNA, 1000 bp, Homo Sapiens
gcccgagcctctgcagagtctgtgggatgcccctggcagctggaggagtggccggcaaggtggtgactctggcaccgtggccgctggccgagcagggaggcacaggtgttctcaagtcctgtgggtacccccagtactaccacactgctcctgcctgccccaaccagacccccaggcccctcctagagagctcctgggcacagtgggggcaagtgcctgcggggaggcccctcttgggcacatgccctgcatttgccggcaaagggtggggcccccaggtgggctctgccggtcccccgccggtccccagccccactggccccagcactcacagaattccaccagcagggcagggtgctcccgcagggccaggcccagggtgtggcggctcagcaccaagatcccatcctccttggggatttcctcctctggaggctcctccgaggggctcctcgctccctgttcctgaccccatgggcacgaagccctgagcagcagcagcagcagtacaggcagaagctggcggctcatggtgctgccagggcgcgtggggcgggggcagataagggggccagaagccaagcagcagctgccacgtggcacacaggcccagtcccagcaaagacaaggcccatgcggccgcccccggcccccaggggaggggaggcagaaagagacgacacccagggcaccgagagagacagggccatgtttaatgggacagctcaggggacagcgccaggccagggggtcccgggacagagcaggggcagcaggggcagcaggggcagcaggggagggtctggtcactcacggggggtgctggggatgcttgggggtccctgtgcaacaactgagggaggtaggggagacacggactgggggttcagtccttccagtcctggcagatgcagagaccccactcccaggacaggtggtgcgtcctgtcatcgtcggtgaagagggacaccaccagataggggccccgcaccagcgcacc

SEQ ID NO: 466135 - DNA, 1000 bp, Homo Sapiens; identical to SEQ ID NO: 157705

SEQ ID NO: 466136 - DNA, 1000 bp, Homo Sapiens; identical to SEQ ID NO: 336367

SEQ ID NO: 466137 - DNA, 1000 bp, Homo Sapiens; identical to SEQ ID NO: 336368

SEQ ID NO: 466138 - DNA, 1000 bp, Homo Sapiens; identical to SEQ ID NO: 336369

SEQ ID NO: 466139 - DNA, 1000 bp, Homo Sapiens; identical to SEQ ID NO: 157706

SEQ ID NO: 466140 - DNA, 1000 bp, Homo Sapiens; identical to SEQ ID NO: 336371

SEQ ID NO: 466141 - DNA, 1000 bp, Homo Sapiens; identical to SEQ ID NO: 157707

SEQ ID NO: 466142 - DNA, 1000 bp, Homo Sapiens
gcatgttaaactaaaagtttataaattaaagaaaaaatacagcgaatagagcttccaaacttcacaaatctttttacagttaatactctagttgagtgcacagtgccattaaggaggcgaaaagcggcgaggttgacaagacaggtgggatcacctgtttaagggtaagtgaggggcggataggggagtcccgggccagagcactggagtcgcagagggcagaaggtagacactgagggccaggcagcggcactgcggtgggcgccgtggaaaggctggccagggatattcacattgagtagaaaaataatcgtcatttgaatacaaacaactgaaaagtgcgacacgtcttaacctcctttacacaaataaaaagaaaccaaggaaagtttccgcagagggctgcctgggtgtgcgctctcctccttccgggactcccaggcgcttcctgcttgtgcaggtacctggacttcagagaaggaagatgtggagacccccggcttgcaccacacttggaggctcccctccttacattcagcacccgaatcgggcacccccaccctagctctgacacacaggaggggtggagcagagggcctgaaaacccaatccttcacgtttcaaatcaacccctggcctggtgctgcctgggactgccagggtttcgcaccccttggttacaaatgcaatttccaaaaataaaagatatgtagatacacatagattggtagcatggataccatgaactagtgtggcctagtgcagaaagctcccagcaggcctgaaattctgaggattcaggctatgtggtctccaggagttgccgctcagggaaaaccccacccccaggcagacatattcgaatcaaaatttaattccaacattgtcatgataataaatagagcccaggggcttccaggcaggtgggcgatcagggcccctaggccatagggtgcctctgttcaaattagaaaaaggcgccccctcagggcagactcag

SEQ ID NO: 466143 - DNA, 1000 bp, Homo Sapiens; identical to SEQ ID NO: 336373

SEQ ID NO: 466144 - DNA, 1000 bp, Homo Sapiens
ttttttttttttttttttcactgagtaaacacagtttattactgaactgcactttcaccttcacacagactatttcaaagagctggaacaagtgtggggtgggggttgggggaggggcagatgcccctcaggagccaggaccctcggccagcttccctggaccagggcaggggagggagcatcaggccgtccaatctccgggcaccagctctccacgtgcacgcgcactgcaagccagcagctcctcacacataaatacagacacgcttaacaaaaatagtatatcatcttcacaaggaataaaaactagtctcaaatatgtacagcagagagcccggggtggctgggacccctggggatgagacaggccaagggtggagcagaagagagagggaggcctgaagagctcctggccaggccactctggccttggcagcctggctgcccaggctggacaggcatggggcacagatctgcctggccaggcaggactggcccttctagtcagccctaccccaccccatgcagcaggctctccttcctgcccttcctgcctgaggtagggaagaccctggggctcccatagctgttcctgatagctccctttcacctcagggctgagtcccctgaacccaccatgaggagcagcccaaggcaaagatgccacaggctgctcttgtaggaagtgaggcagctgaggccataaacagctctggggcatctgtcttgggcccagttggtccctcagtatggtcatgggagccagggaggggaagggactagggtggtgctgaactgcaagggccaccctagctttggcatggggtgcttcctgtagctatagccccctccctcctgggtggggctggcctctagccagaggcttctggaggacatttggactgggagtgaggactctagccagtccagaggtgaggagggagtcctggtccttgcatctttatcccaagcagcctgaatccctagtcaaaagtggccc

SEQ ID NO: 466145 - DNA, 1000 bp, Homo Sapiens; identical to SEQ ID NO: 336375

SEQ ID NO: 466146 - DNA, 1000 bp, Homo Sapiens; identical to SEQ ID NO: 157708

SEQ ID NO: 466147 - DNA, 1000 bp, Homo Sapiens
acctttaaaataatgactcattttatttttttcttttaatacgtagttataaatatattttgtcaaaatatatgatcaatatggtcaaaacatttgcacgtaaagtcataaataaggtcaaggtgaatgtttagggattttttccatttttttttttttttttttaaataaaagtccagctataaggaagcagtctgtgtagtgtgtgggtgagtggatgggaacgtgtgtgtgtggtgtatgtggtgtgtgtgtgtggtgtgtatatctgtctatcctcaaggactgcctgatctcagcggcacccacatccctctactaccatctcctgataatttttcagtaccaccttatcatactcatccaggtacagcatggagatggcactcagttcagtgggcacacaacaggctttggggatactggaattgacagaattgaccagggtctgcacaatggcatggttggttgagttgaggtggtcagccagtggaaaggggcagtccccatggcagtagaaggcctggtagcctggtggggccacaatccagtcattccagcccacatcgctgaagtccacatagagcgagtggcgccggcagttcttattcttcttcctggcccgctgtgagtgatgcttagggctacgcttggccctccggcgtcgggtcaaggcatggccccggccatcatggccaaaggtgaccaggaggggccggagctgggcccaattcccactcccttgaggtaacgatcggctaatcctgacatgctggccctggtgggtccgagtctgatggaggtgagtcacctcaatggctagcccatagtttggctgcttctcccgggtccagcgaaggaccgcagggctcacatcaaaagtttcccaccgtgtcacattgtggtggaccagtctcgtgtccagtagtcgtgtgatgaggtgcccaggcaccacttctgctgggggcttcataacctcataaatgtttatacggtggaa

SEQ ID NO: 466148 - DNA, 1000 bp, Homo Sapiens; identical to SEQ ID NO: 157710

SEQ ID NO: 466149 - DNA, 1000 bp, Homo Sapiens; identical to SEQ ID NO: 336380

SEQ ID NO: 466150 - DNA, 1000 bp, Homo Sapiens
ttcagtctttatcatttattatttttatttggacaacatatatacatatgtacaaaatacctactgtcagaatcctcttttataatttcatttgatttacaaaaacgggacagcaaaataacttaggtcactaatactgtacaaaaataaaactgattaaacagttgtaaagatcagtatcttacagtgttacagatcatctgatgtgaaagaacatctcaatctatccgagtgatgagtactgtgctaaatctatctgcaaactgacaaactaatcagtttctgtaattgtaactaccaaatagaattctcaagagaagcatgatgtggagctaaaccttaaagccagggcatcattccacaatggtgaagggctttcttcttccctaaccaaagagaggagatatcttaactctaaaactattaaattttccagaatatgacaactacttacagtattagataaaacaacttttctttctttttaaacacctgcaatagtctttcaaaaattcagtttggttaaaaaagtaaacaaaaattactatcctgcatttggattttcataagttaaatccatggtctttttaatataaaaagtaattgtttcatagttttagtgttcaatgaactctagtagtcctatttgaaccatatcttgatatagtaaatctaattagaatgctggttcctgttttgtgacattttaaaacaggatttaatcacaaagaataaaaaggcttgagtttatacgttacattactataacatataagagaatatcaaatgtgtgtttgtcaacaacttgaaaaggcaagtaacaacttttttgggaagtaaattgtgcatttttttaaaacaagttgctgcatttatatccatctaagtgcttgacaaaagccacatttagatttactcctgaaactataaagattgtctttcactgactttgctttgctttctttcgtttctttctgtgagggaaagatgactttttaca

SEQ ID NO: 466151 - DNA, 895 bp, Homo Sapiens; identical to SEQ ID NO: 336381

SEQ ID NO: 466152 - DNA, 1000 bp, Homo Sapiens; identical to SEQ ID NO: 336382

SEQ ID NO: 466153 - DNA, 1000 bp, Homo Sapiens; identical to SEQ ID NO: 336383

SEQ ID NO: 466154 - DNA, 1000 bp, Homo Sapiens; identical to SEQ ID NO: 336384

SEQ ID NO: 466155 - DNA, 1000 bp, Homo Sapiens
attataaatatttattttaaaaaatttcttggcagttaaaaggaagtggcataatgagcaggacaggacagttaccggctccccctcagatgcctctggctggcttctcacattctccaagatccagcctctaggctccagtctcggctacctctgctgggcggtagctcacaccccctttggttccccttctgtgctgccttctcatctgcacaaggaacgcgacgctggtgacagcaaaaaggaggccaaaaaccagggctaggatgtcaccagcagccaggcaggaattcagctggactggctcagcagcccgaggactgctgtccactccagcagggaaggaggcctcaatcactcgcccattcaaaggctgcgtcgctcggaagttcagctgtagccgagagtcaccaggtccccacagggtgtcagagagggtgtggagctgcttagcactcagcatcactgtctggttaaacacagtccagatgacaccctgggcacagggcggtgtagtcagagacccctcatattggaagtagcggctgaagtcagagggcaggagtgcagatatgtccagtcctgggacctgagtctctgagccttcctcagcgatttcttccaagcgagacagcaactgctcataggcactgttttcttccgggccctcctccagaaaggcggccaacacggccaggcctcccgggcgccccaaggcctcgtcaactctggcaaaggcggtgctgaggtgaaccacgtggatctcggcagggaaacggtggccttccacagtgtgctccgagcccggacgacctgcagccccccagtgcagatgcagctgcagagcccggtactcccgcccgggacccagagccatctctagcccaggaggcagggtcagttgcacactgtggccattgttgcgcaggcgcagttctgggagcggcgggagctggaagcccaggagttccagggggcgcagggccgggcagaaggcggc

SEQ ID NO: 466156 - DNA, 1000 bp, Homo Sapiens
tttttttttttttttttttttttttttttttttaaacaggaagtattctgtccctttaatagctttgttttaggggtaactcccctcgccttgtggggaggcttaggacgggcgggtgcaatcctcgaaggggagtctcagcgaccatgggggacaccatccacatgcaggcggtagttggggcctcggcagcgcctctcggggtgccgggggtccctgttgcccctcagtgccctgtgggccaagggctgcaggggccggctgttaccgctgaggctctggaagatctgagatggaggattctggctcaggagtctcagggagtgcatctgaagggaggtgatattgagggcccggtcaatgaggatccaggtgacagtctcggagcagggcggggtgctgagagagccctgataggtgatgaagccgaaggattcagggaacaggagctccaggctcaggtcttgaagaaagtaggcatcattcttgtaggagatgcgagtgatggtgtcgcggttaaggaggcgactgaggaatgggttagaggtactggcaacgttgacaaagaggctgagaatggccaggccattggggccgcgggaggcagcgctgaaattcccgtagagttcctggttgaagtgaatgagctgcacctcagcagagaagccctggtggttgatctgatgttccgagccggctccgtcgcgagctccaaacagcagccgcagttcactgagtcggtggctgtaaaggaggggacctccagacacattgaccacaggtcggggtgcaggcaggaaggagacatgtcggccggtgttgtacaaggttccccggagcttctctcctccagtgctgagccttaatgggggcagaaaggggtcataaagaaccctcttcagctccacatccacggggctctgccgcttccccacagcacacagactccacgctgcattcaccaggccccagaaaggaggccctggcacgaagtttccct

SEQ ID NO: 466157 - DNA, 1000 bp, Homo Sapiens; identical to SEQ ID NO: 157711

SEQ ID NO: 466158 - DNA, 1000 bp, Homo Sapiens; identical to SEQ ID NO: 336386

SEQ ID NO: 466159 - DNA, 1000 bp, Homo Sapiens
ttttttcatttcatctgatgtcaattttttttgtggttgtcgtcgtcatcttgttttttttttttttttttttgtttttttttaacaaatcacatctggtcttgtttttctgcagacacaggcaccaggggagggaacgaggcagacacaaacatgcgacaggcaggccgtgtgcccgagggcagtcgggctccaaacaccaactctgtccggcgaaaccagggcgcagctcttcactgcagcggggccacaggcgcgcccgagcagtggaagtgcacgttctgccacttgccgtcgcggcggtgccacacgcgggtctcctcagactggctggtgcggggccggccctgcccgtcaatgtactgcgtgagccggatgtaagcgatgcaggcggcatcctctccaatgacgtgcacgtgtgggttcaggatggtcgtgtggatcggcttgctgttcttggccagcaggttctcgaagtagaatctgtggaagtccatcccttcaaccaggttgcccagtgcttcaggctcaaacgaggtcagccctgggtcacagattttcgcgtaggcctcaaagtcaccgttgttgacggcctcgatgagctgctccgtggtcttaatgatctcctgcttccgggatggggtgggcagggggccagggatagtcggagatgggcagggcgggggccccactggcgaggggccctcggcttctggggtccctgagcccctcctcacagagttcaggatgtcagagatcctgggggacggggaggacagggggcctaggagagccggagacaggcagggcgggggccccgctgagagggggccctcggcttctggggttcctgaaccccttctcacagagttcaggatgtcagagatcctgggggatggggctggcagggggctaaagggagccggagatgggcagggcaggggcccctcggcttctggggctcccgagcccctcctcactgagctcaggatgtcgggga

SEQ ID NO: 466160 - DNA, 1000 bp, Homo Sapiens; identical to SEQ ID NO: 157713

SEQ ID NO: 466161 - DNA, 1000 bp, Homo Sapiens; identical to SEQ ID NO: 336389

SEQ ID NO: 466162 - DNA, 1000 bp, Homo Sapiens; identical to SEQ ID NO: 160511

SEQ ID NO: 466163 - DNA, 1000 bp, Homo Sapiens; identical to SEQ ID NO: 336393

SEQ ID NO: 466164 - DNA, 1000 bp, Homo Sapiens
tttttacatgctctttctactgcattttatttccatagtgagtccacacacgcacaaattagaccttgttccttcgtcacatctcctgagggcgaaggtaccctcatgtcaaatggcagtactgggcatttcaggggctcggttagccaaaggggaggttccgggaggcttgaacccaggcccttccctcagtggtaccctggaagggtcactgcccctgccagcccaagggtcattttcctccattggtgcccatttttgtgctcaggcaacaggagtcacttaaacatgatcttccaaggaacgtgtacggttccagcaaacaatagaatccgaagaagaaaaagactctgttcttcacttacatttggccaagtgaagagacaaccaactctccctgtgtctgtttttcagggcagtgaagtatatttttggagctggtcaggacacaaaccaatcttacaggcacgaacaaaatgcagcattccccaaatgcagccaaaaccctttactggagccaccttcctaacgccagtggtcactggtcactttcctgagtgcgcgtggagaggttggccccgggtgggaaccgcgtgctggtttatgttgttacagtacaagtgaacgcaaagacttgcagtagctgcctcttggcaaatgatcttcccccacgcccaggcatgggggcatcatggtggggctgggggagagcgaagggccattgtgcttctgtggctgggccgtcttttctttctggcttccctacaccgtgtgctccatcatggggtatggagcagtccctggctttagacctccttccgcagcaccaccttgatgctgctgcagacctggcccagggccgcgaagagtgggttgcagaaggtgcggatgcagagtgagtagatgtggctgatgcactggatctcgatcaggtagctcttaatgcatggcaccaccgcccagatgtggcagaaggagatgcaggcgaacaggaagcccc

SEQ ID NO: 466165 - DNA, 1000 bp, Homo Sapiens
ttttttttttttttttttcattcattccaccaacatttattaagcagcaagctccgaagcagacgtttaccagttttgcacaactttgtcatggaccaactggccttgtggctcagtggcatctggaggcaagagggccaagtagacaggggtctcagccccctcctccacagtcctgatgctgtctttcccatccatgtctgtcttcactggtcctgggcagcacgcattcaccagaatcctgtcagctttcctcttctcatccagacgcctggccaggatcctcgataagaccgtgacccccaacttggacaccccataaggtgagttgggccagccttccctctcatgcacctcattttttgtgtcctccacaaactttttcatgagatccaccaggtctccttctgtgagtgtctcactgtggaacctttcctgcagatcttcactgcagttttcaaaagcccttaaacactgcaaactactgatattcaccactctcccatgaggtttcattatcggcagtaactcgttgcacatgtttctagtggcaaaaaaatttgtcttcagtgtcatctcagctttaatgtcaaagggcattggatcatcactcttgaaggcgacggccgcgttgttgaccagtacgttgagccccccgtactccttgcgcaggaagtcgcgcagggcgcggatgctctgcaagtcgtcgatgtccagttggtggaagcgcgggctcaggccctccgcctgcagctgctgcacggccgcctggccccgcgccacgtcccgcgcggtgagcaccacatccccagagaactgtcggcacagttcgcgcgcgatggccaagccgatgcccctgttggccccggtcaccagcgccacgcggctgcaggacgacatggctgagcggggagcgcggggcacctgcgtggagggcggaccgggcttcggaccacctggggcgcgccccgaggagcccagctagtgtcaatgccgccgc

SEQ ID NO: 466166 - DNA, 1000 bp, Homo Sapiens; identical to SEQ ID NO: 157714

SEQ ID NO: 466167 - DNA, 1000 bp, Homo Sapiens
ttttttttgtctcaaaaacagtattatctttattaaaaaatggatagatatagcagcacttacaaaacagttcatcaaaggcattgtacactgtcaactgataatgtggagagggcagccccctgcccagctggctatgggctctgcacaacgcttgcccgcaaccacctgctccacttggtacaacggagcccagaacacctgcgaggagagccacgccaccgtggccctccacagcttcaagcttttgttgttgtgggagtcccttaggtcaagtagcaccttccatagcagcatcgggagcacgcactggtgtctggaggtggctggtgtacttgacccacttatttaaaaaaaacctataagcattcaataaaaaacactttgccctgtttgatgccatccacagaaatacttctgttgtggaagaaacactcttccattcagatatctgtaaaagcaaacgcacgcctccgctgcaacagacagaagagaacgtggagcaggcgcgcaactgtctttggtggagaaggatggggtggtcacgccatttccggcccgctgctctgcttcttaccgctctgtggcggggtgaggagcccactggggagaggagaagccctattttgttcagacaacatggctttctttgctcgggctttgtccagcaaatccaagctgtctctgtgggtctgtatgttgtgtgcatcttcatcagcgacgcccctgaagtgcttcagttttgagctccccgtctcccttataaccatggcaaatggaaccatccacttgacacagttctctatgtcgcaccactgataccctgaaaccttttgcatcaattcagatgacgagaaatgatacaaggccgaagcagcaagtataccataaggaaattcaaggcagtcaacatccaggacacagagatccaacagctctgcaatctgtataaagatttgctggggatactgcggcagtagcacttcatgtaagtcattta

SEQ ID NO: 466168 - DNA, 1000 bp, Homo Sapiens
ttttttttttttttattctagctcttttgaagatggtttattttacataaagttactgtgaaagggaaagaaaacaatagaaaagttttaatatattttatgttttcacattatactttttaaataaagttaaacgtttgatatgcttcctacttctcttgattagttagcattgagaaatcaacttcaaatggttagagagattctaccaggtcgtcatcagtccattcttcctcctcatgtttggatttctttgagacgtaatcatcatcttcatagcctttcctcttcttcgtgattacgttaagtgcaagctcagcagaatgacatcgctccaacttctgtttcagaacagcaacttcttcagatctgggtggttcatacttctttactaagtttctcatgcttttcattatatctagtaactgtgacaggcaagttctgttctctttcagcatcagactctctgataaataactttccatagtaattccagccctggaggcactagataaaatggcagtcagggcaatttgggaaggtgtgtataaaaggtaagcatccgtcaatgcaattctattaagaaagtcatcagctgttttcctcaaaatctctggattctccaatatgggatagcgggtctttaagtcgatgaggaagccctcaaatggtctgtaaggattgtggacaataaggtggaaattaagttgctgtataagaagtagttcatattccagtatctgttcaagtgccttctcctgtccaagaggactctcccggaggtttccaacaaactgaggactagatacattgaattcatctactttgcaggccaaaaatgcacaagtgagcattattatcctggggtgatattccattactgagttattaagataaaaacgtttgaaatacatacaagccgtacccacaacagatcttggcattgctggcttaaacaccgaacagaattccaataaccttttctcatagtatttgcaga

SEQ ID NO: 466169 - DNA, 1000 bp, Homo Sapiens
ttttttttttttttttttgcagggtggtcatctgtcactttattttgcccgtcttgtagcatgtgggtctttcgcagcaggaagtgtgttttacaaccagagcccccgccctcctgcagcgcaggcgcagctggctgggctcctgcttcccactctccacctcatccatatttgtcctcgtccctgccagtctcgaaaaggcactctgtcacgtgtacacaggaaagggccctgacaagaggatgggactgcagttgtggctgccaggtctcactctcccttggatggtcggcggggtgggggtggaggccagggctgtagtgcagctcccgcaggtgctggctcagggggagcaggcaggctccggttttcggtaatcctcctggatggggatggtgctgccctcctcctccctggggcagctgtaacgacaaggctctgcaggctccacaggactttctcctttgtttgatctatatttccttcgttgatggaggaacagggccccggccagggtgaaaacaaggaacattccagagaagatcacaaggatgcgaataaaatcggagctgcacagggatctttggggtggccagtgggtagagagagtccgggcaggcagctgcctgaagtcagccagagtctgcatgtgcccagctgtcctggcctccagcatctcactgacataaggtaagtgggtgggctgagggtgtgggctcagggcctgagacgaccgagcggtcagcgaagggtttggaagaggatcacactcggtgcactccttgtccctgcactgccagccattgcgacaggcacactcagcattggcagtgatggtgcagttgcgaacgagaagaccagagttacagtgccgacagctctcacagtggggccgggtgtggtggtcaggagagaaggagacccccggtatgcaaggatcacactgagcagcctttctatgctggtcacagtccttcacgaggaatgttcctggctcaca

SEQ ID NO: 466170 - DNA, 1000 bp, Homo Sapiens; identical to SEQ ID NO: 336397

SEQ ID NO: 466171 - DNA, 1000 bp, Homo Sapiens; identical to SEQ ID NO: 336400

SEQ ID NO: 466172 - DNA, 1000 bp, Homo Sapiens
tttttttttttttttctgcctctgtctttaatacaagttgggagactggatgggctccagggtgaagtgagaggttcttcaaggtgaactgtttctgcatccagtgccaggtctcctgtctcaaactgcaggggtgcaggcagaagcggggagctatgcccagtcagtgccagcccctcaccctcacgccacagcagcagcagcaccaggctctctggccaactgcctgtttgcccacgtggccacactcctgggtgggtgcagcctcactgtctctcctgcactgagatgcgactctctttgccatcctcctgggtgaccggttggcatccatgtaaagtctcctgcactggagcagcagtgttggagccaggaagatcgtcgggaaaattgatctcctggggttcctgcttggggtggggggccttattggttggcttcttggccacctttttgataaagaccagcaccaagaggatggcaaacaggatcccgaagatgatggggatcaccaccagggctctcagccgatcctggggaccacagacaacatcagtcttgtttgtgcctgcctgttgcacaaccaggtctttggtctcacagcttgtccaagggtgacatttttcgaaagcagatgacacattggagaagaagccgactgggcagggctcgcagatggtatcagaaacccctgtagcaatctgcttgaccccaaagccgggcgagcatgagcggtgcaggacacagctctcacaggcctcactcgtacagtgccagccttcttcacaggtgcagatggtgtctgtttctgaggtgcccttctgctggacccgaagccctaggttggggtcgcagtatttgtgctggtggcagtgtgtctctctgttccaggtgtctaggaattcgctttcaccgcaaggaaggcattccgtttcagtgaactctgtgcagtcactcaccagtttctgtcctggctggcacaaagaacagcactgactgt

SEQ ID NO: 466173 - DNA, 1000 bp, Homo Sapiens; identical to SEQ ID NO: 157716

SEQ ID NO: 466174 - DNA, 916 bp, Homo Sapiens
ttttgatttttgtattttttaataggaaaatgaaagaaaaagctcaatgccttctcttgtcctgccaccactaccccccaccacactcccaccccaaccccgggtggcccctgtgtgtacactttttctcttgaacttaaataaaataaaataaaatttaaaaaaccctaatcagcagcagtggtcaggggcgcacccactgcactccaaagaaggtctcatcagtgtttcgggaaggcaaaagtgtcccagtgaggttggtgcagagtgtgtcccctcgggccaggggcgtcaggcgctgggaggcaatggtacaaccttggtggaagctgagacgcagcaggctgatgctacgggaggcgggagagcagattcccacggccagggtggtggggtggtgcctggaggccgtcgtggaggagcagatggccagcgtcacctggatgtgtaccatgtagatgccatcacgatggatacgtagctgccccttgtccagctctggtccatgcaggaaggagcggcccagtgctgggcccccctgccagtatagcctggggtcctgctgaggtcctgtgtgattcagctgcagctcagctacgtcccacccaagtgactcgagcggcagctgctgctgagcctgtgcgaagcgctggatgcacaccacgaggcagatcaccaagcccgcgaccaatgggaccaaagcagcccgcaggacgcacccatagggcctgcgccgcaccgagcagcccgaaccctcctccggcatcgccgcggcgatcacctccgctagcgcaggaggggcgatgggggcgcggagcgctgccgagaaggaaggaaggaaactgcagccccctcccggggctcctgggcgtctacttgcttcaacctgtcaggggaccagcctgcccctctctgg

SEQ ID NO: 466175 - DNA, 1000 bp, Homo Sapiens; identical to SEQ ID NO: 157717

SEQ ID NO: 466176 - DNA, 1000 bp, Homo Sapiens; identical to SEQ ID NO: 246417

SEQ ID NO: 466177 - DNA, 1000 bp, Homo Sapiens; identical to SEQ ID NO: 157719

SEQ ID NO: 466178 - DNA, 1000 bp, Homo Sapiens; identical to SEQ ID NO: 336405

SEQ ID NO: 466179 - DNA, 1000 bp, Homo Sapiens; identical to SEQ ID NO: 336406

SEQ ID NO: 466180 - DNA, 1000 bp, Homo Sapiens; identical to SEQ ID NO: 336407

SEQ ID NO: 466181 - DNA, 1000 bp, Homo Sapiens; identical to SEQ ID NO: 336409

SEQ ID NO: 466182 - DNA, 1000 bp, Homo Sapiens; identical to SEQ ID NO: 246418

SEQ ID NO: 466183 - DNA, 1000 bp, Homo Sapiens; identical to SEQ ID NO: 336410

SEQ ID NO: 466184 - DNA, 1000 bp, Homo Sapiens; identical to SEQ ID NO: 336411

SEQ ID NO: 466185 - DNA, 1000 bp, Homo Sapiens; identical to SEQ ID NO: 336413

SEQ ID NO: 466186 - DNA, 1000 bp, Homo Sapiens; identical to SEQ ID NO: 336414

SEQ ID NO: 466187 - DNA, 1000 bp, Homo Sapiens; identical to SEQ ID NO: 157720

SEQ ID NO: 466188 - DNA, 1000 bp, Homo Sapiens; identical to SEQ ID NO: 157721

SEQ ID NO: 466189 - DNA, 1000 bp, Homo Sapiens
ttttttttttttttttttttttttttgcaagaattatgtctttattggttcatcttagaattaaatcaacatggaagaaatatgtactttttgaattaaacaaaatgttttgataaaaatgagatacgtgtgtataaaagctggaaaactcatgtcccctgaaacttggtttccaccagatgagtttcaaattcagatactaaacacacatgaagaaataatcaaatgaattctattcatcctttccccaaagttttgcttacaattaagatataggtattatttgtatgccgaacaaacaaaataaattggaagatgtttggataaacagggaagtgaacacttcaggaactactatttgcagtttgcaggacaggataatcttctctaggaagaataatgtcaacatagcagcactatattcaccaggattccccagagccgatggtccgatcatgtggcaggaagccaaaccttctggctgctcacaatatcaatcagcttccctttaatcttcaggaagtgtctcttgaactccaatccatcacccttagaaagccggaagtcaaccaatattttatcatccatttctaacaaattcactttgaaaatgagtttattgtttctcctatcagttgttgatatagtaacctgattcatacaacttttcttccattgatagcccaacttctcacaagtctctttcaggcattgataagatttgtctgcatccaatttggtaaagaatcgtgtcattcttttgaccaaccgctgccaggggttctgtgaggatcctggggtgccaagtaactgactattcaaaagcatatgatcaggacatgtgggctgggaaaagctgatcccttgtaccaatttatcaatgtatgaggggctggtatcccataaggaaagacctgtgcggggttctggctgagaactggagtacttcacattttcttcactagaagcactgtttactggagagaagtccaaattggat

SEQ ID NO: 466190 - DNA, 1000 bp, Homo Sapiens; identical to SEQ ID NO: 336416

SEQ ID NO: 466191 - DNA, 1000 bp, Homo Sapiens
aacatggcggccttcatctctgcaagctcaggggtcccaaggctcagaggaaggaacccagaagagatgggggaggtgagtccagtgggtctagtgggcgctcaaagatagaccaaagcaaagcgccaacacactgttaaactcttgtactttattgagcagctgtggaattaggaaggggaagtaggataggggacacgattacgttcctaagtgaaggtttcaagctggctttgcagggggtataattagtatggtcactgtgtcttgtaggatgtttggctccttggtgatagagcttgccaaaatggtgtcctttgataaggagggctagggggcagggagttgaagaaattcccttgccaggcttggggatctgtaaacatttccattaatcatcaacaagtgtgtactaatcccgagtcttacattgcgatgcctcactatccccacagccccatccctacctctctgcccaccagggctgagctcaaatctgtgtgttgtggacctctgcataggccccaagggagggagactgaggctcagcctgggactcagcagggcaggtgatcaggctcccggccagctggagccagagggggacggggcatccttggcccccgtgctgtgtgcagaacagagggctacgttgcagcgagtgcatccttgatggcattggtgagagggaagcgcagatcctggccgcagaaggagccctggaagtcatccaggtccagggcccataccatggcgcctgccagctgcctatccttcaggtactgcaccttgcttttgacgctttcctggtcgtcgtatcctacccactggttgcccttggtggcataggggacctgctggccgagggttctatggactgtggctccgcggaggaagtcacagatctcatagtaggcaagggtccctgcctccttggtgaaccggcctggaattcccggtcctgagattggggctccaacaccagtctcagaagaagcca

SEQ ID NO: 466192 - DNA, 1000 bp, Homo Sapiens; identical to SEQ ID NO: 336417

SEQ ID NO: 466193 - DNA, 1000 bp, Homo Sapiens; identical to SEQ ID NO: 336418

SEQ ID NO: 466194 - DNA, 1000 bp, Homo Sapiens; identical to SEQ ID NO: 336419

SEQ ID NO: 466195 - DNA, 1000 bp, Homo Sapiens; identical to SEQ ID NO: 336420

SEQ ID NO: 466196 - DNA, 1000 bp, Homo Sapiens; identical to SEQ ID NO: 336421

SEQ ID NO: 466197 - DNA, 1000 bp, Homo Sapiens; identical to SEQ ID NO: 157723

SEQ ID NO: 466198 - DNA, 1000 bp, Homo Sapiens
ttttttttttttttttgcgtaaaaacacttgatttttattctgtattttattactgaaatatgttgtcctactcatcccaccccacaataaaaatctgacccaggccccccatttctttccctcatcccctcttccaccacaccatcccggaacaagtgctccaggattccctgcccactggccattttggagtgtgtccattgggtagcaatgtggaaaccaccagggcctttgtggagaaaatggagggggttgagggagtcccaggaggggcttatttgagggcctttgccacttgctcataggcgagctcgatctcctcatcatctggacaggtggaagcgaattcttcccgggcgtaggcattgctcaagtaccgatgcactccccggaaggcctcggggatggtgaatccccggtacttcttacacaccacctgtactatgtgtaactttggcaacaggttgcagtcagccagggtgagctcgttgccatccaaaaacttcctctgagagacaccttcatcttcagcactggtttcatccacttcttctgggaggggggatgttaagtaattgtctaaaaccttcagggctttcaggagtcccttctccagattgtcattgagtgctgggtttgaattcttgatgtaggcagaaaatttggcaaatatgtccagcccagctgtgttggactcagggttcagagctgccagcttggggtacctgggagggcacagcactgcctccagaaattcctcaatcttgttggtgtctgtgtgcacttcagtgccatacagcaggaatgggagctgcccccctgggcacagcttctgcactgtctcggtccgccttttggtgtcaacggtggtaacattgaaggtgactcccttgagccacagtaccatgaacagtctctgggagaatgggcagttcccaatcttggccccatcactgccagccttcacgaacaattcgacctgcggttgttcttcagcca

SEQ ID NO: 466199 - DNA, 1000 bp, Homo Sapiens; identical to SEQ ID NO: 336423

SEQ ID NO: 466200 - DNA, 1000 bp, Homo Sapiens; identical to SEQ ID NO: 336424

SEQ ID NO: 466201 - DNA, 1000 bp, Homo Sapiens; identical to SEQ ID NO: 337650

SEQ ID NO: 466202 - DNA, 1000 bp, Homo Sapiens; identical to SEQ ID NO: 157724

SEQ ID NO: 466203 - DNA, 1000 bp, Homo Sapiens; identical to SEQ ID NO: 157725

SEQ ID NO: 466204 - DNA, 1000 bp, Homo Sapiens; identical to SEQ ID NO: 336428

SEQ ID NO: 466205 - DNA, 1000 bp, Homo Sapiens; identical to SEQ ID NO: 336429

SEQ ID NO: 466206 - DNA, 1000 bp, Homo Sapiens; identical to SEQ ID NO: 336430

SEQ ID NO: 466207 - DNA, 1000 bp, Homo Sapiens; identical to SEQ ID NO: 157726

SEQ ID NO: 466208 - DNA, 1000 bp, Homo Sapiens; identical to SEQ ID NO: 157728

SEQ ID NO: 466209 - DNA, 1000 bp, Homo Sapiens; identical to SEQ ID NO: 336433

SEQ ID NO: 466210 - DNA, 1000 bp, Homo Sapiens; identical to SEQ ID NO: 157731

SEQ ID NO: 466211 - DNA, 1000 bp, Homo Sapiens; identical to SEQ ID NO: 157734

SEQ ID NO: 466212 - DNA, 1000 bp, Homo Sapiens; identical to SEQ ID NO: 157735

SEQ ID NO: 466213 - DNA, 1000 bp, Homo Sapiens
ttttttttttttttttttttaggtacatattttaggatttttattgctgattacagatttgaaactatgaaatgtgcactgcttggcaagtaacacaagtaattctttacttattcacatttccaataaaagcgtaaataaacagacaaaaaatataaaggacaagagaaatacaaatagcaacagcttcaaaacaaaaggatttagtaacagaaagtctccacagtgtccgtcaaaatttaagattatccaaaccgtgcaaacgctcaacacaaaccaacgccatacactgaactattaatacttgtcccttgaagttgcaaactagaagccacccacataactgtatgatcacacaaaccaactaatttgctcaaggttcaggttaaagcaacatttaatatcctttacaagatggaattcgtgacaagttcaaaaggagaacttcctttgttttaatgcagctgtgctcagaagcctgtgatttcctaggaaaccatctgggtttagcccattagaaaaatgcagtttaaagcagtgtcacactggctgcctgaaggtacccttggagatactggagcgcttctgcattcaggctggtgctcaccattgatggaacccttcctggacaggcggtagacaacttgtgaagtgactgtgccaggtgaattttggggttattcaccatttgacctacaggatcatgctcttttttcccagcaaatgccaactgtgagaaggcagtctgatatcctggtgtatcttctatgtcaataaaatgttcctcatcaggaatggtatcatcttcgggtaactcaaaaagaccaatcaaagactgtaataatggagtccacagtttggtatactcagtgtccatcattgggggacattctgttagtaatttggttatgccaaccgcacagatctttttctctacatttccagataccttctgaatttcaggaataataattttttccaaaaccattccaaacatttt

SEQ ID NO: 466214 - DNA, 1000 bp, Homo Sapiens; identical to SEQ ID NO: 336437

SEQ ID NO: 466215 - DNA, 1000 bp, Homo Sapiens
ggccttttcttctactttatttcatattcccaccacaataacgactcctttaatttaaactaaaaaccatacagggttcctgaaagggtggcaaaaaagaaaggaaaagtcaaagactgcaggacaggtgggggagggaatcagcgaatcgtcttgactgggctcttgaagttgctggcggcttggagctgcagctggtaggccatcggatggatcttgaaaccgtagagcctgggcacaaactggttggcaggtctcttgggccggtactcgggatgcaccatgaagagcatgtgagggaaaccagtgccgaagtaggcgccatccgtgtgatggtgtcttgatgacttgggtgtgtacacatccatgcacttggggcagtagagcttcaccatggcttcacctgggatgtctgaaaggccaatgggaagcattggctggttctcacagtacacacgaggacagtaaccaaagtctccttgctggtacttttccaacatctgggcgatgccacggttggtaaggatgtagcgggcgtggatcaatccataaagcatctcggctgcctgctcaatcaggtcactctggttggggttgtcttccagttcttcatcaggctccaggtccaagatcatgtctagagcttgtcggtagtgagggacctgctcattgagtccagtaagattaaatttgtcctggatgtagtcttcatccacttcacagaagaattcattgccacggagcccacagaaccaggaaatccaggacacctcctctgagctgctcatcttcacgtcagcggctggacggggaccaggactggggtggggtagggaagttgctacttccagggaacggcggcgaccgctacagcgcaggccgcggacccgaccgcggcaggcgaagtggggtggggggagtggaaattagggagggtggggaagagggcaacacgcaagcgccaagggtcaggtgccgcggtggatgccgggacacggag

SEQ ID NO: 466216 - DNA, 901 bp, Homo Sapiens; identical to SEQ ID NO: 157736

SEQ ID NO: 466217 - DNA, 1000 bp, Homo Sapiens; identical to SEQ ID NO: 157737

SEQ ID NO: 466218 - DNA, 1000 bp, Homo Sapiens; identical to SEQ ID NO: 336441

SEQ ID NO: 466219 - DNA, 1000 bp, Homo Sapiens; identical to SEQ ID NO: 157738

SEQ ID NO: 466220 - DNA, 1000 bp, Homo Sapiens; identical to SEQ ID NO: 336443

SEQ ID NO: 466221 - DNA, 1000 bp, Homo Sapiens
ttttttttttttctttttaaaccaaagtcaaatgtaggttgttttattgtaaatgtcatcaaaatccagaacagcagaaacatattaatcagtttgaaattttagaaatcctttagcacttgaaaaagagtattacaaatgcatctatatcacatagaaagtcagcgaatacaaactagacaagcaggacatagttcttttctggcattccaggataataagaatatttatcaattaaaaggtcaatatctgtcttcctgaaataactccaaacctgagtcaacacacattcttttcggattggttctgactggcgtaagaagagaaatacagcattttgttttttattttgtttatctaatcacagggaaggataaacaaagggcaaaagtgagagaaaaagttagatgtccttgaatttttttttttagtggttgctactgcatttcatgtttcatttttgttagatcatatacattagaaaagaatgatacattttagagaagaaatatgtacatacatagtatcagaaataattttcttgtattgattcatttaatatggttgtgcttatattcaatcagaaggtcaactcctttgctctaaggttcttacactgctaacaagaaatggcttttttcctgttgcaggtcatgagcagcacacagtgtcctttctaggcacataggatcatcgatcactgtgtggacgcaggctaatcagaattgcacctgaaatcacttgtgcaattagtgatgcaagagtgatcacaggaatcaagactgggagccaagagaaagaacaagaggtgcacaaagaagcagttcggatgggagaccaggaaagctgaggggaaaactgggaaacagattctggaaaactcacagtttgtttgatacccagggttaagagatgggactttgataggagtggtgcttatgaattaagggaggaagaaagaggtgagatcctaatgttggtaaaggtacagagacaaagg

SEQ ID NO: 466222 - DNA, 1000 bp, Homo Sapiens; identical to SEQ ID NO: 157740

SEQ ID NO: 466223 - DNA, 1000 bp, Homo Sapiens; identical to SEQ ID NO: 336446

SEQ ID NO: 466224 - DNA, 699 bp, Homo Sapiens; identical to SEQ ID NO: 157741

SEQ ID NO: 466225 - DNA, 1000 bp, Homo Sapiens
gaagctgggggtggttttttttttccttccctttttacacaatattatgacaccaatttgaaaaataaatcccagtttctccgctctccctcccaggtgttcacagaactaagaaaataaataccacatctaaggtgtgctatgcaggcagctctggggctcttggagccgcctctaagcaaacatgtagacaccaggagaaggttcctggaaaataacaagtgcccaccgacggcgcagaaacccaagaatggaaatacagctttccacagcctttctgcctcttcagcaggttcacggagaagttgtcactcaaaggacgaccaagaaaccaacgtgcgcctgctgagccctgccaaggattatgctctgagagccggaggccgttttgtctctgtacagagggaactttgtgcaaattctctggaaccagagctccttcccttggccacatctgatctcaccataggcaggaaacctgcagcctgctcctcgcgagcgtccatgaggaaacttgcagggctggtagaaagaaagggggatttcccttcagtctcagaaaattctgctcaaggcctgtgggaatgtggaggttgctgcctaagccagccacaacctcatgggccctaagtccattcaaaatgttttgttggcactggctctgttaggggtgtacccactgttgaaacagaatgtatggcaaggtgacgttttcttcccgaagggtggctttgcttccactggttagagaagagtgtgtatgtgtgtgtgtgtgtgcatgtgtgagtgtgcacataaattgtgtgtgagtgtgcattatagtttcttgctttctctcttggtttagctggtgtttggcacactgtttagtcttttgaacggctcttccttctcaacgagaagaagctgctcttctggggaggccccatcatcatgggcgcttggttcttgtgagtaattttaatcgtgcaacatggctgcatccagggttctccatcca

SEQ ID NO: 466226 - DNA, 1000 bp, Homo Sapiens; identical to SEQ ID NO: 336447

SEQ ID NO: 466227 - DNA, 1000 bp, Homo Sapiens; identical to SEQ ID NO: 336448

SEQ ID NO: 466228 - DNA, 1000 bp, Homo Sapiens
ttttttttttttttttttttttaaagaaacaccaccaaaaggggattagcttagtccatcccttcctcagtcatctgcttcccaccttcctccaaatgttatcccagaacattctggaggcagggagaaggggaggcagctaatcagagtctgagagcacgatgatctcttctggatcgcattgtgtggccacacttgtcttgcaagtaccaggccgaggaggctgtgaatggggggtttgggacagccgggctggagaagggatgcagagggagctggtcaccaggccatggctgggagagtccaccctcgtggaggaatcagcaactggggccaaggaagccaagggggaaggtgggctgggcagggtacatatctttttcccattcttctcatgcactgacctttgcctttccacatagctgtttcctaatggccctgatcctgtttgcttcttctccttccgagattttttgcaggggggaccagaatctccccagttgtgaggagagacgcctccattgaaggaagtagaagagaccatgcctgctccattctctaagacagtggtgaagggctcctctgattgcttcctggaagaggaaatgtccgtctccacagaggaaggggtatccaggggcaaagcttcaatctctagctcaaagagctgagacacagggctttcttcctccagggtcagctcctcaggctgttctccattgctttcagcatctatgctggagggggccaggggttcttctgacagtaacgatggtgacactatgcgtcctttgttttgctgctcccctgaagatctgctgatctgtttgccaggttccaggttcttttcattggagatctgtagtgaggacatggggctcttgtctccatctttacctgctgctgcttcttcctcttcgtcctcctcttcatcatcctcctgaccctcctgcatctgttccagatcctcctcctcttcagaatctgtggcctcctcctc

SEQ ID NO: 466229 - DNA, 1000 bp, Homo Sapiens
ttttttttttgaagaaaaaaagtttatttttattcatgtatgcaaagacagtatcagcaataggcagaagcatatttctaagtttagaattaattttccattttgaaaggttcaggactttatcttttttacccttactcttttaaatgcttcactccaacaaagacaaaaatttattcccttacttttccttaaggtcatattggaataattagaagtagctctttagaatatagatatcatttatagtaagctggagatttaatcacagaatgatatgtgtcagaatgttatagcaccaaaaaaactacagatcatttttaaatggacaaattcatagtgctttcaatttctgaggtgtaataaagccctcttgggaattctaaagttaaaagactctctccttcagattcagaatgaaaattttaaggaattatagaccctagggggcactagtaatatggctcacagtaactacattaagttagaatttctacattttagggaagaagtcactgaaagaagggccagaaagccgctttaaactcatgtccatggcagatcaaatggtactgatacaactttttcccttagaaaggtattatatcccattgctaccgttccagggtttggcccttgaactgctctgctcatacagctactttcattctttatatcaccagttctaggagcaaacctcctcaaagactagtgacaaaggctggaaacgaaagactgtggtatagcaaaagggctctgatgctctagctgtttgtcacaatgtaaaatgaagacaccagctaatctagaaacaatgctaacttttaactctagcacattcttaagatatacttattaaacaacttttgtggtttagaaataaccaaaactaactactttgactcttctggacatattttactttacaaaaggaaatataacagactaaatctatttatagcaagtaactaatatttcaatgtttttataaaaacaattc

SEQ ID NO: 466230 - DNA, 1000 bp, Homo Sapiens; identical to SEQ ID NO: 336449

SEQ ID NO: 466231 - DNA, 1000 bp, Homo Sapiens; identical to SEQ ID NO: 157742

SEQ ID NO: 466232 - DNA, 1000 bp, Homo Sapiens; identical to SEQ ID NO: 157743

SEQ ID NO: 466233 - DNA, 1000 bp, Homo Sapiens; identical to SEQ ID NO: 336453

SEQ ID NO: 466234 - DNA, 1000 bp, Homo Sapiens; identical to SEQ ID NO: 336454

SEQ ID NO: 466235 - DNA, 1000 bp, Homo Sapiens
tttttttttttttttttgaacaggggaagtttaatataaagatgaactctactcggagcatagagtttaaaaagagttctacacaacaccctagggatgaggaagaatgcctcagggaagaaagcacagaaaaggaggtgccctcccgaggctgggactgagacctcctcgctggagaaggtgtggagaggcccctgagggtgaagttccccgggttgctcgagccagagtctgcacagtcacagggcaagacagaaaattctttcgagagggtgggcgctcacagggaatcgggaagcagagcccacctgcctacacctgaaagccacagccagtgctgggacctctctgaggtctgcagactccaggcagagcactcctggcagctgtgcagcaggagcaggaaggaaacgacatgaaagcccctttctccccagtgtcccagttcaacaccgtgcacgctaccaaggagaaacggcgcacgggccccacccacgactgcagagcaggcaggggagggggatctagagctgaaaggcaatacatggataacgcgcacgccccactcccacttttatttagcaagagtaaatgcagcctaatgacagggcgtgggaagacctcctgctcaccagtgtgggcagagtgtagcgtggcctgggctcctaatacaggtaaattgtctccaaaggactagtaaaggtgactgggtcatcctcctgcccagggacactgattagagaaaatccgtctgtgctggcaatacggcagtgctggacactcggaattcccttgaaggcaaaagcaaggaacagagcgtgattaggtactggacacctgccaagtgctgggctctctccagtttacagatgaggaaactgaggctcctcgagttggagctgggatgccagcccccatggacctggcagaacacgctcttgacagccccacagggcttctccctagggcgtgcccttagaagattccaggcagcaggcgg

SEQ ID NO: 466236 - DNA, 1000 bp, Homo Sapiens
caccctttggcccctctgtttccttcatggcttcatacagtttgtgttgtacattcgtaagaattcacattgactgcaaaaacataaatgcaacaaaaacataaaagcctccaagtagtatgttatatatattttgttcttctaaatgctcttctgtcgttgtcagaggcgcagtagctaatttataacttttcctttgagggaatccagatgaaaggcccagattgctcttcaataacaagcttgcattggttatatatatcttctaaagtatctccttggacaatagctgtaaaatattctccaaattcttgttctagcttaattgctcgatcataggttttcttggcttgttcctctgttagacgcttattcatctccataagagattccagagacctgggttttatgaagatggcaatgggatagagctgggcaacttgtaaccgcttgatagcatttcctgatacatcaagtatacagtgtttgcctctttctgctacaaatctcacagactgcacactggttccatataaattgtcattgtactggccggcttctataaacttgtgctcttggatatctttctccatttgttctctggaaatgacaaagtgatagtctctgccatccacctcgtagtctcgctttggcctcgtagtatgaggcacacaggagccaaatttatcagggaattcagatatcaagtcgtcattgatccgatccttcatgggccccaggataatcaccggccgggtgtagtttatttcctgccttgtaacaggctcataggaaagaatgaggtcttcttgtccacgttcaggatcactggtttcctgctcactctgctccttgttcttgtagaatgggaattttcgtgaaaagatgaagctctttttacgcttgtcattgaatgaccctttcgaatcaatcactccaggtttggcattaaacttcactgtcttcaatcgggcacgttcctttctttccaccctccttt

SEQ ID NO: 466237 - DNA, 1000 bp, Homo Sapiens; identical to SEQ ID NO: 157744

SEQ ID NO: 466238 - DNA, 1000 bp, Homo Sapiens; identical to SEQ ID NO: 336457

SEQ ID NO: 466239 - DNA, 1000 bp, Homo Sapiens; identical to SEQ ID NO: 336458

SEQ ID NO: 466240 - DNA, 1000 bp, Homo Sapiens; identical to SEQ ID NO: 157745

SEQ ID NO: 466241 - DNA, 1000 bp, Homo Sapiens
ttttttttttttttttttttttttttttttttttttttttgtggggcccgaccgggagcagctcatttattgagcagacatctgccgggcagtgccccctgcacccctcatggggctcacaacaccccatgaggtcgctggatgcagcccgtcccacagatggggaacggaggtacagagcagcacatcacgtgtccatggcccctggtccacgcccagccgactctgccttggggcctcactgaagggtggctgccaccctgaaggggccactgttgggccattcctcagagccagggtctgcaggtggcatgccccagccaggcctcgagtcatcggtggaacttgagggtcacctccactggaaagtggtcgctgatggcaagagcctgagtctggtccaggccgaattcctcctggaagtcgtgcacggtggccgactggggcttcaggctccggcgcaggcgggcgccacaggccacaatgcggtcgtaggcgcagtctgagttgcccaccgtggtgtcggcgctgtcagggatgagccacttgaagacctcactgctcctcagacggatggcggcccagtcctgcgcccgcacatagctgcagtcggcgttgaagtcgcccaggaacagcatgtcgtcggtgccccacttgtcgatcacgtccaggtacacgtcgtagagcgcgtcgatctccgccacggcttgatgcggcgccgcgtgcagcgggatcagcaccaggttctgtgctgctgcgggaaggggtgggggcgtcagagctcggcgggaggggaggggcggggcccgctcaccggtgccgggggccgagaacttgaccacgaagggctcgcggctgaagacgtcctcggggtctgggtacaggtaggtgtccacgaccgacaccgcgtctttcctgtacacgaacaggtacatctccttgtactggtcccggcccaggggctggctgctcacaaagctgtactcgtgctcggacacgc

SEQ ID NO: 466242 - DNA, 1000 bp, Homo Sapiens; identical to SEQ ID NO: 336460

SEQ ID NO: 466243 - DNA, 1000 bp, Homo Sapiens; identical to SEQ ID NO: 336461

SEQ ID NO: 466244 - DNA, 1000 bp, Homo Sapiens
aacgcatatttgtttttatttataggtaactaccacatgaattataaagacaacaaaggatgtcagaatgaacatggataggtgtatgcatactacggctaaggagaaacaatgttcctacatattatgggtagtgagaacattatctgtataacagggaactgtgattatttaaaaatatgcagaacttatttcatctgtgctttagaaataactgtatacagtgttataagttgaaaagaactcaaaataactaataccaaatatacacctatgtattagaattcaaaaaagctgctttctgtgaagtcaatcagctatattaaaaaatgacacaaatccaaaacaagatgcatgttatatataaagggacattgtaagtttccttgctgcattaaacccatggtttaatccatgaaatttccttttaattatcatttagacagaagcatgcaaatagtctcaggatctacttaagaacctttcccaaatccactagttacactccccttttcaggaactaagcaggtattcgggtagctgcttcctcctctgcatcagctcggtttgcattaatttctgcaagtgttcggccaaaccgtgcccattcatcattgcggggaacagcaatctgctctcccacatcgtatataacaatctgtccttcagaatcacccacagcaatctctctgccagaatgggtccatctcacacgattaagagcaggattaccctccacagaaatgctggcagttggtacctctgtgtcattattgagattccataaatccaatctccccatgccatccacacaggcaaacagggctgggtgggtaggtgaccacataacatcataaacatagtctgcattatcttcaaatgaatacaaaggcttgttattcttagttgtccaaagctttactgtccagtcaaacgatgaagtgacaaaaagatgtgagaagtctactgctccaacagctgcatgacaatggatgccagt

SEQ ID NO: 466245 - DNA, 1000 bp, Homo Sapiens
ttttttttttttttttttttttttttggtttataggagagatttatttgaagaaatattacaacatataaaaactacataaagtcttaatttccactcatacagtggtagatttgatataatgcataataaaaaacttttaaaatccagaatgcacaaagtactgcacaatttgatcactaaatcattagttgataagcgaacctcacacaacagcttcatgtcagccaaggccacaaacaccatgtaccacacatgtgaacggacagattgacatgttaaaaacacaacatcagtgcatgttggggattcctggtgccagaaacaggggtgacgggagggcagaactagtccttagcagcttcctcctcctttattttagctgaggcactctctcgggctttggccaacatacaaagcttgatctccaagccaatggctttggccaggggcggtggcacggcattgcccacctgccggtgcttgtccaggatgttgccgaagagccggtaggtgtcagggaagccctgggagcgggcacactcccgcacgctcaccacacggtgctgctctgggtggagcacgcggccctgcttgcccatgggctcggggttggtgacggttgtgctgaagaagccgtcccactcgagccttccatagaggccagcccagtggttgtgccggttcccggtgtggggcaggcaccaggggatgagggtgttgaactgcctggctgcggggtcgcaggctttgccggcttccacgcaggagcagaccccacggagggccccagagctgctgcggccgttcttcctgtcatggtgggtataccgcagcttcctggccatggtgccgtctgagagccgcacctcgatgttgggcagatcgcgccagtctgaccctggggccaaggggatgtgccgcatgcgggcagccaccaatgcactcatgtccttacagatgtggtccctgaggatgggctggtactgtgcgccccggag

SEQ ID NO: 466246 - DNA, 1000 bp, Homo Sapiens; identical to SEQ ID NO: 336462

SEQ ID NO: 466247 - DNA, 1000 bp, Homo Sapiens; identical to SEQ ID NO: 336463

SEQ ID NO: 466248 - DNA, 1000 bp, Homo Sapiens; identical to SEQ ID NO: 336465

SEQ ID NO: 466249 - DNA, 1000 bp, Homo Sapiens; identical to SEQ ID NO: 157746

SEQ ID NO: 466250 - DNA, 1000 bp, Homo Sapiens; identical to SEQ ID NO: 157747

SEQ ID NO: 466251 - DNA, 1000 bp, Homo Sapiens; identical to SEQ ID NO: 336469

SEQ ID NO: 466252 - DNA, 1000 bp, Homo Sapiens
aaaaaagcaattcaaacctaattcttccctttcttcctcctcccacccaacccgcctgcttctcaagatgagccttggcaacatagtgagatgctgtctttttcttttcttttttttttaaaaagcaattcaaacctaattcttccctttcttcctcctcccacccaacccgcctgcttctcagtggcaacaaactcaagttgctcatcatgctaccttgcacatatctacaagacaccatttacttcctaactgccttgacatctgcatgctacggtgctcagctgtttgacatcaacataaatatattctaaatccactgtaactagactttttgtactttcatactctgaagaaagtcttaataaatactttattattaagcataattattcatctgttggtgactgagaaatgaaaaccacaccttcgaagatttcttttaaaaaatgaaattcctttaactacaacaacgacaacaaagggacaagtacacagaaccaggcacttctgggaaacttgtcttctcatccctttgccctcccttcctccccctttagtaaagctggttgggcacatttgctaggatctgtgggtttcatcacttcaagccttactgcttaaaaaaatgaggtaagaaatttctatcggaaaagtgaaactgacacataaaccaaaccaaggtcttccctggctgctgcggcagccgttattgctctaagttggagtgttctgtttgcttttattatgtattcggagtccttattgccattctggctggcctcgtcgttggccaaggagaaatgatggggaaggagctcggtcgcctgctcccagctgctcagtcccaactttctgcccgcatgcggcccgtcctacccttgctgggagccagctctggttctggggcccccagggcggctctaacagctgggagaggtggtgatggggctgtgcaggtagggcaggctgctgggggccgagtgcacgcccacggaga

SEQ ID NO: 466253 - DNA, 1000 bp, Homo Sapiens; identical to SEQ ID NO: 336470

SEQ ID NO: 466254 - DNA, 1000 bp, Homo Sapiens; identical to SEQ ID NO: 160631

SEQ ID NO: 466255 - DNA, 1000 bp, Homo Sapiens; identical to SEQ ID NO: 157749

SEQ ID NO: 466256 - DNA, 1000 bp, Homo Sapiens; identical to SEQ ID NO: 157750

SEQ ID NO: 466257 - DNA, 1000 bp, Homo Sapiens; identical to SEQ ID NO: 336474

SEQ ID NO: 466258 - DNA, 1000 bp, Homo Sapiens; identical to SEQ ID NO: 157751

SEQ ID NO: 466259 - DNA, 1000 bp, Homo Sapiens; identical to SEQ ID NO: 336476

SEQ ID NO: 466260 - DNA, 1000 bp, Homo Sapiens; identical to SEQ ID NO: 157752

SEQ ID NO: 466261 - DNA, 1000 bp, Homo Sapiens; identical to SEQ ID NO: 336478

SEQ ID NO: 466262 - DNA, 1000 bp, Homo Sapiens; identical to SEQ ID NO: 157753

SEQ ID NO: 466263 - DNA, 1000 bp, Homo Sapiens; identical to SEQ ID NO: 157754

SEQ ID NO: 466264 - DNA, 1000 bp, Homo Sapiens; identical to SEQ ID NO: 157755

SEQ ID NO: 466265 - DNA, 1000 bp, Homo Sapiens; identical to SEQ ID NO: 336481

SEQ ID NO: 466266 - DNA, 1000 bp, Homo Sapiens; identical to SEQ ID NO: 336482

SEQ ID NO: 466267 - DNA, 1000 bp, Homo Sapiens; identical to SEQ ID NO: 157756

SEQ ID NO: 466268 - DNA, 1000 bp, Homo Sapiens; identical to SEQ ID NO: 157757

SEQ ID NO: 466269 - DNA, 1000 bp, Homo Sapiens; identical to SEQ ID NO: 157759

SEQ ID NO: 466270 - DNA, 1000 bp, Homo Sapiens
tttatttcagactacaggtttctgaacataataaaatctttggcttgtagcggcggttcagtctcgcagtctgtggggtcgtatttctcaacaagtctccggaaaacgaaaggggggcagaacagacagaccgacagaagggacccgggaggtgggggagaagaggtgggcagacacgaaaggaaacacactctcgcacacaaagaaaagtcccagagaaaccagggccggcgatgcgggtcgggaggcaccggagaagcaatgacattcaaatgaaaaaggcaacgaaaacgaaactgggcgggggcagcgaggcggtgggggagggccataaaataattataataattataataattataacaataataataaaggagattaataaaaatgtccagcaaatagagatcgctacacgtatgtgttttccttacctgaaattaaatatatacaaggtcgtaagcggtttggctagatagagctttaaggagttcgcagtttcgtcccttatactgggaatagagaatggatcttatttttcgatagcacctgtccgagtctttctcccttttcaaaaatgctgcgtttcaacgtcattgtccattctgaggctctctttctgtctctctcgctcttttccctgcgctccctccctccttggagcagatgctttctcccccagcgaggggccgggagacgacggcggcggtgccgggagggggcgcgggcgcggccccggcctgtggcggctactcgctctcgtctttgtcctggaccgtggtggtggagtggttgtacagtccctgggccatgaggtgcagcgccaggccgttcttgatgcctgtggctttcttgatcttggcgcgcttgttctggaaccagatcttgatctgggactcgttgaggctgagttcctgggccagggtctgccgccgctgctccgtgatgtagcggtttgcctggaactccgccttgagtctctgcagctgctcggccgtga

SEQ ID NO: 466271 - DNA, 1000 bp, Homo Sapiens
tttatttaatgtaaccttcaagaatttcaacacacaaaaatgcgggggtgggggtgttcacaattttgataagcacagttgtaaatagaaacattcattcatttctcataagattataaatatttgatactgaactgtaaaatgcacatgttttataaactaaaacaacaaagaaaacaaaaaacagaaaccaactttgcttcctgctaaaaaggcatgtcatttcattgagtttcctaagcagcagatggttattcagacttttaaattacaacttttgtttttatactttcctttttaaaaaggtttacactattatgtacaacgtaaaactattactgcaatgaaataaagaggtttaaggcaaagagcgaagttcaccctcagtcctcagggagaccagcgggactcccagctcagccgtgtgcacacccctgggtcagccgtgggcacaccccctggctgtcccagccacagatggacagttggattggtctttccccatacactaaacagaagacagtgtggcgttatatatagataatgtgtttgtttatatacatatataggtacttggtgggaaatatattgaatatatttaatttacactgtaccacaccttcaaaaataaaatgtatattttaaaaaacaagaaaagacaaaaagtgatgataagaaatgattatttacacactttcttccttcttctagatcctggaggattctgagttcttttgaaagacaaggtagccacatgtttcagaactgtggactcgggcgcgcctggtgtgtgtgtgtgtgtgtgtgtgtgtgtgttcacatgcatacagacatatgtgtaacacacatatttatcttggaagaatgttctctatagcagaagcagccactccaagaaaagaaaaaaataaaggaaaaaaagaaaaaaatagggaagaaaagaaaaaggaaaggaagatagatgatgccatctccctctacagagccttctgccagccca

SEQ ID NO: 466272 - DNA, 1000 bp, Homo Sapiens; identical to SEQ ID NO: 336484

SEQ ID NO: 466273 - DNA, 1000 bp, Homo Sapiens; identical to SEQ ID NO: 336485

SEQ ID NO: 466274 - DNA, 1000 bp, Homo Sapiens; identical to SEQ ID NO: 157761

SEQ ID NO: 466275 - DNA, 1000 bp, Homo Sapiens; identical to SEQ ID NO: 336487

SEQ ID NO: 466276 - DNA, 1000 bp, Homo Sapiens; identical to SEQ ID NO: 336488

SEQ ID NO: 466277 - DNA, 1000 bp, Homo Sapiens
tcactgagactgtgggttctgggagccctctttgcttttactgtcctctgccgggctgcactcggaccccgtgatggaggacttgcacccgcgaagcacgtgggcattcagcatctccagcagcaggtcatacactgggaccacatttttgcacttcatgttgagcagatgttccatgcccttgttactcgcatgcctgacgtgggacaggagcatcaggaggttagccaggcgcatggattgctgctgggaggagatgccgctcttggcaatcacccaaaccaaagcatcggtcacggcgttcagcaagtgagccagcttccggctgctgtcagcatcctgggtcgctgtgaccagagggtacatactggaattgagcaggatcatggccttgacacagagatattctttgtgttggagttttaactctcgaaaccttgaagtagttgccaggagcatgtcaaagatttccagaattccttctacgcatttcccctcatccctgtccagaacaagatctggagcaaagatgagcttgccggggtggtcaattgagcgccacatcagccccatcattaacacctccatccaacagctctccaagagccgcacttggtcgaacaggctgagctccacaaagccgggaatcttcttggcccagctgatcatgtgtaccaactccttgtcggccaacttggtcagggacatcatcatggaggcctcggtgaagggcgcactggggcggctgatcagcacatggggcggctcagcctccaggagggtgagcactagctgctcggggctcagggcgtccagcagcagctcccgcactcggggcgcgtggccgccacttctcttggccttgccggcacagtgcagctgctcgtcggcacttctctgtctccgcacaaggcggtacccacatctctctctccgggagccacacttcaccattcccacttcgtaacacttccgaagtcggcaggcctggcagctcttg

SEQ ID NO: 466278 - DNA, 1000 bp, Homo Sapiens
tttttttttttttttttttgtttcttgactgttagttgggccttggcctatgtcatacccatgggctgccacatgggggtggagggatcaggacgaagagaggggaccagagcagggatggaggtccagactcagggagtcggcgcttcttgcagggggttgggggagaggacacggaagcctctgccccatgcaggacatttccttgctgtggcagcagggcagctgtgccctgactaggctgggctgcagagagtgtgagtctcaggtcctctggagccagagccatcaggatgactgcttttcaggggtcatcagtcgctccacctcccgcatgaaccgcagacacaactcttcttgccagggcagagccacacactgcacggccaccggcagccccacactcttcttcatgcccttctgcagcatcttgtcccagatatccccaaagtagcccctgtaatgttccatctgggcctcgtcctcagcagtcaccgtggtgacaggcaccacccctgcagggaagtccaggcagttgtacagcatagtgtagctgacggcccctgtggccctgcctggggcattcaagtccagagcaggggccagcatgggggtcagcaccacatccaggtccagcgccctccactgggcaatcacggttttgcggtacacctcgatctcgtgctgcagttcccagagttttccagccgaacgagacttcatgttgctgaggaaagctgacagccttggcagcagaggcttcaccaggaaggccagcagtcctttaagccattggggaagcttcagaattgagaccaggtcccccaggcaggggtccacgaaatcacctttgaagttctgtaggaaggtgtggccaccatcactgaagagcccacctgttgacagggtctccagagcatggggtatgttgcttggcaagaagggaaccagcgtgtgccccgcagcctcaaggctctgtttggtctccagcacggcccgc

SEQ ID NO: 466279 - DNA, 619 bp, Homo Sapiens; identical to SEQ ID NO: 157762

SEQ ID NO: 466280 - DNA, 662 bp, Homo Sapiens
agcacaaacacatttatttattaaccaaagggatgatcctaattaatccaacacactttgaaatagctgcatgtaaaatgtttatgataaagataattgaacacagtaatgaaaaaaaaaagaaagaaacagtatggagatttgctcattgaactgagcttggtcattctcttaattaactcctgtccaaagtgatgatggaatttttattctactttttcatagatccgagtacaggtgacattgttcatgacacactccaccactaatttcccatctttcaattttcttgttattgtgctttccttcccatcccactcctgatgctgaaccaatgcaccatctgtaaagttgcagacagtctgagtttttctgccatcagctgtggtttcttcaaacttctctcccagggtacaagaaaactgtgttgttttcaaagtgctctcagtttttatggtgaggtttttaccatcacaagtgatgatacaatctggcttggccattgcgcccatttttcgcaaagctattcccactcctagctccttcatgtattcatcaaagcctttgctgtccaccaggcgccatcttccttccagctgctgaactgtggccatggtgggtgcgggcgggctggcgtgcagagaggggtctgcgtcggcggt

SEQ ID NO: 466281 - DNA, 1000 bp, Homo Sapiens; identical to SEQ ID NO: 336490

SEQ ID NO: 466282 - DNA, 1000 bp, Homo Sapiens; identical to SEQ ID NO: 336491

SEQ ID NO: 466283 - DNA, 1000 bp, Homo Sapiens; identical to SEQ ID NO: 336492

SEQ ID NO: 466284 - DNA, 1000 bp, Homo Sapiens; identical to SEQ ID NO: 157764

SEQ ID NO: 466285 - DNA, 1000 bp, Homo Sapiens; identical to SEQ ID NO: 157765

SEQ ID NO: 466286 - DNA, 1000 bp, Homo Sapiens; identical to SEQ ID NO: 336495

SEQ ID NO: 466287 - DNA, 1000 bp, Homo Sapiens
tcaaaacttgctacagtcgtagacgaaagctccggacgtgcggtacagagactggctggaagggaaggccatttgacagctactattcccgttcactggagagttgttcaagccgatcctctgtgactcgaacatctcccgcaccgagtggaagttctgctgctggcccgggtagcctgcggccgccgccgccgccgccgcgcttgccaagtggcccaggtctccgcccgcctggttcaggtaccacgaggtgaggcggccttggtgggccgcagggtggtggccggcctcctggcctcccccgccgccgccgccgccgccgccgtgactcagggacgacgagctgctgctggtgaccggaggcagagagtagtcgggcagggggttgtccacggccgagccgcccgcgcccccgggcgcgccctgcaagtggcccccgcgctcgccggccgcgtacaggctcatggcttgcaggttgcagtggtaggtcccggcgccgcccgcgccccccgcggcccccgcgccgccgccgccgccgcccgagctgcccgcgctggaggtctggctgcagggggagctgtagagggagctctggccgggcgagtaggcgccgagcgccagcgggggtgcgatccccgcgcgcgaggacgcggccgccgaggccagaaggccggagctgagctccgcggccgcgctctgcggcgacccccgcagcgacgtcatgatgttgtccacgctgaagccctggctatggtgcggcggcggggcggagggcgcgggcggcggcggcgcggaatccgcaccgtccaggctgagcggccgcgccgacggcaggctgcccggggggctgctcccgctggacaggctgctgctgctgctgtcggggctctcgatcttgggcaccgcggcggcgctgccgctgcccagggcggcggccggggacaggggctggggcggcgaggggcacgtaccgttctcggtcttgatgtcctggatgcgc

SEQ ID NO: 466288 - DNA, 1000 bp, Homo Sapiens
ttttttttttttttccttttctttctccttaaaactaaaccctttagtgacatttggcaatgagtggagagctgagctgatttctttcctgaaaatatcaatattctagtttctaaccagcagaccaacactgttcacattagctgaggacactgacaggaaatcacaggccctactgatctggcacccgtagacttggtgctggggtcccgtccacagatcaccctgactcagaaccggaaacacactgggccggacgctgtgctccactccttttgcctatgcacggttctgtcctggacgggtgcacatagcaaacaattgtgccattgttcagtttttagaaaaggataattttctaccaaacaaaagaagaaagaaaatccccctttagtttatgtaatttgttagtttatggagttccatgcgctcaaaagcttgtgatgctcgaacccggaatggtaactggtacaacattttctttctgtttttaaatttgctaggggaaggacggttaacattttaacagaaaaataccgcaagttaatgcatgtgaaaaactcagaaagtcaaaggaaaacaaacacaagaacaacacttaaaacgtcccataaaccatcgcaatattaaaacaccacagaatggccgacgggggctcacggtgtgctctgaatgagggtgggtggtgctgaggggtgctgtcctccactggcaggcggctcaccaccctgtacaaggaagattttgcatactttttagagttctgttccaagggtaagtgcttcacccagggtaaggggccattaacagtctctgctgggttaggaaaatggcgtgggattcacaaaggtgttaagctgtaaacggtatcactgtccacttgctgagagcagatttggcaaagggttttctctgtaggtcttgtgtcagtttgagggtctgctttgcccacttccccttcctcagtgatccttcagcctggcacccagctctgagatga

SEQ ID NO: 466289 - DNA, 1000 bp, Homo Sapiens; identical to SEQ ID NO: 157766

SEQ ID NO: 466290 - DNA, 1000 bp, Homo Sapiens; identical to SEQ ID NO: 157767

SEQ ID NO: 466291 - DNA, 1000 bp, Homo Sapiens; identical to SEQ ID NO: 336497

SEQ ID NO: 466292 - DNA, 1000 bp, Homo Sapiens
tttttttttttttttttttttggtagaaaaggatgatttatatacaatttcatggggacaagggctttgtacagagttgggtaaatggggccggtgctggattctggcgttgcctccattctggggagggaatgagaggggcccaaggaagggaccggcctctagccaacttcctctgtgtccaggctatgcatcctctggctggtgactcccctctgtgtgcctcagtatcctccccaggatgaggccttggccaggtcagtgctccacaagcagcaggtcctggggactggggacggggggcacctgctccccagggcggggtgtcctccgccgcgtcctctgccagtgcaggcaccaggcagcggccagcagcaggaggcccacgggcagcagcagtaggaggagcagagggggctgcggggctgtcggggctgtggcctccaggggccggggactccatgggggtggcagggttgaggagtcgggctgacactgcagctccaggcaccgggagaagttctggcgagtgatccagggcttcagcgccaccagctgctcggaggtctcctgcaggaggcgggagatgttggtctggacgaagcgaagacagctgggggggggctgaaaggcacatttggtgacaaagtgtatctccgtgttcacgcgctccagcaagccttgcatcttggacccagcgacagtcttgagccgctccatccagcgctgtgccaggaccagccgccagaggcccccgcagagctcctcgtcctgcaggttggaggccacggtgactgggtaatcttgaagcaggtagtcagacagctcacggattttgacagcgaagtcggaggagatggggctgtgttggaaggagcagtcctgggtcccactgagtcccgagctcagcagcagcagcaggaggagataggttgttgggctccaggctggcgccagcactgtcatttcggccgggggcccctcatgcctcctgtcgccg

SEQ ID NO: 466293 - DNA, 1000 bp, Homo Sapiens; identical to SEQ ID NO: 157768

SEQ ID NO: 466294 - DNA, 1000 bp, Homo Sapiens; identical to SEQ ID NO: 336499

SEQ ID NO: 466295 - DNA, 1000 bp, Homo Sapiens; identical to SEQ ID NO: 336501

SEQ ID NO: 466296 - DNA, 1000 bp, Homo Sapiens
gggggtgttgggcagagagttctcttttaaaaagcaacctaaaagtgaaatggtttcgatcgttttttatttaaaaaaataaaatacggagtctgtaggggccccaccccgggcggaggaaagcgccgcgcggttccggcctgggggcgtccctcacacggtggtctcaccgtgtcggctgttggtgaggcgagtgtagaacttcctccacgagtgcagcgtcttgcccgaccagatccagaagcccgacgtgatgcccacgatgagcgtcatgaggtatttgatcatgtagaccgtgaagtcgggcgacatgcgcggcgtgtagtgcgccgggcacgggatggccaggctcttgcagtgctggctcacccacgagcgctcccagtgctcgcggaaggcctgctcgtagaagtagcaagcgatgacgatggtggcgggcactgtgtagagcacggagaagacgccgatgcgcaccatgagccgctccagcttttcggtcttggtgccgtcgtgcttcatgatggtgcggatgcggaagagcgacacgaagccggccaggaggaaggacgtgccgatgaacaggtacacgaagagcggcgctagcacgaagccccgcagcgggtccaggctgttgaggcctacgaagcacacgccgctcagcaggtcgccgtcgatctggcccatggccaggatggtgatggtcttgacggccggcacggcccaggcggccaggtggaagtactgagagttggcctcgatggcctcgtggccccacttcatgccggctgccaggaaccaggtgagcgacaggatgacccaccagatggagctggccatgctgaagaagtagagcatcatgaagaggatggtgcagccctccttcttggtgccctgcaccaccgtgcggtaaccgtcctcggagaagcgctcgttgcacaccacgcgctcctggagcacgaagcccgcgatgtaggccaccgacaccatggtgtagcagccc

SEQ ID NO: 466297 - DNA, 1000 bp, Homo Sapiens; identical to SEQ ID NO: 157769

SEQ ID NO: 466298 - DNA, 1000 bp, Homo Sapiens
tttttttttttttttttttttttaacagtatatagtacaaacttagggctctttattcaggcagtaaagtaaggaacagcaaagtgggagggctacaccatcaccatggcaacagaaagcctcaaaaacataaagtccctcgacttatgtcgggtagactcttcctagctcaggagaaacacattttaactggctgaggacaaggccaggcagcctggccacactgcggaagggcagctggacgcgcggcctctggtcagtcctggaagtgcttggtgagggcttccagcagctcctgcttcttcagcccactcttcagcccgtaagcccggcaggcctctttcagcatgggcacagtgaacttgcccagcgtacccttgctgatgtgggtcttcagctcctcttctgaatactccaccttgggccttttgcttccagaaccttcattatcgtgttttctcttggtaactttcccttcaggattgtaatctggtgggtaaacaagctccttaaactcatccaccaaggagcccagtcttttattcattgcttcaaccttgggcaatgtcaggtccactgcttgttccggctccatcaaatccaaggccaaggcctccaggttcctgaagtgctgctgcagcacggggttctcaaagctgtcacttctgtatgtgaagcgaagcttctcaacgatagccttcatcttgcccacctgctctggagttgccatgattttttcagtaaagggcatcttccttttatcatcagcaaagggtaaaaagaccagctggaagcctggaggagtcacctgaattttctggtcatccaactcttcttcctgtggcaccaaagccacaaaataaggagggatgttcctgcggggtgtgtatctgcacaatgctgcaacctccttctccagacacttgatgagcagagcactgaacagggttgagctcccaatcaccagcgactcctctgggtacacgaacagggagggcct

SEQ ID NO: 466299 - DNA, 1000 bp, Homo Sapiens
cgatacaagacaatttaatattttcatgccattttctcattgtaaacacacatcaatataaaattgtcatgaaaactacatttgaaattcaaatggtgatggttttaaccccaaattaacatttttagaggaaataatgtttggtggaaatgttcattaaacatcattacaaatttaatgaaaaagcatgcatttgtacaagataggataccccaggtatattcagtcccatgattttttttgaatgtcatctaaatcaaacatgaaatatgctttatgtacaggcatgaccattacttcatgtgacttactgaattctgtctagtctttggtcccatagaaattattatctacatcaacctcgctgattttttttcatctctctttttagtaggttccattcaaggcaaaatgaaaacttttgtcaagtactaatgtaaaatttcaaaatccagttttattctcaaaaacttatttgcatcttccactgttaagacagtggtctctgactctgttttgttaactctataaagccagtttcacaggataaatttgaatcaacagtgcctactactgcatcccaggtcaccagtacaacactgaattgactcctgaggtaaaccgactgtatctcataatgacaggcttccaaagctctgtgcgctagctacaattggaagcaaatgccacctgtgcaaacagacttcagaaagccttctttccacttaatagatatgtctatgtaaatggccaaaaaattcatcattgtgtgtccatgatcatattttaaaatacatagttcacaatattacttctcttaaaattaaagaattaaagctcaaattttttttctaaataaattggctttaaaatgtagactgcaaatattcctgaccatattgatgggccagttcacaatctatgaagagttgaacatatatatggaatatatatgttccctttcatgtctgaagaggaataaaactgtacagcattgtct

SEQ ID NO: 466300 - DNA, 1000 bp, Homo Sapiens; identical to SEQ ID NO: 157770

SEQ ID NO: 466301 - DNA, 1000 bp, Homo Sapiens; identical to SEQ ID NO: 336503

SEQ ID NO: 466302 - DNA, 1000 bp, Homo Sapiens
gtggaaattaagaggattttattgccttttctatgttctttgagaaaatcattcacatgtaaaagtttgacatttgatatgagatttattcacactttacacatacattcttgattgtggggcagacaattgttcatttcaacaggactttcacatggtaacagtcacaaaattggcatactatattaaaaaatgaaatcaaacagctagacaaaaagtatgcagctttatgccaatttaaatctcaacatgcaccacccctcacccatgatctcagaattatctgctgtgagcttattaaaatattagccagagagtgtctgaggtcacaaatgatcgtttacaaaataaaacctcttttcctagagctacttgttttgttatagaaaaataccacaaataaaaattagtgctattcaaggtgttcatttcaaaatcacatatgatacacaagtttcaagccattgtttttgtgtctcacattgaaacatcacaatacatgatgtgaaactgatttactgattaaatgtaccttgcccagcttggaaaacccattgtctactatgtggactgcttacaaatgagagtgagttaaaacattttcagttattgggtacacttgtaatttgttcctcctcagaaactactcagaaaaactgcttgagaaacatgacaaaatttgtatttcttcctgatacaagaaatttgtctaaaaatctgtgattataaaacagatttgttttttggttttttttagtaaagaaatggctaaattttttttgtggttggaatcttattttcaagatgattcagaattcaacgtggaccccttctggagggtggggagaagtggctaagtgttataaggtatactggacaacacggggtgtttcaaagaggacgacaaggcactgtcacaatcagtccaactgtaattctttcctttcttgtgattatgtaaattttaaagaaaagaggtttctcacaagctatatacagc

SEQ ID NO: 466303 - DNA, 1000 bp, Homo Sapiens
ccagtctatagagatatttatgtacaaagtaggatagtataataaatatttagcgtgtcttctggtgtggctgtaagccccttcaaaagcagtcttttaagcccatttagtgaatatattctcaatttgcttgggatggccacagctgggctgtgactttgttgcttcaaacacagtggagtccaccatgggttccctcgggtgcgggggcttctccaggtgggtgccaggccctggcccttctggaccctcagggccgggcctgttctagctgctgatgctgacttctgatagcgaacctgctgacgtggacagggatggggacgacgatcttagggttccgggagggctcccctgtcttggaattggcattgcctgccttcacccgtttccacttggcccgtcggttctggaaccagattttcacctgcacctcgctgagtttgagggcgtgggcgatctgcgagcgctcggtcaaggagaggtactttttgcagtggaactccttctctagctccagcagctgctcgctggtgaaggcagtccgccgccgccggttcttgcccgtagacgtggtgctgcccgcggcgccgctgctcggcggggtctcctccagcgcgtggcccgggtcttcctccttgtgagctgcctggccagtcagattgtcatccgagctgtagtccacatcgctctccagcgagaagctctcctccttgcccttcgggtcgtcttccacctttgactcgtctttcccttgccctcggacagccccgacgagcgaagcctgcaccgtctcggccgcggagaaggcgagcagcgagccctctttggccaggaagcctttgccgtcctccgcgtcagcctgcagcgcctccgccttgtcgaagttaccgccgccgggcagcggctgcggcgcgaacttgcgggccgctgccgcctcctggtgctggggcgacgcggagaagccgccggggagcgtggccatgagcgtagaggtgag

SEQ ID NO: 466304 - DNA, 1000 bp, Homo Sapiens; identical to SEQ ID NO: 336504

SEQ ID NO: 466305 - DNA, 1000 bp, Homo Sapiens; identical to SEQ ID NO: 336506

SEQ ID NO: 466306 - DNA, 1000 bp, Homo Sapiens; identical to SEQ ID NO: 344013

SEQ ID NO: 466307 - DNA, 1000 bp, Homo Sapiens
gagcagaccacgcggcatttattgttgggcccgcgtccctgcccgccccgggttagcggcagccgcactcgtccaccaccatgtcctcatactgccgcagcaccacgttgtcgctgttgtcaaagaagagcacggagatgggcgacaggcgcgcgggcacgcagcagggcaggtcggcggctcccggggcggccgcgtgcatgagcgcgcgcagcacagcgtggttgagcgccggcggccccccggaccccgacagcgcgacgggcagcgcgcactgaccctggcagtagttggccaggaagccgcgcggcgcgatgacccagcggtgccagcccacctcgcggaagctcacgtacagccgccgcgcgcgacaagcgcccccggggccgccgcccaacacgggttcggcgtcgcgccgcggccgggccagggggtggcacaggcgcgggtcgagggtcaccagcagcagcgaggcctcggccaggcgcgcgcaggcggcaggggcccgggggcgtagcgccagcgccaggcggaggctgcgcggccatgaggcgttgcgagcccaagcggcgcccagcagctccgcgcgcactggcggccccagggcgggcaccaactggcggagcagcaccggcccggggtccgcgcccgcgccctggcccgcttgcgccacgctcagctcccagccgccctccggggctgccgccgccgccgccgcgaaacgcagctccaggcgggcccggctcgggcgctcagcgggttccacagccgacaggtcgaagacgactgtccactcagggcaatgccccgcggccgagacaggctccgaggcccgggtgggcgcaccgcggtccgggatgtggcgcacgatgtttccggcgacccccagctcctccacgtggcacggttgcagggtgacccctggggacgtccgccgcgagccagacctggtctcctgggggtcccggcgtcgaaacaggcgccacatgaccgggggaac

SEQ ID NO: 466308 - DNA, 1000 bp, Homo Sapiens; identical to SEQ ID NO: 157772

SEQ ID NO: 466309 - DNA, 1000 bp, Homo Sapiens; identical to SEQ ID NO: 336508

SEQ ID NO: 466310 - DNA, 1000 bp, Homo Sapiens; identical to SEQ ID NO: 336510

SEQ ID NO: 466311 - DNA, 1000 bp, Homo Sapiens; identical to SEQ ID NO: 157774

SEQ ID NO: 466312 - DNA, 1000 bp, Homo Sapiens; identical to SEQ ID NO: 336513

SEQ ID NO: 466313 - DNA, 1000 bp, Homo Sapiens
tttttttttttttttttttttttttttttttttttttttttttttttggtcctgacgatcttgtttattgaaaagttttaagcaggattttagacataaaaataaaagagcaaatatagaggtcttggggaccatggccacagtcactgctgagctggaggcctgggctgtggcttcatggggcagcaccctctacgccatgccttgtactccccgcacttggggaagatgaagttttagtttccaaatgagaagggcagtggggctccaggcagccacctcgggcggcaggatggggcttggcagctaaggagcagcaatggtgcagtcctcagagctgggagggtggcttcccgggagacctggtggtgctggggctgccagtgagtcccgggagcgaggatattggggagagccagagccggcagagggagggaggagcctggaatgcggggaagtcagactgtgggcgaaaggggagcccggattccggcctcacaagcccgagtaggaggcctctgaggtctcagaccaggatgaatcccggcgggaagacgatggctgcctctggagccctctctggttggggcagcccaggcgcaagagcagcatccacatccgctcccggaacttgacccctacaaaggcatagagcagcgggttgaggcagcagtgcatgtagcccaggcctgaggtgaccgacttggccacgtctaccctgctttctcggccacagttgcgggccaaagcgcccaggtccatgaggatgtccaccagcaccaccaggtgatagggggtccagcagagggcaaaggccaccacgaccaccaccaccagccgcatggcccgcaggcgccgctggcccctggaaaccagcagcacggccaggatgtgggcatagcagtaggccatgaccagcaggggcagcagaaagccagccaccagctgcagcacccgcagagccgtgcggcccacctgtgggaagttgtattggcagtgg

SEQ ID NO: 466314 - DNA, 1000 bp, Homo Sapiens
tcattcccggggggcgttgccacggggacaggatgacagaaactcctcctctccaaacgccctcgccagggcagaagtcaaagactggaaaaacttttcttggaaatctctgccaacgaagacgtagaggaaggggttgaggctgctgttgacacagcccaaggcaaagctagcctggaggatgagcagcatccgggggtggtagatttccttgagcatcacccgtcgccacagatggaccaacagcaccacgttaaacggggaccagaagataaagaaagcgctcaccagcaccagcagcagcctcttgggccggttggcatggacccagccctcccgcaagagcttggcccggatgaggtgggcgcaggtgcctatgattgctaagggccccaggaagcccagcaggaagtggccaatggtccctataatgtgtccctccacgaccccttcaatccaaatctgggcagtctcattgtcagagttgaacgccaagtagcagtgcgtacagccattccattttctggttgtccggaatttcaggtgcgcagagcacaaggcggcggccaggagccacaccccaaaggccagccagctcgcccgctgcacagtgcggtggttcagggcccagacggggtagaggacagagatgcaacggtccacagagatgaagacaaggaggcagttactggcaaagtagctgaggaacacaaaggtgatgtagagtttgcaggcccactctccgaggagccactgcctggagacaatatagtacatggcaatgggcagagacagtgagagcatgaaatcggcaagggccaggtggaagaagcagacggtggagaccgtgcgtgccatacggaagacagtcatccacagcaccagcccattgcccagcactccgacgacaatggacgcagacaggataaccacagtcagtgggcggagggaccccacctcctcagacaggcatccggaagagttcatcttcctggaacaa

SEQ ID NO: 466315 - DNA, 1000 bp, Homo Sapiens
tcatatggaggtgcctcggtctggatcattacccagattgagccccagggtaggagttggttgataaggaatagatgacattgtttttataggactcctgaaaaagcccccattaggtgccctgtgcctaaaagggccagttcggtgctcaggcacgttgccaaaagtgaaaccagaagcagctttagctgacagtgtgcggctaagagtctggatctgctctgggataaaggttgttgtggtaatatgagtgttcctgaaatcactgatttgctccagtgcttgtcgtgttggcaaagtgtcaatgtccagaggggtcaaatcaattgacgaggtggaaaactgtttatgggggctgtcgtcatctgtgcacaagctatttacacgtctatggaggtgctccaggtcaatttccttgtcatcctcttttgatggaacccgggagcctttcctcttgttccaccacgtctccagcatggctatgaagcaggagaggacaattccagcagccaggatacaaaagacccctgcaaagctctttatgtccagggcgcctcctttctgctttgtgtccactgacgagtacaggtcacactggccattcttaggccaccatttgtgcttcaggatgtccatgtcaccattctgctgaagctccaggatcctttgtgaaaaaacatctcggtaaggactgccatgttgtaatgcaattccatatccccgatcagcaacagtatttccaatggtgtaaaaggaacaatctgggtcatagatagccacatattccaatacagctgcatcccatacgaaagcataatttccatattttaccttttgaatgcctgcctgggactccagaacattgttctccgatccattgcttcggttgatcatccgccacatttgggaatacatgctgtccctctcaaaaggattcagtcctttcatgcggacatgctcatataccgcagagtctaggactgtgccataagggatttct

SEQ ID NO: 466316 - DNA, 1000 bp, Homo Sapiens; identical to SEQ ID NO: 157778

SEQ ID NO: 466317 - DNA, 1000 bp, Homo Sapiens; identical to SEQ ID NO: 157779

SEQ ID NO: 466318 - DNA, 1000 bp, Homo Sapiens; identical to SEQ ID NO: 336518

SEQ ID NO: 466319 - DNA, 1000 bp, Homo Sapiens; identical to SEQ ID NO: 157781

SEQ ID NO: 466320 - DNA, 1000 bp, Homo Sapiens; identical to SEQ ID NO: 157782

SEQ ID NO: 466321 - DNA, 1000 bp, Homo Sapiens
gaaaataaataaaattctttattacatcctgatcacacagtagaaatggagattaaataagaacgaggagaaagcaggaccctttcccctccactcctcaaatcccacatcctgaccaataaataccctccctggagacccagaagtcccagtcccaatatagtccagactgaagaatcttgggctgaccccctcgtttggcagaggagggaaactgaggcccagagaaccacccagcaagttcgtggctcggggcccagcagctctcctctggcctcccctgaagacccttgaggcggcatccgcgtggctggactcacacctggacgcggtagcccccggtccgccgccggcaaagcctccgcacgcccacccagtacagcgtcaacatggccacccagtagcccacgtaggcgccggcccccgcggccaagtggtaggcctcggctgcgcgggaagggccgctccagtcggccctggcctcgtgtgctacgctgcggaccaggcccccaagcagcagcagcgcccagagcgccaggggcagcagagggacgtagttagcggccagcttccgccggcccgaggtgccccagccactctggttcatggtgactagcgccaggaacttggcaggcaggaggccacacatgtagaggggcgcgtagagcgagagaagcaccatgcgcaggcagccccgcagccaggccgcgaaggccgccttggccagtgccacgccctgcacgcacagcagcacccacagcagcgcccaagggcggcccgcgtagaacagacgcagcacagtggccgccacgaagaaggggaacaggccggagaccaccgcctcgtaggtcatccacgcatggtgccggtgccaccagagcgcgttgtacagccactcacggaagtacgacttggaccagcgtgtctgctggctcagccaccgcaggaaggacgagggcgtctctgagtagcagcgggacctggaggtgtacttggtagc

SEQ ID NO: 466322 - DNA, 1000 bp, Homo Sapiens
ctttttttttttttttttcagctcagaaaggccaattacttctttaatagatcagtttttttgacataataactcacatcaattttaaatactatcacataaagcatggtggagaaaagaaattttgcttcataattagaaaatctcacaataaaacttgcccagaaaaacaaaaacgaaaaagtcccatttgaaaataaatacagtccatgccaaagtagtataaaatgaagccagaagtcttcaaaaagaaaacattttcctttcaatattttctttttaatgattttctgaaattggtgagactgtcaaattcaggggttgctgagctgttctgatttggttcctttggtatctgttttttcaccactgttgtccttggatttatcttcttccttaacgtctgtttttttgtcctctgtttctttcttatcttcttcaattctagctttctttgctcctttcttatgatcagccacatttcttcgacctccttctccttcatcctcagaatctgagaattcttcatcacaagctatccgcttgtctgatgctcgaatagaaattctcttgtctggatcttctccatcttcatctccactgtcttcatgaacagcatcttctggaatagcttgcatctggacaccaggtgcatgaggtaacatgcgcaaattttcaaacaaacgctgttttatcttttccatatattctggagtgttctggtttgtcatgtttgaaggactaatatgcagtttgaagtctggtccaaaatactcaaagtaatcattatatggcaactcattgggaatctcacaatcaagggcaactgcagtctcatatgtccaacatcgagcaacattacggattgtgtagccacctcctccaagcatcagtaatggtaagttaaaagtttttacaacttctacacatttagcatgacctttgactgttagattgaaacaacccagtctatcaccagataatgagtctgcaccacact

SEQ ID NO: 466323 - DNA, 1000 bp, Homo Sapiens; identical to SEQ ID NO: 336523

SEQ ID NO: 466324 - DNA, 1000 bp, Homo Sapiens
aactctgataaaacagtccatcaaaagagactgaaagctgacagtctttttggagccaaagaacaaagaacattttgtggctcctctgttgctgccataaatgctcaatcccattactctcatgtatgttgtgggtgtcgtcaggaccttcaagcactaggcttgactctatgggggacagaggataacatggctcctagaggaaggagaactggaaaagagggatctgcaatcatcgatctggtgttggaaggtagatggctccattttgctctcggggccttcttctccagactagaacaccaactccagccagcacaatgacaaggacaatggacccagagacagctttcatcacaagagggatagtttctgattcctgggggacctgaagaaccatgtggacaccgcagtgctccacatgacaggagtaaaggttgctgctctgaggatcaagctcaattgatgcccacgcctgataggttccatccccactgggaagaatgtctccataatcaatttcttggacaatttcttccccgtttttcatccatgtcatgtaaatttctggggggtaaaagccatgagctttgcagaagagagctgtaacccctggaaaagtttctttgcgatttactctgaccagtgggggctctgttctttgtagggtgtctttcccatactccaggaatctctttagccaggcaatacattcttcttccagccaattcttttgatacagcaactcatgctgattggcctcccatgcctgcttgatggtgtgagccacattatctacagccagccaggagagggtgtctttattgaagatcaggaaatcctgcccgtcatatgcatactgcagaaatcctgtggtgcttccatcctccagcagctcacagccaatcattctctggtaagtgtgagaccctgagtgattgtagtgcctctgtaggcgcttcagttccaccttgaacatctgctgccagcccctcagcag

SEQ ID NO: 466325 - DNA, 1000 bp, Homo Sapiens
tttttttttttttttacaaataaatggggttattagacccaagagcagggtcagaaggagaaacagcaaaaacggggagtaagtgcccaggctcctgccccaaaccccttgaggaaaagagaaacaggtgttgggcaggaagaacagcaccaacagggaggagagagaggggattgggtcccggctctaccacggaccagtcactttccccaggactcagttttgtcacctgtataatgggggaagcacaatccttgcctgactccttccaagagcctcaattaggcttcggtgagagagtgggtatggaagagctttgcaaactgtaaagtgcagtacacacatgcaggctagctgtggccctggggcccaggcccagctgggctctgcggagtgggtacagtaagtgttggcaatgaaaacactgcttgaggctgagcctggccctttgagcaccctcaggtcctccacatctgttcctcctctcaggtgcccacaacttccctggcaccttttaccctgggtggctgaggcctgggaagatgaggcgctcctggcctgggctggccccgcctcccactctgaaccctctggtcacctctgctcctgatgatgatgaacaaatgcagacctggtggtggggagcagccgtgccctgcaccctcttttccctagtcatcaccctttccatgaggtcttgtgcgagtcacccccattcctgggtgagggttagaatgaccggtggtgatttcttccccgcagcactccaagtggatgaagagcagctcctgcccgctgctggcagcctcaggcccaggggcctccaccccgcagaggcctgagccaagctcgccattcgccctgggctggatctcagctccggaaggagacgtcgagaagaggctgccaaagagcctggaggggccacttcagagcagcgccttgaagaggaaggagagggaggctccacaggaaagtcccagggccaggaagaaggtca

SEQ ID NO: 466326 - DNA, 1000 bp, Homo Sapiens
ttttttttttttttttttttttttttttttttttttttttttttttttcaaagtcaggaaggaatccttagcgattattttacagttgagggatgagatgcccggggtggacaaccctctggtttcggtcacaatcagccagcctctcgcgctccagcaccccctctattgcttcgccgtggtcggtgtcttctttccttcacacctttggtacagacccagccggcaccgcgcgcaacgccgctagagcccctcagagccccagctcccgaccacccgccggagaatttcgagtccctcaggaaagcagctcccattggccagcccggccccctccccgcacctcattggctactgtcctgcaggtcccgccctctcggcgcctcaggttccagcgagggcgtaacggcagtgaagtgaaaaatggcgggaaaggccgcctctgagctggccgtgcatctgcgcaacgctggcttgggagccggccggtggtggaggagccctcgacgacagcctcaaggcctgccgctcctcacgcgcccggctgccactagaccatggacgcaggcagccgcgcgctccaccgctccgggcccggcgctccacgccgatcggacgggcgtcgctcacaccaccgaggcgagcccggacactgaagccactttgttgtcctcggcccagggctgcaggttctgcagcgcgaagagcgacgagttgtgcaggcagagagggtccgggggcagcggcggccgcagcggccgtggcaacgcgtcctgctgcagatgcaggagcagccggcccgcgcggtgccgctcggcctcgcgctcctccgccgtctggcgccgccacttggtgcgtcggttctggaaccacgttttgacctgtgcgtcggtcatgcgcaaggccttggccagcgccgccctctccgcagaggccaggtacttctggcgcaggaagcgccgctccaactccagcacctgtgagcgggagaaggacgtgc

SEQ ID NO: 466327 - DNA, 1000 bp, Homo Sapiens
gcttttatatttgcgtttattcttcatttaactttttaaaacactactatagtttattaaaacaaaaacaagagcaagtagtgagcatattatgattacagtccttcactcattcactactgcacattaaatgccagcagtgagtgttattcactggcccattaagaggtctgacactgaacaccacctctgggatgatgttcatcatcctcatatgcttctccattgtagtggcgccgtctttcctgatttggatcaaagtccaccagttctacttggtccatctcatcagtctcttccacttccttcctctcgggtaggagtttttccagcaaagacagtttatcaggagagagaaagccattctcaggaaagtttaccttaaattcgatgattaggcgacccttttcatatggtctacgataaattggcatgccttcatttagtacacacttgatatctccatgcttgacaatctgacctggatgagaggtgatgacgatggttcggttgtcaagagtagatattggcttctggaagccacacagtgcttcaacgagctgtatgtccatacacatgaaaaggtcttctcctcgtcgagtaaaaacagcatggtccttctgatctaacacaatgataatatcgcctggctccagtcctggttcttggtctccttcaccatggaatgttatcttctggccatctttcatgcctttgtcaatatgaacttctaaaattttcttctctcgaactatcttccttccgttgcagcttttacatctatctttaggactgatccgctccccatggccctggcactccatgcacacagactgaatttgctgaaccattccaggtcctatctgatgaattcttatttgcattccagtacctcggcaattgggacagcactctactgctcctttcttacctcctctaccttcacatttgtcacaaatcacattcttttgcagagccagttttcttgttgcaccattat

SEQ ID NO: 466328 - DNA, 865 bp, Homo Sapiens
ttttttttttttttttttacaggtggttgctttgaactttatttgagaaaaacagaagataaatgtatcaaaagaacacacaggtggcgggggaggcacagccagtggcggcagcaggggtgggcatccaggctaaggctttacttggcggcagtctcatcggattttgcagcttctgggcccccaagctgggcccgcgactcgaaggtgactgggatggtgatctcgttggactgcgtggctagcttgggcatgggggcctccacggtcagtgtgccctcaggggacagggaggaggaaacttgggtggggtccacaccggggggcagcgtgtatttccgcgtgaagcaccgggagatgtagccatgctcgtcctgccgctcctcgtgcttgccggtgatctccaccacgccatccttggtcttgaccgtcagctcgtccggggcgaagtggttgacatccagggacacgcgccagcggtccgcagtgtgccggatctccgagaccccgctgctgagttgccggctgagcgcgcggctgtaggcgggcgcggccactgcggggctctcgatggcggcggggggcagggggcgcacgtagcctggccagctgctgccgcctaaccactgcgaccactcctccggcagccggggcagcccgaaggcctggtcgaagaggcggctatgcgggtaccagtcgcggaaggggtcccagctggggccccgcaggagcgagaaggggacgcggcgctcggtcatgctggctgactctgctctggacgtctgctcagaaaagtgcggggcgctgggctcggctgcgcttttatgctcctccagtcgggtatttttagcaggcggtgtttgag

SEQ ID NO: 466329 - DNA, 1000 bp, Homo Sapiens; identical to SEQ ID NO: 336527

SEQ ID NO: 466330 - DNA, 1000 bp, Homo Sapiens
gctggttaaggaagcctttattgattccagagggttcccccgccaatatttatttttatttttattttatttttggagacagggtcgtgctctgtcccccaggctggagtgcagtggcacgatcaaggctcactgcaacctcgactttcagggctcaaaggatcctcccaactcagcctcccgggtagctgggaccacaggtgcgggccaccacaccaggctaatttgtgtattttttgcatagacggggtctcactatgttgtccaggctggtctcgaactcctgggctcaagcgattctcctgcctcggcctcccaaagtgctgggattacaggcgtcagccaccatgtatggccatttccccagattgtttcatattcctctttttctcgctcagccggcatagaacatccccctttacgcctgggacttcatagctaggcacttgcataggtacgcagcgcccacagtgaggaggatccctacaagggcagcgatggaaccggaggccaaagctgtgggcgcggggctccaagcgagcatcagtgtaatgggtgccgagctgttgcggaccaccaggccgtcgagattgaggcgcgcgtggcagatcacgggctgccagaagtcgcggggtccagcagcaaactcgtaggtcaaggtcacgttggccagatccaggccggtgaagcgctccaggctttcggaatagatgacccggcttccatgcctcagggtcaccaccaagtagcccaccgggaacacctgcgtcacgtggcagcgcaaagtgtatttcctgccctttaagaccggaggctccaaaatcacgctgtggggcggtttgtaggcggtgatcctggaggtggcccagcgtgtttttcctgcgcaggtcacgaggcagtgcgcgagggagctccaggccctcacgtcgagcagctggtaagacacccaacccggccctctgagcgtcttgccttgccgcagcggggtgcggaggctgga

SEQ ID NO: 466331 - DNA, 888 bp, Homo Sapiens
ttttttttttgagttctgatttttattgtgactaatacatgaggtgcattattaaggtttgacaacatggtgactgcctataaagacgtctgcaaccagtgcctgcagccttcattccaaatgaacattcttgtgatggctccaatgttatagacaagcattaacagccaaaaagaaaaacagaaatctccttatggtgtgaaagtcctctcagctgcagctgcccggacgcccagaagagccctcccagctgcagagggtgatttcagtccatgtcgaccctcctgcttgtctttacagcagaatgaattctcttttgtctcagcctttcccgattcatgttttctatcctgattctatgaagtttaacatcttcttttgttggctccttcggtgtctggctggcctcagtgatcatgtctcgaattttctgcaggcaatctgccagattccggaactgatagcggctgctctcagaggtaaggatcaactctcctaacctgttgatcttgtttttatgcgtgatggctatcttctgccgcacgggctccgcgatccactcggcagttgccaaatggaacctgacttctgccttggaattcactttgttcacattctgccccccaggaccactactccgacaataagatattgtcaagcgatctagagggatgtcactgtcggcttgctttgcaccattcgggaccctccaggcggtgtccgagccctgagattcggggtagagcttgtccaggctgtagatgctcttgaactcagtgccgtctttctgcttgtgcagcgcccggcgtgggcaccgtgcgggcggtgggagcagccagactccggctcggctcaggccccagcgcaggcacctggtggccgccatgc

SEQ ID NO: 466332 - DNA, 1000 bp, Homo Sapiens; identical to SEQ ID NO: 157786

SEQ ID NO: 466333 - DNA, 1000 bp, Homo Sapiens
ccgagtcttgctctgaagcccaggctggagtgcagggggcgcaatcttggctcactgcaacctcttccttccaggttcacgccattctcctgcctcagcctcccaagtagctgggactacaggtgccagccaccacgcctggctaattttttgtatttttagtagagacgggatttcactgtgttagccaggatggtctcaaactccagacctcgtgatccgcccacctcggcctcccaaagtgctgggattacaggcatgagccactgcgcccggccaaaaaacaactctttaaaaatgtaccttagagcaacatgcaaagcttccctgctcagcaatcccaggttggggccccctgtcttcctatcctcctacccgtcacaaccaccactgcaggcttctgatgctctgttttcctcctctgtctcagttcagttgctctgagttagagaggagctctctgggactggagctgactgcgccctggcccatttcctcactaccatcctcaagctcagatgctgacaggaaaatactgcctatgcctgaaggggcatcccttagcaggcggcccagttccttctcataacatttggctgcttgcagcagatctccattctgcttatgaattaatccttgaagataccaataatttggtgcattttgtggaagcagattttcggatacattctgtggttggtctttgatctcttccttgtcagttgattttttgcttatggacaaaccctctaaaccatgttgcacagcagtgtcttcagacttcccattatatttctgaaggttgcagtagcgctgatgggattgttgcttttcagcatcagggacttccttattgaatggtgtctgataacattccgtctccaggaactcagcgagatcggagtatgcattcagaggattcagtcccttctcaagagctttattcgaatagtccatagcatattgctttagtgcttcaatcatctctttatttccacta

SEQ ID NO: 466334 - DNA, 1000 bp, Homo Sapiens
ttttttttttttttttttcagtgtggaaaaaaatctttatttcaaagtaaaatgcacaaagtctcatacagcagataaaatcagtgttactgctctcagatgttaaggttagcaacctttctggcatatgctaattcatcatgaactcccaatagctgaactgaatggcttttaagtacagctataaggtctcatggtataattccttttgttgatgccagtgacaggattttaaaagctacattccattaaaaattaaaaatacagcagcttttccaggggaactagatcccaaaattgtacccagaactcttgtctaagatattaagttaaatatcttgcatgtatatatcattatagtaaatcagtattcttgacaaccacagtgtaagaaattaaactttggctaattgttttccccatcatgaaatcagtcttttgctgtcttcataaataaattatgaccaaacattacaaatactttatacatgtttactgatttacagagaatatttaataatcagaactcaccagtttcaatagtattgtacattaaattataagcaatataaccactgctacaaaagttatctaagttaatccaggataaaaactgtgtctagagtttaaatacattgaaatagaaaaaaaaatagaaattagaaaatagtcttcaagttctgaaaatctagaagaattctccaacatctgctctcttatctcgacatttgcttctagctttggttcgagctttgaaggctgcagagttatataaatgcctttcgaaacgagaaatcttcatcgttttaagcgttgcagcatcaagcatcactgggggtccaagttcaaatacatttcgaaggaattcatttgactgcaagtggtactgcatccctgatccaagaacctccttaaaggtgtcataggtgtgtttttttacccagcaatcaatatacatgcgttcaggaccaaatttaatggtttctgttggaaaatcccg

SEQ ID NO: 466335 - DNA, 1000 bp, Homo Sapiens
tttttttttttttttttttttctgtacaggctcatataatagaggggacttttattattttttcagagaattcggatagccatagattatacagagccatttctcagcactcttttccttccacttaagaagctggaatacaacatgatgaggatgatgccaaaacaagactgctggttcatatcatctagggtacaaatacacacttaatcacttgacactttactgaatgcaaagcaagatttagcatctttgccctcgttgtacagagctgaagcaggagaccagggaggggaggactgcatggttttccttggcaggggagttgtgcaccctgcagtcctgtggtgttgtgggaagatcagcccatgttctgtcggttcccatagcccctaggatgggtgtccttccagtcatcccactcccgggctctgtggagtgtttgttcatcatcctcttcctccttttcttcttgttcttcctgttgctgagctgcttttctgaattcctctggtgctgccttggctattccctgatccggtaatgctccatatttccgatgttgctcataccagtcactcaccgtcatagttggcagacttggataaccagctccaaatactttggcttgagccatgttccgagtgagaatgaagggtttcactggaggcctctcctggcgagatgagttagaagttgatgcctctcttgaagagtctctttctctcaggatctttatttcctggtcaatgctctcaatctcttctaagctgatatcaatccacctctgaaggtgaagaagataatattcacgaacacgctcatcatctgcttgaccactttccacagcagatttcattgcagacaacctatgctccaactccttcttctgcttgtatctctgtattttagcctgtctttgagatgccatagcaacgagactaggataagccatggaggaattggcagtgtgattttcagcagagttgttcatggtttt

SEQ ID NO: 466336 - DNA, 1000 bp, Homo Sapiens; identical to SEQ ID NO: 157787

SEQ ID NO: 466337 - DNA, 1000 bp, Homo Sapiens; identical to SEQ ID NO: 336532

SEQ ID NO: 466338 - DNA, 1000 bp, Homo Sapiens; identical to SEQ ID NO: 336533

SEQ ID NO: 466339 - DNA, 1000 bp, Homo Sapiens; identical to SEQ ID NO: 336534

SEQ ID NO: 466340 - DNA, 1000 bp, Homo Sapiens; identical to SEQ ID NO: 336535

SEQ ID NO: 466341 - DNA, 1000 bp, Homo Sapiens; identical to SEQ ID NO: 336536

SEQ ID NO: 466342 - DNA, 1000 bp, Homo Sapiens; identical to SEQ ID NO: 336537

SEQ ID NO: 466343 - DNA, 1000 bp, Homo Sapiens; identical to SEQ ID NO: 336538

SEQ ID NO: 466344 - DNA, 1000 bp, Homo Sapiens; identical to SEQ ID NO: 336539

SEQ ID NO: 466345 - DNA, 1000 bp, Homo Sapiens; identical to SEQ ID NO: 336540

SEQ ID NO: 466346 - DNA, 1000 bp, Homo Sapiens; identical to SEQ ID NO: 336541

SEQ ID NO: 466347 - DNA, 1000 bp, Homo Sapiens; identical to SEQ ID NO: 336543

SEQ ID NO: 466348 - DNA, 1000 bp, Homo Sapiens; identical to SEQ ID NO: 336544

SEQ ID NO: 466349 - DNA, 1000 bp, Homo Sapiens
ttttttttttttttttttttttttttaaaaatcttgcaattttatttgcatataaaggccgctagatatagaatatcacaataaatttaaagaaacaactgctttcctaaatttcattaacaaagtaacataaaatagaataaagctcaacagcatttacaatgggaaaacagaaatgactattagcgacaatattttgtgctagcgaagattgcatcgacacacagtgcaaaatgggagaggggagaggaagtaagaagacaacttggggtatttaaatagaaaggacaactaagccttattttagttagcttccattgcatccatttaagtctatacatgcctgtaactgtacctagatttaactcaagctctttaagaccttgagctctgagagaatgtgtcagttccttccgacttctgatgtgctgctatacagcatccctttgcagttgtactgtccttgacaatattaaactcctaacgtagtcataatacacaaaaaatacttatatatataaacccatattgaaaaggagtctgcatgttcatttttttaaccgtatgaaatacctgctcttgacagattccatttctgtatttttaaagctgaaataatttaaaagaaacaaacaaacaatgagaccttgtataaccacaataggaatctcactagttaaaccatcctttaaatgacagccattttcttctcaatgcagctttctttatagtgagagtatgaaaagaagtcttttccatgcctacttctgttgagaagattgctataaattgggaccacatctgcaaaaaagaagcattaccaagaaaacaacaacaacaaaacattgaaaattaaaatatttcaaacaatactcttaaacagttgtgcaaatctgtgttggtttttaaaacactgcctgtttcttatttttttttctttcagcttaaagcatattaaaataagacttttatcactttttaaaagaaagcttggctgtcc

SEQ ID NO: 466350 - DNA, 1000 bp, Homo Sapiens; identical to SEQ ID NO: 336545

SEQ ID NO: 466351 - DNA, 1000 bp, Homo Sapiens; identical to SEQ ID NO: 336546

SEQ ID NO: 466352 - DNA, 1000 bp, Homo Sapiens; identical to SEQ ID NO: 157789

SEQ ID NO: 466353 - DNA, 1000 bp, Homo Sapiens
ttttttttttttaaggttaaaaagaaaactgtataataaaggaaatacaaaggctttggcatggttttttacaatcaacaatggttaattttgatatgtagttgtgaacaacttcaaaacacttaagtttaaaactcttgcaagcacttttaattgattaggaatgaactctagatgcacaaaatgattggaccgtgaacagtaatacaactatatctaagaacaattaacttttgctggccaaaaaagaaacgtatgattgcatgaaaatgtgtataaaacatctatattcttgtcaaatataaatgaaattaactttattatagaaatcattctgaggatttctagggaagacaaatacttacattttgacataaaacaaattggattatatcgaagacacactctaccttttagctatcaactttttttcttccttgaatttatatcttacccttttttgcacataaacttcatctgttaacaacctttggaaaaccaacagatatttctgacataaatctagtgcatgttgttccaggtttaattatatgcaaaggaatgatacaaacttggaacatcagtccataaactatgaacagatgggtagaagtattcgatatatcttgataaaactcttaaattcgtggcaaagcttgttgatcatggttttctttttaaaaaaaaaaaaaacaacttcatgaccaacacagatcaaacatccatccagtctacattgttctttttttcattataacatacaaatgcccatttacaaataatacaccaaaatgaataaaagtttggataccaaaatgaagatttgttccaactgatatcgtgccttctgtatacaaaggtccttgtttcaagtccattccttccccagtggtacaatacaggacacaattgtagaactgaagcggctctaacagccatttttctttctttcctgaaagctcaactgttgtgtccccatagtcactgactgaattaacac

SEQ ID NO: 466354 - DNA, 1000 bp, Homo Sapiens; identical to SEQ ID NO: 336549

SEQ ID NO: 466355 - DNA, 1000 bp, Homo Sapiens
aaattcatgcacttttactatgcccattgcacttctcatccatggatttgccttgccttaagaattaaccatggccttgtggcctgggtgacccaggctgcttttatcttgcacagctaaagagggtctgatgggtggctcaacaccccacccactcctataccatgtcatcagtgttcacattttccaaatgagttgaagtgccttgatctgtccactgccaccaccaccagtgctgagttttcccatgtggttttgcttttgtggtgttactgccttgctgctagagcagcaggactgtctgcgtagcgcctccagcctgggacctcactcagttcccagggtattcaaagacggcagcggctcccattccagtcccgatgcacatggacaccactccgtatgccctcttcccacggcgcttcagctcattgagcagcgtgatgacctgtcgtgccccagtgcagcccagtgggtgccctaaggccactgcaccccccagggggttcaccttctcaggggggagtcgtagcttctccacacagtaggcagcctggcttgcaaaggcctcattgatctcgaagatgtccacgtcactcactgtcagccctgctttttgcaaagctactgggatggcataggcaggtccaatgcccatgatgtcaggtgggaccccaaccactgcataagacctcaggaccccaaggatgggaaggcccaactcttctgccttggacctccgggccagcaggatggcagctgccccatcactcacctggctagagtttccagctgtggtagaaccatctttcttgaaggcaggcttcagtttggccaggccctccatggtggtgctggggcggataccctcatcctgggtcacagtgatgctcctcttggtgcccttgtcatcatggaccgtggtggtcacaggcacaatctcagcttggaaacagcccttgctctgggctcttgctgccttctgctgggaagccagggc

SEQ ID NO: 466356 - DNA, 1000 bp, Homo Sapiens; identical to SEQ ID NO: 336550

SEQ ID NO: 466357 - DNA, 1000 bp, Homo Sapiens; identical to SEQ ID NO: 157790

SEQ ID NO: 466358 - DNA, 1000 bp, Homo Sapiens; identical to SEQ ID NO: 336552

SEQ ID NO: 466359 - DNA, 1000 bp, Homo Sapiens; identical to SEQ ID NO: 157791

SEQ ID NO: 466360 - DNA, 1000 bp, Homo Sapiens; identical to SEQ ID NO: 246420

SEQ ID NO: 466361 - DNA, 1000 bp, Homo Sapiens
aggtcccgatcacccagacactgtgccaggcctaacactgttggcacctcctcctgcttacctgggaagtggcagaagctgctctctcctccccgggaaaaggtgaggaatgggcactggacagccactaggtggagaggactgtcagctgggaggggtaggaggggaagtgggacccactgcctcaccccacctggaagatggcctgggcccgagcagaccaccttggaagccatggcggtggaggagacctggtaccaccgagaccctccccatcaggccccagcccagcagaagctgaaaaggggtcaccaggtacaaaaagagtctgagacagccgaatcaggcaccattttttataaaaacgcatagtctcatttttcactctttaaaatcacattcaaaaatcggcaaagaaacgccccggggaatgagtagacgggaggggagggtgcgccaacccagccccgggggggagaaggcgcgacacgagtgcacacacacaggcagagcactggcacagggggcatgcggtgggcgaggcggcggcactgacaggacgtgggctgtggggctggccagtctgggcgggggtacactgatgggccaggatggggggcacactgataggccccagccagcctccttgctgtgctgcccgcccacctggccggccccgtcctgggcagatggggtcgcacccagcccagcatcagcgagacctcaggccaggcgaggccagtatggcccaacctgcaggtgccttgctgtggtccctgagcccgggtgctgggggttggggcaagaggggacagcagggagggtagcagcacctgctgccaatgccactctctcagccaagccccgcagtgtcagggaagtgggagtggaggcagccagtgacacagaggcttttcctgaataagggcacaggagcccgagtcactgtgggagccttgagggccagggagacaacgggcccctcctctcgccaacactg

SEQ ID NO: 466362 - DNA, 1000 bp, Homo Sapiens; identical to SEQ ID NO: 336555

SEQ ID NO: 466363 - DNA, 1000 bp, Homo Sapiens; identical to SEQ ID NO: 157793

SEQ ID NO: 466364 - DNA, 1000 bp, Homo Sapiens; identical to SEQ ID NO: 157794

SEQ ID NO: 466365 - DNA, 1000 bp, Homo Sapiens; identical to SEQ ID NO: 336559

SEQ ID NO: 466366 - DNA, 1000 bp, Homo Sapiens; identical to SEQ ID NO: 157795

SEQ ID NO: 466367 - DNA, 1000 bp, Homo Sapiens; identical to SEQ ID NO: 157797

SEQ ID NO: 466368 - DNA, 1000 bp, Homo Sapiens; identical to SEQ ID NO: 336562

SEQ ID NO: 466369 - DNA, 1000 bp, Homo Sapiens; identical to SEQ ID NO: 336563

SEQ ID NO: 466370 - DNA, 1000 bp, Homo Sapiens; identical to SEQ ID NO: 336564

SEQ ID NO: 466371 - DNA, 1000 bp, Homo Sapiens
ttttttttttttttttttttttttttttttgtgaaaacaatttttttttatttttattttttgagacatggtctcgctctgtcacccaggctggaatgcagcggcgcgatctcggctcgctgcagcctcgacctcccaggctcaggtgattctcccgcctcagcctcccaggtagttgggactacaagcgtgcataactccgccaggataattttttgtatttattgtagagacggggtttcgccatgttgcccaggctgatcttgaactcctgacctcaggtgatcatcccgcctcagcctctcacagtgctgggattacaggcgtgagccaccgcacctggctaatagctatttattgaaagtactgtgataagcattttagattcattgtatcattttaaatttacagggcaactcattgaggttaaaatcattctatctcctttagaaacttcaaaactgatcttagttcaagaaagaagttactattcagtgatcaccgaggctctaacaagtggagcctagattcgaaaccaaaccctgtgacttcaacacccaaacatttacgttcttacgttttactgtacagccttcctcctggataaatcagattaaaattttgaagacatgtatatagcttgtcagggtagtacagttattaattctgtggttaccacattcttttatatctcaagactcccagccccaggatctaagtcatagctcttgattatggcccacccccagtagggagctgaacttactacttctgatatgaaagaagccagagtagttgtttcttccaagtcactcacatctgagatggccctcaaaccctccttggtggtctccggctgagagatgtttgcgtctttctgatcttggtaatactggatcaactgctgaaccccagaccttaatgcaggtttaagtgcagcactgatcgctagacccataggcccccctgacatcccagccatggtcatcagaaggtcata

SEQ ID NO: 466372 - DNA, 1000 bp, Homo Sapiens; identical to SEQ ID NO: 157799

SEQ ID NO: 466373 - DNA, 473 bp, Homo Sapiens; identical to SEQ ID NO: 336567

SEQ ID NO: 466374 - DNA, 464 bp, Homo Sapiens; identical to SEQ ID NO: 336568

SEQ ID NO: 466375 - DNA, 613 bp, Homo Sapiens; identical to SEQ ID NO: 336569

SEQ ID NO: 466376 - DNA, 1000 bp, Homo Sapiens; identical to SEQ ID NO: 157800

SEQ ID NO: 466377 - DNA, 1000 bp, Homo Sapiens; identical to SEQ ID NO: 336570

SEQ ID NO: 466378 - DNA, 1000 bp, Homo Sapiens
tcagcgggtggtcagctccatggtcttcttccgctcttcccgctgctcctcccagtcctcgtcaggctcatacgtgcctttgatgatggccacacgctcactcaggctcagggagttggggaagagcaggtagaagtaaaggatggcagccaggaccgcccccacgatgggccctacccagaaaacccagtgagcggggctgaaccgattcatgaccaccgcagggccaaaagagcgggctgggttcatggagcagccagtgaagtagattccgacaaggtggcccagggtgacagacaggccaatggacagggctggggagcccacagggctggtgcggcgggagtcagtggaggcgaagatgcagagtgccagctggaaggtcagaatcagctccaccaccatggcctggccctgcgttgtgttgttgttgagcgcgttgacggccagattgccccgggcattgagcggtgccacaccgtagaggatgccagccccggcaatggcgcccaccagctgggccgccacgtagaagaaagcccggagcagcgagatctggttgcccaccaagagggccagggtgatggcggggttgatgtggccgccgctcacgggtcccagggcctgggccagcgtgcctatggccaggccaaacgccagcgcgatctgcaggatggtaggcagcgccgacggccacttgagggccgagcccaggccaaagaagacgaagatgagggtggccaagaactctgcgaacacggccttgaggaaggccacggagcacacctccttcttcatggtggccgcgggggcccggcgcgagctgccggcggggggcgcccgttgggtcgcaggcggcggaggaggtggatgcggcgggggcgggggcctggctgcggggcgccgcgcactgtcccgcgcccactccgaggctggcggcctggcgcgggccctgctggggcgcgctatatagggggcgggcggccgggcgcggggccgg

SEQ ID NO: 466379 - DNA, 1000 bp, Homo Sapiens
gaattctgtgcttcttggtgaagaaagagaggagtccttgaatggcgggggagacacaaaagggacccccaaaatccacatggggtgctgggaaccccaaaatccagtggaaggcacatcaggcacaaattccagagaggttctgagtggaatccctgccacaaatcccagccattggagatggaggagctcccaaaatttagaagtatccccaaagccaaagaggaaaccaaatgatggaggagacagggggctcagtctttggcgggggtcccccaattccagaagaactggaaaagcacatggggaccccctcatctcccagggtggggaatgggggatcctgaggcagcatcagggcagagacgaacattgattggctggtgggcaaggctccttggcgtggagggctgagattggctccctggtggcttgggcggggcctaaggcacaaggcgggctgcgctgagtaggcaggcaggcaactcatcggcctgggtgcggtgcaaggagggttccgaggcactccgctcaatcttggggagtgaccgttgcagcagctcaattgtggccaggatctgggggaagaggggccgctcctcccgctggaacttgaggcagtcagacagcaggcgccgcatggccttggggcagttgctggagattttgctgaggtccggggacagatagccacggcccaccataaagataatctggtcacggcagccaatgtggctgtaaggcagtgagccagtcataagctcgtagagcacaaccccgtaggcatagacgtctgactggaagctgtaggggttcgggtcctgcatacggatcacctcagctgccatccacagcacagatcctgagggctgctccaagggctgggccccgctccatcgagtcttcactgtggccaagccaaagtcaccgatcttcaccgtgagcccctcatgtaggaagatgttgttagacttgagatctcggtggatgatgttcttgg

SEQ ID NO: 466380 - DNA, 1000 bp, Homo Sapiens; identical to SEQ ID NO: 336571

SEQ ID NO: 466381 - DNA, 1000 bp, Homo Sapiens
tttttttttttttttttttttttttttttttttctgtttggttaaaaaagtttaatgagctgtaaaataaatacacttccattaaatattaaataaattatttacaacttgaaaaaatactttttaccttcgtgcacctttatatacagaaatagcataaaaagtgacaattgaaagtttaaaaccatcataacaaaaagggtccattgtcttatgatccactggaaagaggaccgactcatcatttatggctatgacttggcagtgactccaatgtgatatcctgtaattttatcttcagttatgctatagcatgtacatttccattctcttgtcgaagtttctttcgttcctcagcttctccttcatatttcctgacgtattgtcttctaagctggactgtaataacagcaacagctgtgaggatcacagcagacataaaggcagctatggctgctaatgcaatttttgataaactactgtcaatcatgctgtgagttttcatggacttttccccacaccgttcaccgaaatattcttgctgacatttgcatgttactgcttccaggtgctctatatatttgcattctccgtgaatgcagaaattttgaaattctgcattacatggatttttcttctttctgtttcttctattttttccatttttgcctccctttttctttcttttgggtttatctgaagtattttcactttccgtcttgttttgggggggcttaactacctgttcaactctgactgaatcatcgacaatatagccaggtatttgtggttcgttatcatactcttctgagtagtcatagtcggctcccgaggacggttcactactagaaggcatttcactcacaggggaaatctcactccctgaagacatctcacttcttgaggtaacctcaaatccatcagcactgtggtccccagaaaatggttcacgcttcccagagtaggtgtcattgaggtccaatccagcagcataatggcc

SEQ ID NO: 466382 - DNA, 1000 bp, Homo Sapiens; identical to SEQ ID NO: 336572

SEQ ID NO: 466383 - DNA, 1000 bp, Homo Sapiens; identical to SEQ ID NO: 336573

SEQ ID NO: 466384 - DNA, 978 bp, Homo Sapiens
caaaccacagcaaatttattactcaagatccagtgccacattatagcaccacccgaagccctcaccttccccctcccaacctggcccctagagtacacccaaaacagaaaaaaaaaaggaaacccagatccctgctcctcctctggaagagggggccttggccaggaagccccttccataggtcccagcaggcaggagagtggacccctctgtgcccagagagcaaggctccaggctccaacaacagagagaacatgcaggcaggagcaggagcagaggcctgtggctatgggggaggaaaagtgggaggaaagggcactgcctgaggagtccgggagtctggtcatcccggggatgcacgcaggagcttccgggcatcaggggcctgcccctggctggttagcgctttgacagctcgtgggacagccagtccagaccatcgtacagacctgtgccttgggtggcacaggtggcctggacataccacgtgcggctgcgtaagtgctgtagccccagcttgtcagtcagctcgctcacgggcatggcgttgggcatgtcctgcttgttggcaaataccagcagcactgcatcccgcagctcgtcctcctgcagcatcttctggagttcatcagcagattcttggacccgctcccggtcattactgtccaccacaaagatgaggccctgagtgttctggaagtagtgccgccacagaggccgaatcttgtcctggcctcccacgtcccagactgtgaaacagatgttcttatattccactgtttctacattgaagcctatggttgggatggtggtgacaatctcccccaacttcagtttgtacaggattgtggtcttgccagccgcatccaagccaaccatgagaatccgcatctgcttcttcccgaagatccgcgaaaagagcgcggacacggtgaggcccatggcggggcccggggaggggcgcgggcaccgacgcgg

SEQ ID NO: 466385 - DNA, 1000 bp, Homo Sapiens; identical to SEQ ID NO: 336574

SEQ ID NO: 466386 - DNA, 1000 bp, Homo Sapiens; identical to SEQ ID NO: 336575

SEQ ID NO: 466387 - DNA, 1000 bp, Homo Sapiens; identical to SEQ ID NO: 336577

SEQ ID NO: 466388 - DNA, 902 bp, Homo Sapiens; identical to SEQ ID NO: 157802

SEQ ID NO: 466389 - DNA, 1000 bp, Homo Sapiens; identical to SEQ ID NO: 157803

SEQ ID NO: 466390 - DNA, 1000 bp, Homo Sapiens; identical to SEQ ID NO: 336579

SEQ ID NO: 466391 - DNA, 1000 bp, Homo Sapiens; identical to SEQ ID NO: 336580

SEQ ID NO: 466392 - DNA, 1000 bp, Homo Sapiens; identical to SEQ ID NO: 157806

SEQ ID NO: 466393 - DNA, 1000 bp, Homo Sapiens
ttttttttttttttttttctctgtgtatgatatatatttatatatataattgctctcattttattttacttaatcctctttttacagtagatctgacacaggcattaaataactgcagagagagaccatggtagggcgggtgcaggaaaacatgggggcccgaagggaagaaacacagatccagctagagaaaaagggaagggtccacctgtgggtggagtgtggaggctgcagcattaaaaaaagaaaaaggaggttagagaggatgaggaagtgaagggatgctggaggacaaagggttaaaatgcctctacagctacagaatattcagagcaggaggcaggaggcccctcatttgacattctgtgggcattatgggtttttttgtttttgtttttgttttttttttaaaggcaaaggggtctgaagagatggagccaagacattcagaggctagatttggaattttcaggctggcatgcagaggaaaaggaaggagttagtgattagttgataacttgctaaaagaagccagagaaaggatggtgggggcagatctgggctcaggggaaggaggtggaatagtcccaaagccagccgatgtttccaaggtggccactggggacggagccagaatggccgcccctcccccagagctccctgggaagtggaacttgaaggatattctgggaaggcgaatgggggaagggagccatccataaaaacaaagtggatattcagcctaggtcaaccccgcccctctgggtagcagctatttgggtgacagaacggcctaggaagaaactgaaggccgggcgcggtggctcacgcctgtaatcccaacactttgggaggccgaggcaggtggatcacctgaggtcgggagttcgagaccagcctgaccaacaaggagaaacccccatctctactaaaaaatgcaaaaaaaaaaaaaaagaaagaaagaaattagccgggcatggtggcacatgcctgtagtccc

SEQ ID NO: 466394 - DNA, 1000 bp, Homo Sapiens
aagctttgaataagttccaagtttttatatttcacaatttatatactttattacagtccacagtctgctaaataaaagcagtaacaagatatttcacaaactattgtacaaattaagtcttatgaatttaatctcataaaaaattaggtgcatagtcacactggctaacctaaaaatgctattttatctacagcctaaaataagaggcagttccaacactaaaaattaatcccagtttttttttttacatgttttacaaaaaaaagtttgtgctcttaatcaaaaagatcgaggctaattcagcatgtaaaaaataaattttacaaagaacccaagataatatttttcaaacacacttttattttctttttttccttcctcacatacagaacttctccacataccacatttcttgcagctataaagtcacttgatgttggccgggtaccattttatccctaaaactctgttgacatcaaaatatgacagttgttatatccataaaatatttacatagcacggcatattaagctttagacacttggcaattaaaccacataaaaagaggacaagacccccatcctacatgtttggaatcaggtgttcaccggtccctatctggcgactgtacactggttcaaagggcagcagaggcaacaggcagttacttcagaggacactgaacactatgatctggaagcacgttatgatgtaacccaatgtcatgtaccacacacctttctccaaggtggtctcataattctagaatggaaggtccagctgttacaaaatgaagacagacaacacaacatttactctgtggagatatcctactcatactatgcacgtgctgtgattttgaacataactcgtcccaaaaacttgtcacgatcatcctgactttttaggttggctgatccatcaatcttgcactcaactgttacttctttcccagtgttgttaggagcaaagctgacctgaacagcaaccaatggctgta

SEQ ID NO: 466395 - DNA, 1000 bp, Homo Sapiens; identical to SEQ ID NO: 157807

SEQ ID NO: 466396 - DNA, 1000 bp, Homo Sapiens; identical to SEQ ID NO: 157808

SEQ ID NO: 466397 - DNA, 1000 bp, Homo Sapiens; identical to SEQ ID NO: 157809

SEQ ID NO: 466398 - DNA, 1000 bp, Homo Sapiens; identical to SEQ ID NO: 157810

SEQ ID NO: 466399 - DNA, 1000 bp, Homo Sapiens; identical to SEQ ID NO: 336583

SEQ ID NO: 466400 - DNA, 1000 bp, Homo Sapiens; identical to SEQ ID NO: 336584

SEQ ID NO: 466401 - DNA, 1000 bp, Homo Sapiens; identical to SEQ ID NO: 335735

SEQ ID NO: 466402 - DNA, 815 bp, Homo Sapiens
ttttttttttgatctgttctggaagctttttattgttgctccaagtttaagaattttcactgatggcagaaaaccaacacttttagacaatctcccgcatagccctgcccagcttctgaatcttggtcttgacagacatgtcaacatatttctcgccaatgcgcacaatcattccacccaagattgacggatcagtcttagcctccaatttcaatacttggccttgacttaggaagctcttgaggacagtttttaattcagagagtgtggcttcttctaaaggagatgcagaggtcactgtgcaaggtacctctccgcgatggacactcatcatggtagaaaaggcagaaacgactccttgggtattgcttaatcgaccattttcagcaagcaaattgatcagattggtagtgaggggagagaacctctcttttgctgtgatgtcatttaggcttttcactttaatggaacgcttcacatagggattcaaaacagaagcagccactttgggttccttcaggatttgtgctactctcaacaactccttttctacttgctccagcttattctgttttgatgcagcagaataaagagctgtggcatagcgaccttcaataccgtatacctgaacaggaggcctcacaagcttggcaaatggtctgaccacagaggtactgaagcatcgcacctgccgggagagcccggacactgctggggcagccatcttctcccgggcggctgtaggtcaaacccgagtgggaagagagaaacgcgcaagggcgcacgcgcgcgttggcgtaaccgctaggttctct

SEQ ID NO: 466403 - DNA, 1000 bp, Homo Sapiens; identical to SEQ ID NO: 336587

SEQ ID NO: 466404 - DNA, 1000 bp, Homo Sapiens; identical to SEQ ID NO: 336588

SEQ ID NO: 466405 - DNA, 1000 bp, Homo Sapiens; identical to SEQ ID NO: 157811

SEQ ID NO: 466406 - DNA, 1000 bp, Homo Sapiens; identical to SEQ ID NO: 157812

SEQ ID NO: 466407 - DNA, 1000 bp, Homo Sapiens; identical to SEQ ID NO: 157813

SEQ ID NO: 466408 - DNA, 1000 bp, Homo Sapiens; identical to SEQ ID NO: 336592

SEQ ID NO: 466409 - DNA, 1000 bp, Homo Sapiens; identical to SEQ ID NO: 336593

SEQ ID NO: 466410 - DNA, 1000 bp, Homo Sapiens; identical to SEQ ID NO: 157814

SEQ ID NO: 466411 - DNA, 1000 bp, Homo Sapiens; identical to SEQ ID NO: 336153

SEQ ID NO: 466412 - DNA, 1000 bp, Homo Sapiens; identical to SEQ ID NO: 336594

SEQ ID NO: 466413 - DNA, 1000 bp, Homo Sapiens; identical to SEQ ID NO: 157815

SEQ ID NO: 466414 - DNA, 1000 bp, Homo Sapiens
ccgcccgcccacaccacgacaccccccaaacaaacccccccccccaaaagcccggccccccccccaacgccacagcaaaacagatataaaatagacaataaattatagtttatatttacaaaaaaagctgtaagtgcaaacagttgtagattataaatgtattatttaatcagtttagtatgaaattgccttcccagtcacatgattgtgaaaaagacatttagaaaatattctaaaatttaatctgagcctcactttctacagggaaatcatgatttccgttcataaacagcatgctcatccccctaacaccattcttataagctgggcaccctcattttattttcttcgttggttctaaccctgtggcgtggtatgctgtatagtaaaaaggcagagaaccactttactgaaaaggtactagagccggcagtccagaagttaatgtgctggtcaaagaaccgttctggtaaagaagaggtgagcactgccttcacgtgttacacggttacacaccccttgtagcctcacctcagtgtaatcagtctacttttggtactagcaaagagtacagcaaatggaggattgaggtgtagaaatggtatgttttggctgaaataagtgtattttcacaccaacaaaactccagcacgaacatacaacagcaatgactgagacaagggcgccccgtggagccctggctgtggcctgggctgtgcgtcctgtggacttctgggaatgaactgaacagaggcgttccccccacttccccgatttctgttctctgtaaaatctacctttgatagacagtactgaaccagctgatcctttagccaagaatacatttaactcctttgagattattttccctatttactaacaaacaccccaaatagcttgatctacagctaaaactaattttggtgggtttttgggggaggagggtaggaagagcttcacggttatgtttctgcagttaccagaccttatgctacagaca

SEQ ID NO: 466415 - DNA, 1000 bp, Homo Sapiens; identical to SEQ ID NO: 336597

SEQ ID NO: 466416 - DNA, 1000 bp, Homo Sapiens
cataatttcattttgttgagacaacagttttgctcatgtcaccaggctgaagtgcaatgttgtgatctctgctcactgcaacctccacctcccaggttcaagcaattctgcctcagcctcctgagtagctgggattataggcatgcaccaccatgcccaggtaatcttgtatttttagtacagatggggtttcactgtgttggccaggatggtcttgaactcctgacttcaggtgatctgcctgccttggcctcccaaagtgctggggttataggtgtgagccaccatgcctggccaggttccatgttatgtgccaactctgcttcgtgacagccaccagagccccacattcagggttatgaggctgcttctggctcactatgaggagttggtagacagattctttggctgaaggttgtttggagatcaaaaagtgcagatagaaaatggaggcgcagataaggaagccacctacaaggcaggtctcttcacctccaggccagagctgagatccctgtgctgatagggaattctccaacttccagacagcctggggctgccctttgcgtacatgggagggtctcttcctctgcgcttgcacatggaggccctccctggtccaggtggaggggctgctgtcccgcagtgtggccccagcctccacccctgctgctggaccagctttccccaggcccctccctgggggtgcagcacgtgaactccagagaggcgcatccttgggcccatggggaggtggaaccactctgccgggctgtgcctgtggatggggcgggcgcaggatctgcttttaatgacacggtttgggcagctggactctgtctattccagcaggtaaattacaggcttagcaagtcagaaatcaaataaacactccaactcccagtggctgctccaaggagaacagcagtttccgagaacagcagaggctgagacaaacctctccacccaactcagcctaattactacttgtcactccctg

SEQ ID NO: 466417 - DNA, 1000 bp, Homo Sapiens; identical to SEQ ID NO: 157816

SEQ ID NO: 466418 - DNA, 1000 bp, Homo Sapiens; identical to SEQ ID NO: 336601

SEQ ID NO: 466419 - DNA, 1000 bp, Homo Sapiens
cctgcacacagcttagagtcggatacacacgctgggaggagaagcagcatttttccttgaaaagctagaatctgtcctctgcctgcttcacactacacccagtgaacgaggtcacactaatttcagacatctgtatgctcccagtgcccgggaccgttcccatcacagccagggtggtaagagaggtgtcagcaacaggaggctcaggccgctccgccttgcaacagaacaactgagctttaaaatgcttctggaagcttttgctcagccagtagagagcaaaggggtttacgcaagaattgctgaaagccaaaacccgagagaaaatggtgaaaatgaaatgcatggcagaggggtctacataggtttgagaagtgaatgaatggtagaggtacaggaggtgatttggcaaccagcagagggcaaacagagccaccaacaccaataccgttctggcaattctctttcgggattcaatctgcttacgggcatggctttgttcctcagtaggtatgttcagggtgcttttgtaaagggtcctagcaatcaaggaatagtagacagagataatagagagtggaataatgtagaacactaagaagcacagcagagaatgtatttcttgcaagagcttcttagagacaggataagaggtacatgattcaaatgtcatatttttattgggatctcgaaaagtgtatacatttgaaaatatagcctcaggtagagcaaatatcatagacacgatccagacgcagccagcttttacacaagtcttcaggatggcattggagggctgtcgctcaagtggcttcacaactgccttgtatctgtcagcgctgagaattgttaatgtgaacactgacacaccaacagaagtgagccggatgaaagagagcaccttacaaccaattcttccgaacagccatccttctgcaaggtagtgagttgcatccactggcacacaagttagcagaagtaaaagatctccaaaagccag

SEQ ID NO: 466420 - DNA, 1000 bp, Homo Sapiens; identical to SEQ ID NO: 157817

SEQ ID NO: 466421 - DNA, 1000 bp, Homo Sapiens; identical to SEQ ID NO: 157818

SEQ ID NO: 466422 - DNA, 1000 bp, Homo Sapiens; identical to SEQ ID NO: 336605

SEQ ID NO: 466423 - DNA, 1000 bp, Homo Sapiens; identical to SEQ ID NO: 336606

SEQ ID NO: 466424 - DNA, 1000 bp, Homo Sapiens; identical to SEQ ID NO: 157820

SEQ ID NO: 466425 - DNA, 1000 bp, Homo Sapiens; identical to SEQ ID NO: 336608

SEQ ID NO: 466426 - DNA, 1000 bp, Homo Sapiens
agaaagagataaaattattttattggttcaaataaactgaaaaaaatagacatacaaatcacttagttgtaattttaaagaattcctcaaactaaacttgaatttaagataagcttatgcttacagattactatttgctagcttactaattattatttgaattaagcagtaagaactaaaatttaagtttcttagttttacagattgatttgaaggcatgctgtcttgctaatattgaaataaatttatttcttaaaaattattattttaactggattatgtcagaagcagggctgtgttcttgaggaaggacaagtttcttctcagaatcatcaaaatgaagctctcactgttctgcccttcagaggttgggttgggcggttgttgtgctgcatggggacagcgttatcaccttcaacatttgatagaaggctgcggaattgtgccagctgctctgagctgacactgatgctctccttacagatgatccaagttacactctcataaagaggaggatgagtcagagagccagggtaggtccagaaatccagggatgaaggaaggagagtagaggggtcaaaatttgtgaatggggctcgtttgcccttggttttaattgcttggagggcatcaagtactttctgcagctttgggttggcctcaccaaccttcatcaaaacaccaataactgccaaaccatcagcctttgaggcagcttcagcaaggctggagtactttgcagaattccagtgagctacgtgaagctcggcagaatatttgactccatccactgtatgttctgaaccatgctcatttgtactgccccagtgaaaatgaaactgaaagagcctgtagctgtcagagaaaggaccacctttcagcactgatcggttatcgttgtcctcaaaatttacatggaaagaatgccccacattgataatttctttggctgtggctgggttgtaggagacactaataggtttcagagaggtgtcatgtt

SEQ ID NO: 466427 - DNA, 1000 bp, Homo Sapiens; identical to SEQ ID NO: 336610

SEQ ID NO: 466428 - DNA, 1000 bp, Homo Sapiens; identical to SEQ ID NO: 336611

SEQ ID NO: 466429 - DNA, 1000 bp, Homo Sapiens; identical to SEQ ID NO: 336612

SEQ ID NO: 466430 - DNA, 1000 bp, Homo Sapiens; identical to SEQ ID NO: 336613

SEQ ID NO: 466431 - DNA, 1000 bp, Homo Sapiens; identical to SEQ ID NO: 157821

SEQ ID NO: 466432 - DNA, 1000 bp, Homo Sapiens; identical to SEQ ID NO: 336616

SEQ ID NO: 466433 - DNA, 1000 bp, Homo Sapiens; identical to SEQ ID NO: 336619

SEQ ID NO: 466434 - DNA, 1000 bp, Homo Sapiens
tttttttttttttttttttttttttttttttttttttttttttttccaagaagccaaagccagttttatttcacaatcatctttattacagtaggatgatggtcctgggccaccagcctaaaccttgcagccttaggaaagacctgtgtcaacagggcttgcctccctctctagacaggggctcagccacctccagggcatccctgctgcattttccctgctggaggatggggcagagggacaatgggagaggagggcatgaccccaccccaggctatagcagctccttggccacaaagatccttttgccagtagcagaagggaggaaaacagcaaccaccagggttaccaccacttgtgggatggccaggcccccattatgtcctcttaaagttgtgctcaaagcaattaataaattaaaatgagccttcagcagcaaagctgtcaatcacacaggagaagctgagcagaaagcaaagcaaagaggaatttatagcttctctggctgaggcctaggcccctccctctaggagcagctgtcagcacggactacataggggcctccaaagtactgagaggagccatctagactattccccctcatatgtgtctatcatgcattaaattttagagggaccccaatccaaatgcaataaccctagaagggacaacacctttagaaggcactagagcattttggcagttgaaaacatgagagcccccaggggtgggggggggcgttcaaaaggaatgctggtgtatgtatccaattctgtcccatcagcctggcccacccccagctagagttgggaaaggcgctgctggtcagatgcagggaggaggagcttgactagccaccgaaatgcagacatggctggccgggccccttagtgcacactgcggggatgggtaggaccagatcccttgggctttgtgaagggggaacagacgccccttcaggcttagatgtggtgtggttcctggaggcagggaggtgggt

SEQ ID NO: 466435 - DNA, 1000 bp, Homo Sapiens; identical to SEQ ID NO: 336620

SEQ ID NO: 466436 - DNA, 1000 bp, Homo Sapiens
tttattgagaacatgtttcatgcaggcaagatccttcaccagggatgcatatattaaaaatacatgtactttgcattgaaggagctgaaaaattagaaggaaaggggggatctaaataactgcaatgaagaagaggaagtgaggagcacagttagcaaagtacggctaaaatgtggcgggagttcagaccaggaagagactgcttcccacttgtaagtcagggaaggccctctggagtaagggatatctaaaacaggcctgatgatccattaataggtgaacatgtggaggttgctaggaccccattccatctggagataaaatttgaatttaaaagtcccagaacccaggtcagaacaacaaatcctgcaaaattaaattgagcttatattgacaaacaatcattaatcagaaacaagcaaaaataacaaaatttttacaaagagagttgagaggacgtcatcatcacgatgtgttcaggtgtgtctggagcccttgggctgctggtctctcaccccaaaaggagaagggtgacgaggaggctcatggtgtgtcttaacagaaacagcgtttcctgaaccaaagcgcaagacctatcagaagaagtaaaggcactatcaccgccaagatgatgaagcccacggaactgtgatgctcccagtagaggacgatgtcctggccctctagactgctgtgcttcacccgacaggacaggtcagctgcctccccagcggccacctccagggttgcgcggagataccatgtcccatcagcactgggcaagatgtcccctcgctgagtgccctgctgctcctgctcaccccgcatccacatcacccacacgggctttgggtagaatcctgagacatggcacacaagctgcagatggccagggccaggactggggccatgggacagccaggcctcgggcttcacttgccgctggagatgtgcctttcctgcatcaagaagacccaagatgaaacgtgggcaggtgtca

SEQ ID NO: 466437 - DNA, 1000 bp, Homo Sapiens
attttttctaacattttaatgtgtgtaaaatcagggtgaatcacactgttagtacagtctcataataaatttacagttttaagtacttttttgctgatgtttaaataataatttattttaaaatacatgaaaactctgatttcatcaaatttgaaaatcatttgaaatatgataagattgatttttgggctgatatcttgggcttcttggtagcttattgcgaatgggagaggagacatgatgatggctcatgggatattctgatatgaccggcgcctcatataccataatgcaaggcatagcaaaaggagcaaggaaggcactattattgccaaaacaattgagccaatggaggtggggtttctccagtagaggatgatgtcctggccctctaaactgctgtgcttcacccgacaggacaggccagccgcctccccatctgccacatccagggttgctcggagataccatgtccagttagcattgggcaggatgtcccctagctgagtgccctgctgctcctgctcaccccgcatccacatcacccacacgggctttgggtagaatcctgagacatggcacacaagctgcagacggccaggtccaggactggggccactggacagccaggcctcaggcttcacttgtctttgcagatctgcttttcctgcattgaggacgcccaagagatatcgggggcaggtttcatagaggagaattctcacagtttccatgataccttgatattgtatgattagtgcacagaatttctgtgccctgctgccaccttctggggaaggcacacatgaagcattcttgacactcaggaaatccaatcctcctagagctcccctcaggaagcttactatggcacctccagaatgtagctcacagcctgctatgccctggatctcaaaggggtatttcatctggaaatcaccggcaaagtcttgtacttctcgagcgaatccaaagatgtagactcggaatatctcctcta

SEQ ID NO: 466438 - DNA, 1000 bp, Homo Sapiens; identical to SEQ ID NO: 157827

SEQ ID NO: 466439 - DNA, 1000 bp, Homo Sapiens; identical to SEQ ID NO: 157828

SEQ ID NO: 466440 - DNA, 1000 bp, Homo Sapiens; identical to SEQ ID NO: 336624

SEQ ID NO: 466441 - DNA, 1000 bp, Homo Sapiens; identical to SEQ ID NO: 157829

SEQ ID NO: 466442 - DNA, 1000 bp, Homo Sapiens
tttttttttttttttgacattgtcataattttttattatgtatcaaattgtcttcaatataagttacaacttgattaaagttgatagacatttgtatctatttaaagacaaaaaaattcttttatgtacaatatcttgtctagagtctagcaaatatagtacctttcattgcaggatttctgcttaatataacaagcaaaaacaaacaactgaaaaaatataaaccaaagcaaaccaaaccccccgctcaactacaaatgtcaatattgaatgaagcattaaaagacaaacataaagtaacttcagcttttatctagcaatgcagaatgaatactaaaattagtggcaaaaaaacaaacaacaaacaacaaacaaaacaaaacaaacaaacaaaaaatcccaccaatcttcatgggtaaactttcctgctcagggatgtaagctgactctagaccatctcgcggttcctgcggatagcacagcacaagatcatactgaagatcatgccaaatatcatgaccacggcaatgccgatgcccactgcgccgatgatgtggaatttattgtcgaagacctctttgatggcatcaggacaggacttcacggtgaaggtttcgagtacgtccttcttggggcagatgtctgagataaactgttccacgcccccagccaaaccacagcagttcaacgcatagtggatggctttcagcgtttcccgctggggctcatccttggttttcagcttgttgtaggtgtccttgtaaaactcctggacttccttaatcacctcatccttgtgggaatatccccagatggccgcagctatttcaatggcgaatatcaccaagaggaagccgaagaacagtcccagcatgcactgggactcctgcacagccccgcagcagcccaggaagcccaccagcatcatgagggcgccggctccgatcagaatatagactcctgtgtagaagctggaattattattattagtttcttgctc

SEQ ID NO: 466443 - DNA, 1000 bp, Homo Sapiens
ttggaagagctcattgagtttatttaaggaatacaaaggggactggaagtgtcactggcatgtatacacacacacacacacacacacacttacacacatgcacacatcctaagcaacattgctccagaggttggcatcatctgctcgaggtcttcagatttcagagtcaggtgtgaatcttggggacttgaggagatccaggctggccacctgaggatcacctggtgctccaggtgcccatgcggccccctcctccccaggctgggtctggcccatcgggattatccatgttctcataagagtctgcatcttcctcatgattgggtccaggctggccccgaatggagcggagctggggggctgcatacaggattcctctcatatcctcataggactgggaccccagggaggttgcttcccggctggggtcccaggctgacccatgagggctcaggaagtccattgtcctggcgaccggctgggtcagctcttcatcctcgttctcataagactcagcgttggagaaggagtcttcatcctcaggacccaggggctcatcctcagggttctcgtagccgctgccatcctgggagagctggtcctgcccaaggttggagtcgttctcatagaactcggagtcctcctcactgtcaggttcctcatagccctccccttcctcttcttctgggcccactcccggcgggctccgggaccccaaggctccatccgcctggacgtcgctgctcgggtttccataagacggggcagtgccccccaggcctgcggcccaacgctgggcgcgtccgaggcctgaggtgggtgtggggagagacagcacgttcccgtactggttctggggcccgcttcctgggggaggcgtcactttgaagaatctcctggtggggtcagtcattcgctttcttttcctcctcaggaccagggctctttgaagatgaagaatgcccacaagggaacacaggcagaagatcagataagccaa

SEQ ID NO: 466444 - DNA, 1000 bp, Homo Sapiens
ttttttttttctttgaagtggcatctgagccatttttattgtgagctctgtctccctggcaggttaatccacaccagtgtgtccatctcaaacccggagtccccagagtcaaggggccgctgatacgtacgtctccccgtgcaatgcctcacttccaaaggagaagccaggccaggactgggcccctttctacttcgtttctgtccttttctgggctttccctcagaggcagaaactgggcataatattcgtgagtggggatgtcagatcaggggtagagggccagagagatggagaagggaaggaaaatgacgagcagatccagaggacacagcagctccgggtggagatggccagtgggctggtggggcaggggaggtgtgcatgtcagggcaggtatttagatgatttctgggtagcaaggagagtggaagagaacaggggcaggagttttggaggtttggggttaccctcaccaaaaagactggctctgagccaggcacaaggttctccgcagtgagtgtgtgtgtgtgtgtgtgcgtgtgtgtgtgtgtgtgcgcacatgcacgcaggaggaagccatgtggcggtgtctggggaaactcggggacttccctggcccccgctgcccccagtgcctctgctgcagcccatccagtgtcaatgtttgaggatcacatagtccacattttcttgtgcctgaggccgctccccgaccccaaactggatcagctctgagtaatgaatcccctcatcttctggaaaatctggaatgacgttctcatagtcgcccacttggcgcttgtgcaatgctgaataagtgaccgtgtcatcgcaggtccggggaggtctctgcatctctgaggactctgcatctccagttcgtggtatgttcatctcgggaaagcgcagggtggtgtagctaatgccatcttccatcattggattgtagcatcccagggagtgggggccttcagagaggggggcccttctaaccttt

SEQ ID NO: 466445 - DNA, 1000 bp, Homo Sapiens
ttttttttttttttttctggtgttttccatgtgtacctttatttaatgctcacagcatccctatgagataggacttcttatacctacttcacagagaagaaaatggagacatggaaggttaaggagcttgtgtgacatcatacacttagcaaatgaaagagcacagatttgattccacgactctctgcttgcaaagtctaagatgatgttaatatagcaggaaactcacataatgtctataaacccattgcctgtggggtgttaaatctccaagaatcagcctttggtccccgacctgtagaggatgtggatcttctagctgagcctgatgctcttgtgggttcctcactgggtcctgacctctgagtattcggtggaggtgtccttggaaggattcatcccatgaaagttgagggaagcataatgcagctcctcatccatctccacagtaggggcggcacctgaacagcttgaggtttcagtggggccatgtaacttggacttcttctggtgtttcggggaggctgaccctgtggtagggtgggtgtcattcctgcccactgctgtcctggctgctttcctcctgtgggtcttcactatgaagaagatgaggcagagacaaagagcgagcagggctgtaacaccagctcctccaatggccccatgaaccactcctgctctggtctcttgtttccctgagccatctcctggaaagataccagttgttgggttctgtggaacataggtgacgttgagctggatggttctctccgtagtcacaccagctccagcgaacttcacctgacaggtcaggttggtgccgtggtcctggggccgtggggtgattatgagcaccgaggagtgagtagtcctggggcccagggaggtgggggcagctgacaaccaggagaagatcgggggtgttccctgctcacaggcccaggacacagagcaggtcaggtttttggagtggccgggttctagagtgccagggatgagg

SEQ ID NO: 466446 - DNA, 1000 bp, Homo Sapiens; identical to SEQ ID NO: 336626

SEQ ID NO: 466447 - DNA, 1000 bp, Homo Sapiens; identical to SEQ ID NO: 336627

SEQ ID NO: 466448 - DNA, 1000 bp, Homo Sapiens; identical to SEQ ID NO: 157832

SEQ ID NO: 466449 - DNA, 1000 bp, Homo Sapiens; identical to SEQ ID NO: 336629

SEQ ID NO: 466450 - DNA, 1000 bp, Homo Sapiens; identical to SEQ ID NO: 157833

SEQ ID NO: 466451 - DNA, 916 bp, Homo Sapiens
ttttttttttttttttttttttcttttcggtctgaaaaaataatccgtttaattgaaaaacctggaggatactattccactcccccagatgaggaggctgaggagaccagacccctacatcacctcgtagccacttctgatactcttcacgaggcagcaggcaaagacaattcccaaaacctcgacaaaagcaattccaagggctgctgcagctaccaccagcacatttttcctcagccagcccccaatcttctccacacagccctccttatggatcgccttctcgttgaaattaatcccacagcccacagtaacattaatgcagcaggagtcggggactcggttcttcgacatggaagggattttctcccaatctgtgtagttagcagccccacagcacttaaaatctgcctgcatcctgtccaggatcgaagcagtgtggttgtttttcgggtaattctccatctgctgccggaagttgttattaaactctgacatcaccttatctctaaacacatagccagcaatggctgcggccacctccaccaacatgataagagacagaaagatggcaaacgtgatcataagacaatagttctccttgcaggccccgcagcagcccacaaaagccaccaggaagaggaagacacccactgcgatgatgaccactggcaacagagagccaggggtagccccctggattatggtctgactcaggacaagctgtgccccgacacccacggcaatcagtcccactgcacaggcgcaaaaggccagcaggaggacgtagagcaagaacttcacacatttcattcctccttccaccgccatggctgccgggcctgggcttcccaaggctggctgcgcgttcctctcccgccgcggctccggggctctctagctgcgccccccggcc

SEQ ID NO: 466452 - DNA, 1000 bp, Homo Sapiens; identical to SEQ ID NO: 336633

SEQ ID NO: 466453 - DNA, 1000 bp, Homo Sapiens
tttttttttttttttttttttttttttttttttttttttttttttttttttttttttttttttttttttttttttttttgaagggtttttgtttgtttaatacatctgaaaagaatgcatatacaaagaattgagacatgagaaagcattggttcaacactaatgcatctacaagaattaggtttgggaaggtgggaaagattacctcaacatttttaaaaattggaaactgcaaccaaaataagctgaaaaaatccctattaacacttaagaagagtctgcattaagagtctttccatgatttttattaaactagagagcctcacctggctgctctagggttcctcatatgcaaaacagaaataaggggattcccctgactggtccccatgttgttaagtgttctccccacccccaccctacccccagcttcttaatgaagcaggcctccatcctcctaacttgagaggatgtgaatcattccacagatgtctgtcttctagcaccacccctcgtatttcctctacataacaggtcttcagctgcattctaggaacaccatatactactgagctgcaaatctatgctaagcatataagacaatgactgaaagggaaaaaaatttttttaattacaaactcaattcatttggtgcatttcaaaggtgcaatacttttcttcatttatcagtgaaagaagttagaaattaacttcccaaaaaaatcagcaaatggcaaacaaatgtccttgaaagtcacagtcacatatagtgcgtcctagaaaagaggaggggcaagatgggctccacccactttcatgagtttcatcaaatactggatctactcaagggtggagagaaaaggcaactttcaaaaaggagtatgttattaaatgaggcatttactatactccttcctaagagcaccagatggggaacatgttttctaaactagatctaggaagtggaatgtggaatcaatccgtcctcctccccttaagg

SEQ ID NO: 466454 - DNA, 1000 bp, Homo Sapiens; identical to SEQ ID NO: 336635

SEQ ID NO: 466455 - DNA, 1000 bp, Homo Sapiens; identical to SEQ ID NO: 157836

SEQ ID NO: 466456 - DNA, 1000 bp, Homo Sapiens; identical to SEQ ID NO: 336638

SEQ ID NO: 466457 - DNA, 1000 bp, Homo Sapiens; identical to SEQ ID NO: 336639

SEQ ID NO: 466458 - DNA, 1000 bp, Homo Sapiens; identical to SEQ ID NO: 336640

SEQ ID NO: 466459 - DNA, 1000 bp, Homo Sapiens; identical to SEQ ID NO: 336641

SEQ ID NO: 466460 - DNA, 1000 bp, Homo Sapiens
tttttttttttttttgtgttcaaatccactttatttaaattatttggtaattttagcagtacaaaatctttgactatgaccatgggacacagacatgagtttatgttttggtttgttgtggtctggggatcatgtacttttctaaatcctctgcacttcctttcattaacaaatggcagagtgccgtaagttcctctattattcatagaaaagaaatttgtaaggtaagactgaaaaaataaaatctacagattcacaaaattatcttccaatattaagaacatacaaagtatactaaagacatctacatttagtcctccaggtaacaaagcaaacatttgacgtttgacgtttctgtttttacttcttgctaattacagttcagagaccaaagtatttccaaaagctatgaaaaccctcactgacgctcctagtatggatttaatggaattagaggatagaactatgagagcacttgaaaacttgcctttaaaaatcacaagactttcttttcctcagtgggacttttcttctgcagtagctgagggcactatttgcttacttaatgccttataattagcatctgccttacagtagatctaagtattggcttatttaagtatattactggatagcacgtggtaggtagcctttttgtccaaggcaaacatacagcgaaccttaaagtaaaacctcagagggtttggtgccccttagttgttctccagcgagcccgaagttgcatttggagttctgattccaaatttactatggaatgtcattgtgactttgtttttatgtcctgttctttgatcaaaggcatggcatgtatcaaaaggtggactgtacaagtgaaggctcacagcaggttccgtatggctgatgttctctactcgatgtaagccaatggaatcattgatgtaggcacactggttttccctcaagactctttcagacttcttgaccatctcattggattttttgtcaggccaggcaaata

SEQ ID NO: 466461 - DNA, 1000 bp, Homo Sapiens; identical to SEQ ID NO: 336643

SEQ ID NO: 466462 - DNA, 1000 bp, Homo Sapiens; identical to SEQ ID NO: 336645

SEQ ID NO: 466463 - DNA, 1000 bp, Homo Sapiens; identical to SEQ ID NO: 157838

SEQ ID NO: 466464 - DNA, 1000 bp, Homo Sapiens
cgaggaagggtcccctttattcagatcctttccaagtgaccccaggtgggccacaggcccattcactttccctgcaagcccccgctttctgcggtgatgagaggcctttgtcctgacccacccagggcctagggcaggctgtcgaggtctccagatattcatcagggaccccatccctccctgtccccagacaccagtgtcttctcaggacttatagctggttctctggctcaggcttcatgtccttccccatccccagggctgggggccttggggactctccatcaacccacaggagcagctcctggaggaagctaagaagccacttctcatagatggaagctgctgtcctggggttgggtaggggggcctaggcagtggagagaggggacatcgagaaggcagagctgtgggagggaccacggccttccagttttggcaaggagcaggaaacacaccagcgcggccaccagcgccactccgaccaggaccccggtcacgatgccggcgacggcccccacaggaaggcctggggcattttcttggtatacatggaactgtccagttgcttcttcattcacaagatctgactttatgacttgtagggtgtagaatcctatgtcattctgggtgacattctggatcagcagggatgcattggtgtatattgtctctcgaccgctgtatgcggcccctggggtagcttgttgagttcctattacatatcccacaattagactgttgccatccactctttcccctttgtaccagctgtagccaaaaagatgctggggcagattgtggacaagtagaagcacctccttcccctctgcgacactgagcggcatggattcaatagtgagcttggcagtggtgggcgggttccagaagtttagaagtgaggctgtgagcagaagcccctgccaggggatgcattctctgtggggaggggctgaggggggccccatggtctctgctgcctgctctttcctcctctgtg

SEQ ID NO: 466465 - DNA, 1000 bp, Homo Sapiens
tttttttttttttttttttttttttttttttgatcagccaatagggagcaattttattatctagcattgcatgcctgggttaaattaaaacagacagtgagaacaagtgagtctaggagtctgactctaaaagagaccatagtacatttgaacaaagagttgtgttaaagatgctgttactgtcagccattgggtggactaaaggatctcatacgtaaaaatttggggttgacacgatagattagacactccgttaatctatcattctctgtattttctcaaatataacatcccaatcaaagccttggtaatataaccaatgttttaaactatatcccattataaagacagcagattctcactgaacttgtgcaaataactgaattaccataaacatatgaatactcatgaatagttgcccagttctgtggcagtcaggtagggagcaaaagtaaatgttataatttttgttcacaaaagtctgctttaccaaattgcagtaaggtatagatagcttaaaagataaagaaattcataaatctgaaaaagaaaacacttaaagaattggcaatttttcaaataaaaaatcttaaaaacgggctgggcgcggtggctcacacctgtaatcccagaactttgggaggctgaggcaggcggaccatgaagtcaggagattgagaccacagtgaaaccccgtctctactaaaaatacaaaaaattagccgggcgttgtggcaggcgcctgtagtcccagctactcaggaggctgaggcaggagaatggtgtgaacccaggaggcggagcttgcagtgagttgagatcgtgccactgcactccagcctgggcgacagagcgagattccatctcaaaaaaaaaaaaaaatcttaaaaacattatcctcattattatttagttcaatgaaattcatgtttttttccttctgtgttttggtgggcaacttcacaaaggtatcagcctgtttgcaagttcatagacagtc

SEQ ID NO: 466466 - DNA, 1000 bp, Homo Sapiens
ggtctcaggtgaatcttttattatttccaactgagacaaacatttttccaaagacagtagcacagtcattgtcataagcatgttaatatgtctattttgcagaaaagaatatgctacaagtcatgcaattcacattttcaatagcattctgacagaaattaaagacaattccaattgtgtcaaacatttaatgaatagtaagttctactttctgcccttgggtatataaatggtgtctttcagtgaagtggtgaaaaacagatcatgtgatggctgcttcttaacagtgcccaccgctccaatgacagtcagcccctttggctgaatttctcagctatcttctgtagttccaaatccattgcagccaagttttcgagttcttttttctcgtcctctgtcaggactgtctggtcagccctgtccttttcattttctgcctcctggtgggtgctcaccggctcctcagaatcatagaagtctggaaactcagctgacttcttcctgtagtgaaggagctggtccagttgggccaccctgtcatattgccttttcaggtccagcttggggaccctggcgaggtttctcttctcatacccccagttcacatcctcagagaagggctttttctcccaccagtcatagttgtattctgggaagaaattcttctcgttcaaggtcagctcattttcctcctcaccctcgagaaaattgtcattcatgttgtctcttctttcaaaatggctgctcttccactggagagggtcgtagtatgggttgaacagttcccctaatctcttcctcttttcagctgtgtgatgggagctatattgtttatcttgaaacctagcttcctccctgttttctttagtgtcctgcaggtctccctgctgctgccacttccctggggctccttcctcaccgtagttgagataatttctgtccagctctttccacgcaccttgtggatgcctccttgccttgtccatctggttttcttgga

SEQ ID NO: 466467 - DNA, 1000 bp, Homo Sapiens; identical to SEQ ID NO: 336646

SEQ ID NO: 466468 - DNA, 1000 bp, Homo Sapiens; identical to SEQ ID NO: 336647

SEQ ID NO: 466469 - DNA, 1000 bp, Homo Sapiens; identical to SEQ ID NO: 157839

SEQ ID NO: 466470 - DNA, 1000 bp, Homo Sapiens
ttttttttttttttttttttttttttttttttttttttttttttttttttttttttttttttttaaggccaccaatgcttttatttatcgctttgcgtggagacaaagcacaagctccgagtgtgctgggagctctccattaactagagctcctggttggggtggagctctgggaaaagaagaggaccctgccagggagatatttcattggccagaatccagaggatggagcccattggttggaactctggttgaaactggaactctgagaagggtggagagagcccccaggtgggactctgggacagggggcggggcgaggagtgagggagcaggactctggtgggccaggccctcccactggctgggttccagcagtcggtggcaggtgggcaggcgcctacttctgggcggggatcatgtcgtcaatggactggcctttctccaacttcttctccatttccaccatgagcttcacaccatccaccaccagctgcacctgttctacttcggacgagcccagccgatcagcgttggacacgtcaaatactgagcccacggcagctgtgtccacgccacctgtacccctcttctgcagacgcaggcgggtgaggatctcctcgaacttggggtgcttgctcaggtgcgccagcttcacatgcacgcctccacgcagcccagtgcccaggttggatgggcaggtgagcacgtagcccaggtgctggttccacatgaaggggtggccagctttcttaaagatctcctcaatcttctgcagccctacgcagaagcggcggaaaacctccttcatgttgccccccttctccatggagatgacccggaggtgatcctcctcgttcacccacaccaggaagctcttgttgtcattgtgccagatgccacgggcgtcgggccagtcgcgggccatgcctgaggccagcagcagcggggacacgggcttgtcgaacaggaagtggtcatcgatgagctgctgctgctc

SEQ ID NO: 466471 - DNA, 717 bp, Homo Sapiens; identical to SEQ ID NO: 336650

SEQ ID NO: 466472 - DNA, 1000 bp, Homo Sapiens; identical to SEQ ID NO: 336652

SEQ ID NO: 466473 - DNA, 1000 bp, Homo Sapiens; identical to SEQ ID NO: 157840

SEQ ID NO: 466474 - DNA, 1000 bp, Homo Sapiens
ttttttttttttttttttcatatgaaagttcaaaaaaaatatttatttataaaaaatacaatgggataagtttatgctgagaaatgcagcaataaatacagttgaagaaaacagagcaactctacattgatacattggcacaaacaggaagagcaaatgcatcacccaggcctaaatgtccacaggccacttttgtacatgctcttttagaaacaccactctgaaaagatcttgttcgctaggtaagagaatgagtacacatataatcacaaatgcacactgatcatgactttatttaaaaattagcaaacaatactgtagaaacattgatatgtaaatttctaaaatgctgcatcttaaatttagttggcaaagaccacatttagcaataagcatgagtttagtcttccatgtagaaaccagatacactaaactgtaaaaaaaaaaaaaaaaaaaagtttcctattgtttgaaaataccagtttaatataagattgtaaaaatgcatagatttttgcataaaagaactggctgtacaagagtactcccctttcacagtattcctttttacttcatatgcgagttattgattatgctgtaggatttaactattacagcactaaaaggcaactattgagggaagaggcagaaaaaggaaaaaggaatgtacgtaaggcaatttttcttaaaagtacaataagcttaatagtgttttaggaagacaagataaaaattactcaaggctagcttggttctcactgaataaaaacaaaggactaaatactgagctccttctgtgtggatctaataatcaatgccttggtcgctatattggtaatctctggggtagtcatcctggtactcgccatgatactcatcagggtattctgcctgataatcactatcactgatttccgaaccatttgttcctgttccttggcttccgttgtgaatgacaggttctgtaggagcagcacagtatttgggatcatatacttgc

SEQ ID NO: 466475 - DNA, 1000 bp, Homo Sapiens; identical to SEQ ID NO: 336655

SEQ ID NO: 466476 - DNA, 1000 bp, Homo Sapiens; identical to SEQ ID NO: 157843

SEQ ID NO: 466477 - DNA, 1000 bp, Homo Sapiens
ttttttttttttttttaaaaatattcagaaccaagttttattttgtagtcgttacacaggagggggcagtcagaagagtacagctcacccccagcagtggaggggttaaatctcagggacaacgtggggcagtggggacagcacctccgaccctatggggtgtaccttcaagtagcaaggctgacagtgatgtctagaagggtctccacttctgcctgagttttgccaaacccagtggtctatagggatgtggcaaaagaatgacctaccgcagtgtgattatcagtgttttctaaaataaagagcacggttttgcctttaaaataattcacatcaacggtatttgggagaacatggagctggcataacattggcgtagaaagcagggccaggcccacccacggggccctcgtgtggggacgggtgcctgagcccctgagcccctcgagcctctggccacggctggctgcctgtgtgctgttgtctcgtctgtcccaccccgagaagggagttgaacaatgtgagttgtctgtggcattggaaagtgcagtggttacatgggtgtgtgcgaagtggttagctgtgccttcaggcggtgcgtctagcagggctgatgggggccagggctgctcctggctttctgtgggcagggcttgccctccagggaccccgagtgcttgcacccgctcggtgacagtggctggcaggtctaagtgctgctgctggatgcaaattcctttggtagacttttttttttttaagaaaaaaataaagccaatttttgggttggcacctgaggtaataagttaagaataagcaccaaaatggcccttcctggcacgcgccggctcacaggttcttcatgcacacctggcagcggctgatgtgtgtgcggatgaggccggccttgagcgtgtcggcggagggcgagccctggaagctctgctcgggaatggtggtcagccagaagctgtacttgttggcgtagtagtggcaggtg

SEQ ID NO: 466478 - DNA, 1000 bp, Homo Sapiens; identical to SEQ ID NO: 336657

SEQ ID NO: 466479 - DNA, 1000 bp, Homo Sapiens
gaggagtgaaaacctttatttggaaaagtcagcaacatggatatggttcagaaaaaaacacagaaggagcaaaactaacatgaacatagaaagggggcctttgataaaacgtcgaacacatcactattctgaggaaggagaggtttgcgttgtttctagtaagacacagccctctgtggcaccaaggggctctcatgtccagtccaggccccagtctctgcgggagggaggagcagacggggttagcaccgttaatctcgagggtcttgagtgcagccagcgcccctgcgagtactctctgaggtcggggtcagtgctggtcagcagcggcctccagggctgtagggccaaggtccaggccggtcaccagcaggaccctcaggagacggggccgagtcgccgagatttatgtctgcaacggcctcctgaccttggtttcccaaaacgagacagaggccaatggctgccccaagctgaggagaagagcttgctttgagtttaattgtaaagtaactgttaggtgaggattggtgggaaaaaccagctatggggacagaggagagggaggctagtgcggcacaggccccgagaggcgtcttgctcaggctggtgggatgcagcacagaggtgcctagggaaggagctgcgcaggcaggagggagggcgggcaggagggcagggcaggagagcccggggtggggaacccaggtgaggccagctcagggctgagccccagagggccctgcacaggtgacgccagctcagggctgagcctcagagggccctgtgcaggtgacactagctcagagctgagccccagagggccctgcgcaggtgatgccaactcagggctgagccccggaggaccctgcacaaagcaggcagcagcgttgtgtcctggctttccaagcttgggctctgtttagtgatgagtggggaggggtgggaggacagggtttggtgccggcgtgcagggtgggctagcccagcgccaccttcc

SEQ ID NO: 466480 - DNA, 1000 bp, Homo Sapiens
tttttttttttgggttcaaagcctttattgggtcagggcttgctccagagctcaggggccaggtaggtcaggagccttgggatggctgcagggggagggaggccgggcagcctgcggagggcctggggagacctggggctgggcgggggccggggctacggggaccccgtgggaggagctggagaggtgcaggcccagggcgtcgtccgagtgagcagcggtgctggccgtgtgggacccgggcccgcttagcaccatggacggggtgggctcacgaccctcgactgcggggcccgggcggcggcgctagcagatccagcggatgaagcggtcgaagaagccgggttgcgccaggctgtcatagtccttctcgtggaacacggcggcgcggtcacccaggctgagcgtggtgagcacgtccatgtccacgtcgctgcccaaggccagcacggtgggtaccacgttctgcttgcgcatggagtgcgccgactcgtgcagactgtcgttgcccgtgacgccgtccgtgaggaacacgaaggacagctctgcgtgcctccgggccccgccacgcgggctgcgcacgatggcattgatggcgtgcaccacgcctgcgcccacgtgcgagaaggagttcaggtattgtgtggtctccagcgcctcgtggatggcagtgaggttgtggctcagcgggaaggccacctgctgctcgccggggccaccaaactgcagcagcgccacgcgtgcgttgagagggtcgtcgtccctccgggccagcgtcagccgccgcgccacctgctccacgaagcgccgggccttgtggaagttctgctcacccagccgctcggagccgtccagcaggaagacgatgtccacgggccgctgcgtgcactgtgccacggacagctctgtttggcagggaaggtctgggcacacgatctgagggtccgggcagaggacgtcctccatgtcatcgatgaacttctcagcgaccaggtcggag

SEQ ID NO: 466481 - DNA, 1000 bp, Homo Sapiens; identical to SEQ ID NO: 336658

SEQ ID NO: 466482 - DNA, 1000 bp, Homo Sapiens; identical to SEQ ID NO: 246422

SEQ ID NO: 466483 - DNA, 1000 bp, Homo Sapiens; identical to SEQ ID NO: 336659

SEQ ID NO: 466484 - DNA, 1000 bp, Homo Sapiens
atgggagagaatttactgtacattaaattctttattttttgttactctgtagccagtcattaatctgaaggtttaatatatcattttattgggatgagatcatagtctttacacaaatgctatgtaaacaagttactgaatatttttcacctcgtggagttgtacacaaccttttatatatacacaccctaccttctctcaaatgctgggcttacaggtttattagctagggccttttgaggtatgctgtcaggcgacagcccgatgagggtgctcgctggcaaggcccgcgcgtccagtcggcggccgaggggcagccaggggcgctccctctcctggacgtcacccgcctgccacacccccgctccttcatgaccgtccactgtgcttcgggcgtccttgtcacttgcttcctcacgttgaattttatgagcttcgagagcctgatttctccccgacccctcctaacacggctccttggcaggctgaggtgtcgcagatccccggtgtcccctgggccccaatggcacctggaagcccaggatctccgggaggcccaggctcgccgggagcaccgtcctggccgtccttgctggtgccgggcacgccttggggtccttggggcccctggtctccttcaggcccgtccagccctgctcctgccgcgcctttgtctcctctgtcaccctggtttcctctgggcccggggtctcccagctccccagtgggaccgcggtatccagggggtcctcgagcgccagggtgaccaatggagcctgggggtcctgggggcccaggggggccagctggaccgggccgaccaatggacccgggtgccaaaggcttccttaggtgcgcggctaactgtgcaatttgttcgctgatcatccccccacacagctccctgatgcgctgctcgctggcctccttccccggaactcccggcttccccgtgatgccaggaacacccgggacgccctgcaggcccagaggaccgggg

SEQ ID NO: 466485 - DNA, 1000 bp, Homo Sapiens; identical to SEQ ID NO: 336660

SEQ ID NO: 466486 - DNA, 1000 bp, Homo Sapiens; identical to SEQ ID NO: 336661

SEQ ID NO: 466487 - DNA, 1000 bp, Homo Sapiens; identical to SEQ ID NO: 336662

SEQ ID NO: 466488 - DNA, 1000 bp, Homo Sapiens; identical to SEQ ID NO: 336663

SEQ ID NO: 466489 - DNA, 1000 bp, Homo Sapiens
atatttactaaaatgtatttgtttttaattcccaaagcttacaaccatcttttcatctaatctgtgaggtatttagtatacagcagtgattttctctctttccttttttataaagtgaagaggttcaactatccagagagtcccatctaactcaaaaaatgtaatggctttggttggattgcatcttcagtcagtacctgcccatggcttaatcagtattttaagtgaatgaatcatgtttccccactagatcattacgagtaagcagtaagtaataaatagagaatattaagtattgaacattattagatgcagctttttgttctgcatagaagaaagatgaggataaaggagggcattgaggccacgaagagcttcccagacacccacggccatcagatcatcttcttcctgcaggcagtgccttctggtggaaggagctcagtcaatcagagaataaaccaggagcctgaaagcagtcctgtgtctctgcctttaatcagctgtcacttattctctccccaagaaagggaaataggtctcagcagtttctgccatccatcatgaatcaatgaaatcatttcattaaaaatttttttgtatgaatgtgcaaaattgccaactaggagttcaatgggaaaaataaaaaaaacttagtttgtcaacatgatccatagacgagatgatcttcatgtgttccaaaggcagaaaggtgagaaaaaggatctagcttggtctctgtccctcaaagacagaagaggtcaggaagtccaatgggcgatgctcctgtagataaggcacaaagcaggagagctgagggtgtccaggttccatgccctgcatcaccaagaacccttctccctggcttgaaatctttggaaattcctggtttgagtcacagagaagcattgtcatgggctcagtaaccctgccacccctgttatctccattctccctttggtcacagcagctgtcttaagacacaagaccatgcctgggc

SEQ ID NO: 466490 - DNA, 802 bp, Homo Sapiens
tttcaggtaaactggtcatttattagcagtggtacaactgtttggcataacaggtttccagtaaataggcatggagttgcatggcggtgacagagccaggcgcaggtgcaggcgcaggccagcatctctcacttcttccactcgttcttttcgtagtcccacttggaggctaagccctggatggggttcaccttcatgtccagcatcctcttggtctgcttggccacccactctttgtcaaagctttgcgggagggggccgtacacatagtgcttctgccacatgataacgagcgcggtgaaaccgatgaagaacatggcaccgcccacaaccgtcttccactcgttcgagcccctgttcatctcagcaaagctctccttgaacttaatgcgatacaactcgactttctcatccatggagaggctgctccaggaggccttctccttctccttcagtgccttctggctggcagacaggtgcttgacatgggccacctccggcaaggggtggtcacgccgatccatataagctgggagcgaaaagtcttcgctcttcacaacactttcatgagctcgtacacacacagaggtggaaattgctcgcttgccaactaggctaaataccctggtagccaacattctgccgccactgcccgccgcgaccgccctctacacccggtgtcccgcgaccggaagagagcaaggccgcgccgcggagcaccacgggatcgaggaagactccgcccgcacccggccgcacggaggtcaccgtggagcggaaaagggtagcgctgcgaacgtcg

SEQ ID NO: 466491 - DNA, 523 bp, Homo Sapiens; identical to SEQ ID NO: 157844

SEQ ID NO: 466492 - DNA, 1000 bp, Homo Sapiens; identical to SEQ ID NO: 157846

SEQ ID NO: 466493 - DNA, 1000 bp, Homo Sapiens
aagtgcattttattttattgtattagcacataaattgatgaagccacatggtgaaaatctgtgagaaactgagggttttcatttgttttctgtgccccactgtatatcacctttcaaaataatgctttctgctgggtccaaacttcacttggagcaaagaaaggtagttaaaaggtttcacttaaagctacttcgttatggtgctactgaaagtaagtaaaagcaaacagcagtaacatgggacttaaatgagcaagagaaggattcaggtgaaatagaagctgcatttggggataactgaagattgactttctgatgaaaggcacaaaaaaggattaattggcttattccaaacagagggcagttctttaggaagtatgcttgaggatatacttggcaataaatttgacagctagcatggtctctctgcacgttggctttatccgggattctggaaggagaaaaccaaatttgcctttatctcggagctcaaaggcaaatgtgtgtttgatgcccaggtcataagcccagtctaaagaagaacctgatatcgggtaaattgttgattctattgggccatagatgtagcgggtttcatatcgagttgatagaacatcagtgccaatctttgcaactttggccaagtcctcatggttaggtggcagttttgatgtatatccatagggaaacaatagcatctgggagtaggaatggaaggtgatgtaaaccttgatttcattcaggtggcttctaatgaaattagtgacagctttcgtctctttctcggactctggtgcagagccccgatagttatctgcacatgggtcattggtgttaggaatggagttccatgaagcattaaaattcctgttgaggtcagtgccgatgcatttggagttttggttcttggaacgattttttctccacatgcggttctttgtccatgaccaaatatatccatcaacattgaacacaggaagaatgtaaaaattcattcggt

SEQ ID NO: 466494 - DNA, 1000 bp, Homo Sapiens
tgtatttctaaaggcacaagcagaaatttattgaaaatttggagcagaaatctttaatgtacttctgaccacccttccttttgttgagtaggatccaatgatcagcgtgagatgatctttgattaaacttgcttgagatggctagtcaaacgtcgaaagttgcttgagatggctagtcaaacgtcgaaaatcaaagaaaaagtaggtaactagacttttacaattttttttaaagggtaaaaagacatgaaccctagtctgccttaatggcaaagtagcacttattaggttctctgacagaaccaaggaataggaaaatcttttatcaaaactacggataaaacttaaaaataatctgatacaatgatttggtcttgctggaatcagtaaattaaaatacggaagcagaatgataaaatcaggggcattaaacattcctaatgacatgccaagctattttagagacagcggcaaaagcttctctacaggtgggtttgatgtaacgctccggcagcaagaatccgtatgtgcccgtatctcgaagttcaattgtaaacgaatatttgatgcccaaatcatagatccaatcgtccccacctccaggagctaggtataaggtttctgagccatggccatgtgtatacctggtatttttactagttttctcaatagcacgaactgcttcactggctactagagacagttcctcatggtctttgcttttacttcgtgtataggaatatggaaacactatatgctgggagtatgaatgcatgctgatgtatgctttaatctggttgatatttcttctcaagaaactagccactgccttcacttctggttctgactcaggataaagtccacagtaggtttccgagcatgaggaactggatgcaccttcctcacaccagtgtttggaagcaaagttcctattcaggtctgttccgatgcaatgattgttcgcatagaaagaacggttctttctccacattcgattctt

SEQ ID NO: 466495 - DNA, 1000 bp, Homo Sapiens; identical to SEQ ID NO: 336666

SEQ ID NO: 466496 - DNA, 1000 bp, Homo Sapiens; identical to SEQ ID NO: 335673

SEQ ID NO: 466497 - DNA, 1000 bp, Homo Sapiens; identical to SEQ ID NO: 336667

SEQ ID NO: 466498 - DNA, 1000 bp, Homo Sapiens; identical to SEQ ID NO: 336668

SEQ ID NO: 466499 - DNA, 969 bp, Homo Sapiens
tttttttaaagcattttaataaaattaacaaataaatattctaaactgtataggctacagggacaaagggtagaagctagagggccagtctttcctgctcaggccctcaagtcccctttagagagaccctgctctgggctggtttggggctaggactgctgacttggggaggcggggagtgaacccggaatgggtgatctgggctcttgcagccattcctctttgttggtgtaggggaggagagaagaggtcaaagaaagcaagaccctgcaagaggcatcccagtgacccccagaagtgactggggtaaggggagcgctatcctagaaggagggggtgggacggagggggcagtgaagcagggcggtgagcatggccagtggtgggcttcggccgcggttctacctgtggccactcactctcggacgtagaccctggtgcacacaacgtcatccgccgtcatggtcaggatcagttccccatcgttggtcagttctctggtccacgaggtcttggggccctctcccttcaggagcttctgctcacagaccattttattctcactctcccatttcaccaggctcttacagggcctcccatccacagtctgctcctcaaactcctccccaaccttgaagttaatctctgtggtgcgcacggtggtggaggttttgatgtagaaagtgtctccctcctgtttgatctccactgctggcttggacgctgcagccacagcaatcttcctcagcatcacattcacccccagcactttgagcaattcctcgaagttttccgatcggatgattttccagttgccagagaagttgggcatggtggcggcgcgggaggcggtccccgtagactcctaggctggagcactggacactgtcttttagtcaaaagagacgtcgccgtcgccgggtcgtcaggttctggaaccaagacaagtccagggacaaccccaaagct

SEQ ID NO: 466500 - DNA, 1000 bp, Homo Sapiens; identical to SEQ ID NO: 336670

SEQ ID NO: 466501 - DNA, 1000 bp, Homo Sapiens
tttttttttttttttttcatggtgccaacattctgaatgtatttattcatgtttgtatttgtggatggaaaattttttccatgctacaaagtttggttaaaaacaagttgttacaaatcaataaataattgctataactattacctattgtaacaataataaatagaaaataaacagatgcaactactttgctatacacaagactttatcctgttataaaactaatataagtgctgccacttttctttctttgagtattttcccttgagatacgatttttgtattgcacgttgctttgtgcttgtcttaccagtttcaggtttgtagcacatcaaagaattacaaacatttccatttagaactatgatcctaccaatcaggggttattttctgccatgtgttcatttacagattacaaacataaaagaagcaaagtacaaaaattaatgcgtgtgtgtatgtgtgtgtgtgtgtgcgcgcgtgcgctcaaggctgggaatactgactggtatgaaaggcttttaactagttgtgcatcaaaatcatacacaatggccattaaaaactcacttagctatcagcatgtaaatcactgggttggttattcaaagaccagacaaacagaattccccgatactgtttccatttgggttttccagctcgtacggctccagctgacgatactcaaaagtcacacgatttacgtgttttccactggagaccatgcgcaccacagtgttgtcacagccaactttcatctgggccgggccatgaaaggggtagcagagatcagctaaaggcgtcatcttggaagggtccaatccagttcctcccagcagctccacaaagtctcctattccctcgcaacctgctgaggatttctttaactgaagaccatttacgtgtcccagggtaagatcagatattttgatcaccacaggataaattatggagaagctgcagtttcgatgctggtgtggaactaccagggtaaactttc

SEQ ID NO: 466502 - DNA, 1000 bp, Homo Sapiens
ccaagaggcatggtttatttcacagagagcagagatgtttctgaaggggagactggagggcaaagggcaatggggtatgagtttcaatcactgaagacatggtggttctgctattcccatcccacgcctccctcctccatgcctctgctcctcattttgccccgcacgatgcaactggttgactaaggatgtggcttccctgatggcgtcttccttgattgcctaatctgtggactaggcagagaaggggtctcccaagagaggaagccaggcctggaagcctgcatccttcatggagcccccaaggcgggaggatggctggggaggggacacaggaacagggtggggtacaagtgagcctctctaggtgacagccctgggataaggcagccaaactgatcctttgctggcgtaacccacccaactgcagggcaccactgagtgtggagtccaagggccagtgcagggccacaccattgcctggctgctggctccatgagtagggcaggggagccctgtgtctgctactataaatagctgtgtgtgttggacaggtccttctctgctctgggcccagtaaggccctggccagagaggctgggatgggcaaatgcctgcagacatctgactggctcttctcagggggtcctgtgaattccctctgcttcctcttgcgctgagcctggtggcccccactcatccctgtcccttgcagtcccccttggctgccgcaccccctctttcctgccaggctggagagctggtctctcccctcccatctcctgccccacgagagcctgcccagcacagagaacccagaggaagaaggtggaggaggacaggggagctgtgcaggtgggcgaccgaggggtcacacagcggccgtctgcttgatgctgtggaagctgatccgtgtgggtgatgtagggatggacatggcccgggccatggggactcgaagggagtgatggtcctgccagcggtgccacctcttcctcac

SEQ ID NO: 466503 - DNA, 1000 bp, Homo Sapiens
tttttttttggtcagaaaggcaggattttaaagagtaaaatattctgcctattagagacttgaaatattaacttttagaaaggtatagattgttcccttgtgaaactgagttttgtataacctctcagtttatgtaaagaagcctgtatttcaaatgtgttgctctaatttgtttattgtagtgcatttcaaaattgtacaaatgtgtaaagtttgtgcttgtggaacctgttgctctgagtagctttactttccttaatttaatcctagcaattcttaagctattgcatgccccgttcatgaaaggatactttgttgggatgatacagcttaaacagtttggctctaagtctccttacatagagcttcccttaaatttatattaatttataatatatattgaatgatagctttacaaaaaacaaatcaatgaattgatcttatgaaaatgactctttacagtaagtaaaaaagggttatcacagttttggtaacttgcatgagttcatattggaaaaaaaaaacacctttcacatgttcttaatgactttaaaactgatgcgctctaagggcacattcagttgtatgctctgaagcagtagacaccatacagcttatgctttttatctgggaaacccacgaagcgcactgcagcctcagtaggactgcagcgccttcttggcctagagatggggtagcggacgctgccatccgccaaccagcccgcatcacagcggtcatatccgagaattttccaggcagcaaatatctggcccacttttgcaatctgagcaccatcattgagacaagcttgcaccgcttcatcataggtcagtttggtggggtggatcagatagtaaaaacggccattgaaattggatgtaaaacagaaaacatcatatctgcttttatctttatcccaaaatccgtagttcctgactccgggcactgtgttctggcccccacagggctctctgggctttgtgatgggatattgcac

SEQ ID NO: 466504 - DNA, 1000 bp, Homo Sapiens; identical to SEQ ID NO: 157847

SEQ ID NO: 466505 - DNA, 1000 bp, Homo Sapiens; identical to SEQ ID NO: 336675

SEQ ID NO: 466506 - DNA, 1000 bp, Homo Sapiens
ttttttttttttttttttcttttaaaaccttttattcaataatatatacttttaaaataataatatgtaactgccgccatgccacatactgcgcccgtccccccactgtggagtctgtggtcagctagttagcgtggtttgctggaaaaacaggcggccacgggacgagttgaggggctcggggagcaacagtaaccaacaacattctgcatacccttcacattccccatgctttctgggtcgggaagaagtcaacaggaagccaaaggcaagtgagccttttacattcggaagtgaggtttgatatacggtggtgggctgcccttcgcttggtctagttcgtgctcgccaaacctgccaccgttttgtgtctgctcacggaacgtgatctctctatacgcgttaagacgtttgatttggttcttgttctgcttatggaaaagtgggagaaccgcaacagacccgtcgctttccagtcttcatcgtgctgccgtgagaccactggaaagcacagcattgtctgcacaaggctgggactgctccttcaccacagggtagaagtatgggtgctccatggcctctttggcagtcagtctctgttgatggtcgtatcgcagaagtttgtccagaagatctagggcctcagggctgacaaggtgtctgttctcactatggataaagttttcccagcgtttccgtgaatgttgtcccaggatatcgttgaagtgtggatctaggtctatgtgatacttcttcagatacccatacagttcttctgtacccagaaccttggcaatgcgaacaagctggtcatagttgtcctgtccatggaagaatggttcccttcgaaagatcatgcttgctaacatacagcccaaactccacatgtccaagctataatcatacatctgatagtccacgaggagctctggtcccttgaagtaccttgaggctacacgaacattgtactcctgagcaggatgatagaattctgccagac

SEQ ID NO: 466507 - DNA, 736 bp, Homo Sapiens
ggcgatgctactgtttaattgcaggaggtgggggtgtgtgtaccatgtaccaggtctattagaagcaagaaggaaggagggagggcagagcgccctgctgagcaacaaaggactcctgcagccttctctgtctgtctcttggcacaggcacatggggaggcctcccgcagggtgggggccaccagtccaggggtgggagcactacagtgggtgggagtgggtggtggtcggtgtgactggcctggcacagacccctaggcttcttgacacctggaattcaccagggacattctgtcctcccagggaacttcgtagatctcgaaagagcacaactgtttcttctgcagttctggctgttcatggaaggcacaggtgtccaagttgggctgggacttggtacatatggtgcggcccacctctacgtcgaagaagtaattcacccccccaaaggtctgctccctggctcgcagcacctgcagcgggcgtctgtagtactcatcttcggtggccttgttgtactcgctgatggcgaagtgaagggcacgctgtacccactcatcattgaggtctgcatcatagatgccacctgggattatcctattctcctccttggagctcgaggccagagccccagccagggtagccatcaggagtagcagggtacacagaggccgggccatggtctcctcagaggcagagcacaaagctggagctgcaggagaggagggtgagagcc

SEQ ID NO: 466508 - DNA, 1000 bp, Homo Sapiens; identical to SEQ ID NO: 336676

SEQ ID NO: 466509 - DNA, 1000 bp, Homo Sapiens; identical to SEQ ID NO: 336678

SEQ ID NO: 466510 - DNA, 1000 bp, Homo Sapiens; identical to SEQ ID NO: 157848

SEQ ID NO: 466511 - DNA, 1000 bp, Homo Sapiens; identical to SEQ ID NO: 157849

SEQ ID NO: 466512 - DNA, 1000 bp, Homo Sapiens; identical to SEQ ID NO: 336680

SEQ ID NO: 466513 - DNA, 1000 bp, Homo Sapiens; identical to SEQ ID NO: 157850

SEQ ID NO: 466514 - DNA, 924 bp, Homo Sapiens; identical to SEQ ID NO: 336682

SEQ ID NO: 466515 - DNA, 1000 bp, Homo Sapiens
tttttttttttttttttttttttttttttttttttttttttttttttttttttttttttttttttttttttttttttttttttttttttttttttttttttttacattgagaaaattaatttattcccatgatgggggctgaaggagggcccagagctagagcctggtctcctgcccccttgcctcttcttccagatgaagagaggcttagctgaggcctgaacaggcctgggatggctcttgggcttgagggcctgttctggcaggatggcaagcagacactggacagggtcacttgggcggccgatatgccagcttccgactcttcaggactgaccacttgtgccgctttatggtgtagaccaggggcaccagcagagccatcatcatcaacatcttgagccccatgcgttttcgatggtcgtgctctggctcagatgcccagcgcaggaaggtgcacacatccttggctatctgggacatggtagctggggtgccatcgtcaaactctaagacatctgtgtagatgggaggggccatggcaatggcctggccaggaaagtaggggttgaagtagagaccttcccgcagtgacaccccggtgggtggctcgcagtagcccgtgagcagggagaagacgtagtcctcaccaccatgcctagctcgcacgatgtagctgaggtcagggggcaatgctccgttgttggcagctcgagcagcctcactgttggggtatggttttgggaaatagtcgaacagcttccctggccgcatgaacatctccccatcttcattggggccgtcttgaacctccacctccgcagccagctccttagcttcatcctccgtgtagcacacgcccaccaggtggcggtaggccacgaagtccatgctgtggcaggaggcgcacacctgcttatatacctggaaacccctccggatgctggtgtggtccaaggaagagaggaggccacggtgagaccacggatagctggggggg

SEQ ID NO: 466516 - DNA, 1000 bp, Homo Sapiens; identical to SEQ ID NO: 336685

SEQ ID NO: 466517 - DNA, 1000 bp, Homo Sapiens; identical to SEQ ID NO: 336686

SEQ ID NO: 466518 - DNA, 1000 bp, Homo Sapiens; identical to SEQ ID NO: 157852

SEQ ID NO: 466519 - DNA, 1000 bp, Homo Sapiens; identical to SEQ ID NO: 336687

SEQ ID NO: 466520 - DNA, 1000 bp, Homo Sapiens; identical to SEQ ID NO: 157853

SEQ ID NO: 466521 - DNA, 542 bp, Homo Sapiens; identical to SEQ ID NO: 336689

SEQ ID NO: 466522 - DNA, 1000 bp, Homo Sapiens; identical to SEQ ID NO: 336691

SEQ ID NO: 466523 - DNA, 1000 bp, Homo Sapiens; identical to SEQ ID NO: 336692

SEQ ID NO: 466524 - DNA, 1000 bp, Homo Sapiens; identical to SEQ ID NO: 336693

SEQ ID NO: 466525 - DNA, 1000 bp, Homo Sapiens; identical to SEQ ID NO: 336694

SEQ ID NO: 466526 - DNA, 1000 bp, Homo Sapiens; identical to SEQ ID NO: 336695

SEQ ID NO: 466527 - DNA, 1000 bp, Homo Sapiens; identical to SEQ ID NO: 336696

SEQ ID NO: 466528 - DNA, 1000 bp, Homo Sapiens; identical to SEQ ID NO: 336697

SEQ ID NO: 466529 - DNA, 1000 bp, Homo Sapiens; identical to SEQ ID NO: 157856

SEQ ID NO: 466530 - DNA, 1000 bp, Homo Sapiens
ctccccatctgaatggccaagtgatatttgcctgggctgcaacagaaaggtacttaaagggctgatctcgaacttgaagattaaagggaacatttctagggtcagaagaatcatgcctccccttctcccatcactgcccgcatgcacctcacataccaccagatccctgctgctgcccagagcccaaataatactagttgaggaatgtggggccagtggaaactggaaaggttgggtgaaggctgaggaaaggctttgaccggaaccaggagaggactatgaactataggatggggatctggctccatcaagaggccagcagggtgttggcagtcacatcagaacttcgcacactggggaaggcatgacggagtttctccatgatgtcctccaagcacaggctgacatcctggctctttgaccccacatcatctgcagcctcggtatctggagtggtctgtcccttctcccgggggtgactgccttctgactgctgtggagaggaagctagggacgagcctgcagagccactgccatctgattcggtgggtggctgcaggagaagctccctcagacgctgcagctgggactctagctgcttgttgtgatcttcgaggatctgcatgcgcgtctccaggcggctcttatgttgccgaaggatacgggcctcggccagaagctcctcattgcggtggtctgttgctgcctcagtggagccgtcagccagactgggtgcctcagctgcctcctcatgctgccacttcaggcgcctcagctctccctggagaatccggttctcatcttccaagtgggccaggatcttctgtagctcccctttgctttctgtagccacactgcatggagcctgctgtccaaaggctggctcccggtctgtgatggggctggagtgccgcagcaggtactggtcctcgtctatgctgtcatctggggacaagctgtcattaaagaaggagcaattttgactttccatctcagcaag

SEQ ID NO: 466531 - DNA, 1000 bp, Homo Sapiens; identical to SEQ ID NO: 336699

SEQ ID NO: 466532 - DNA, 1000 bp, Homo Sapiens
gcgaatatgattttagggttttgaaaaactttaagatttactacaatttgaatagtacttgagaattaggagtgacaacatattgcttttggggtatgaacccaaacatttaatttataatcgtgatcagtttatgagagaagctaataagtgccaaattattagcccaatacagtgagctttgctatgctattttgaatactttagtccaaagatccagatttggtcagtgtggtattccagctcattctggtcatattagacgggagcaaggatcctctgtacagagcatagtatgtgaccctcgtagctgcgttgggccagctaggttgccaggaacactggaaatgggacagatcaccctttctgtcactatcacattttgtgtgagaagtggatcaaagcctgcagtggaaggttgcacgagggaaccagaagccgagtaagtctccgttactaaatagttaccatgctgcagagggtcagggatggaaacagctggctggacagacccagaggcggacaaagcagaagctccttgacttcctgacaaagtctggcacttaacaaatcctgtctgctggacttctatgggatggccacaggattcaatcccataaccgctgtctttagagggtggctgaacttctttgccttcaccatcaacaccaaggcttatctctgcaagttttttaaatttgggtccaagtgagtccaagaagctgtcatccaggtcatcagcaataaaactgcaacaacccacggagcccacaggagaaccagtggcatctgcgccttcattatcatagatcaacaagcagtcatttgcttcctggccatcgtcttcctccgcacaggcaaatgctttctgagaaaagtaggagtccagaaaattcatgcttatcgccccatcagcgtagtccttattggttcctccagtggaatgccttgttctcatggttccagactgccctgaggaacagatgccaactccagtggc

SEQ ID NO: 466533 - DNA, 1000 bp, Homo Sapiens; identical to SEQ ID NO: 336700

SEQ ID NO: 466534 - DNA, 1000 bp, Homo Sapiens; identical to SEQ ID NO: 336701

SEQ ID NO: 466535 - DNA, 1000 bp, Homo Sapiens; identical to SEQ ID NO: 157857

SEQ ID NO: 466536 - DNA, 1000 bp, Homo Sapiens
tagccttaggcatggtttttattcacttgaacactgtacaaatattacaatttccttttgctgcaaaaagtataaaaataatctttatataggaatccattcgttactgtaaatctttctaaatctctgcaaatggctctaaatgagggtaaatgaaaaagccgaaatgaagagagggttatggggcagcaggaggtggggccaatcatcagggctggaccacccagactcctccccagagacctctgttccttcttggtagccgcccccaccacctgcaggttctagggctaaaggcccagcagaagtgggcacgtgagagggccaggaggagctggagggtcagggggtgggggatagcgaaggaagctagaagtggtgctggcatgtgcccagttccaccccacccttccctcctaggggaaggagctggcagaagcaagacactgaggctggcaggaacaagacactgccccctatggggggtaatggcagctcctcggttctgtgccactgggtggcagccgagcctgggctggcgaaggccgcagaaagggagaagcaaacactttggctccacggtgatgggggctgagtcctgttcccctgctctgcgagcacagaagtgccagcacaggagcgggagctgtggccagaactgtgcggtgaggggaggccggagaagccaggcgtctgtggctctcaagctctgtaggggtcgggtgggagaggtccccaggcaacccccaggtcagacagtctgggtcccagccacacagggcatgtccctgtcagtcagaggttgagaacaggcacatcaaagaggtcacagacaccttcactctcgtccaggttgtagatataatcgtggtctcccgggggtggagaaagacgaagcagaggggcaaacacttctgaggacatcaactcctccagcagctccgagctcatgcactctcgtgtgggatcaaagatttctgacagctctttggggagttcc

SEQ ID NO: 466537 - DNA, 1000 bp, Homo Sapiens; identical to SEQ ID NO: 336703

SEQ ID NO: 466538 - DNA, 1000 bp, Homo Sapiens; identical to SEQ ID NO: 157860

SEQ ID NO: 466539 - DNA, 1000 bp, Homo Sapiens; identical to SEQ ID NO: 157861

SEQ ID NO: 466540 - DNA, 1000 bp, Homo Sapiens; identical to SEQ ID NO: 336706

SEQ ID NO: 466541 - DNA, 961 bp, Homo Sapiens
ttttaatctttcaatcttttatttaaatgccatgatccaggatggattttagatcttgttgaaagcagccacatccatggactgcacatagtcctcaaaagcagtgatctgctcctccagcatatctgttccaactttatcatcttcaactacacactgtatttgaagtttcttaattccgtatcccactggaactagtttagatgagccccagactaagccgtctgcttgaatgcttctgacgcactcctctaatttcgccatatctgtctcatcatcccaaggtttcacatctagtaagatggaagacttggcaacaagtgcaggttttttggctttctttgattcatattgtgcaagacgttcttcccttagcctctttgcttcttcactttcctcctcatcatcagatccaaagaggtcaatgtcatcatcatctttactatctgtagctccacttcctgtagtgtcttccacatcggcaggaccatatttgcccaaagctttcttcactcctggcaggctggccttttccttttcgtaagacttgatgtgattataccaacgtagggcatgacacaagtcggcaggcggtgggctggacacggcttcaaatactgccacatctgcttgtgatggcacatacccctcgatgtagctcttgtccgccaggtaatcgttgagcacctggaggccggcagggcttttcaggtctccgaaacccatggtgtcggctgtatccgagagctggggagcagcagaaagagagcgcgcaaattgtgggcgccccacgctgaagagaggaaaaaggacccgaagagaccggaaaattccttatatagagacggaggcgtttccctccaccgcgccggaccgaaggttaaaggtcaaagtacttttgcattcccacttctccacgtacgaattgggggccctgaattaaatggcccacaaattgtcc

SEQ ID NO: 466542 - DNA, 994 bp, Homo Sapiens; identical to SEQ ID NO: 336707

SEQ ID NO: 466543 - DNA, 1000 bp, Homo Sapiens; identical to SEQ ID NO: 157862

SEQ ID NO: 466544 - DNA, 1000 bp, Homo Sapiens; identical to SEQ ID NO: 336709

SEQ ID NO: 466545 - DNA, 1000 bp, Homo Sapiens; identical to SEQ ID NO: 157863

SEQ ID NO: 466546 - DNA, 1000 bp, Homo Sapiens
tttttttttttttttttttttttttagcacaataattttaattgcaaaaataaacagttttgtcaactgcttgagagtagcgtctgctttacaaaaattaacaacaacaaaaggaaaaaaaacccaaagcaaaacgttacatccaatcggctgctggataagacactgctgtacaaagtcccgcgcgagaccgccttggcctgccccagcctgtctctgggggttatagaggaaggcgtggggcgtgtgcagttacaaaagactgtcttgaatcccagggtagtgcctattcactgggtggtctcagaagacttcccccaaagcgcggctgacaagggtgacagcgcctggaccgcgggaactgtccggcgagctggtgctgaatagggcgtgtgcggcgggcgcttcaaggaaactggaagcgggacggaggccggccctcgggcgtgcgaggaggagttggaagaagagcggggaggggaacggcccggaactcgtgcgcgccgaacggcggcgccccaacccataaacccatctcttgctcagagagaagcgaaggagaggcccagcgagtaaaagccgaggcccttgagccgctcctcggcgcgcgccttctgcttgaggtgcaccttgctgtgccgtttcttctcatcgctgcgcgcgaagcggcggccgcacacgtcgcaagcaaaaggcttctcgccggtgtgggtgcgcacgtgcgtggtgaggtggtcgctgcggctgaagttgcggaggcagatgcggcactggaagggtttgtggcccgtgtggatgcgcaggtggcgattgagctcgtcggagcgcgcaaagctccgcacacaactctccaccgggcaagcgaaggccttggcgtgcggccgcgggcagaagcagcgcgtgctgcatttgccgccgcggcgccccttgcgtcgcgccttggcctgggggaaaggggtgggcggcggcggcggcacgggtggtgcagccacgccactgc

SEQ ID NO: 466547 - DNA, 1000 bp, Homo Sapiens; identical to SEQ ID NO: 157864

SEQ ID NO: 466548 - DNA, 1000 bp, Homo Sapiens
aaagtgaatatacaatttatttaacattcaaacttcattaagacatgtgcaatatggcaattttactggggattaaaccctacctaggattgcttgctggggcttagcaacagggtccagttcacacttagcactaattaaatactttattgaataaatacaataccaaacaaaatgcattcaaatgctttctaaaaaaattttaaaggcctttctactcaggctaatgacaaacacaataaaggcagatatgctagtttaacataattggctgattttatacagcacttatatcttttagtccacaagtatattattaaatgatagagaacatctaatacaaccatttctacagaactaggaaataaatttctaagaaagaaagattttacagaccccatcttttatacccaccccaacagtctaactctaaagaggataaagccaatgactttcctcacaagagctcacgactaacgtcgctttgctatcaaaatctgtatttctgatccgttatgagcattgagacaagattcaaatattcccaaagaaagaagcacaatgcacgttgtgatcgcctattcagcaacagcgagcactgcatccaaaactctcatcccaggaattaaataaggtcagccacattcatgggcatctcctccactgtagtattgtagaaagtctcaatgtcacgaagaatcctcttgtcttcttcagtaacaaagtttatagccacacctttcctcccaaatcgaccccctctgccaattctgtgaatatagttttcacgattggtaggtagatcataatttataaccaaagacacttgttgcacatcaatcccgcgagccaacaagtcagtagtgatcagaacacgacttgaccctgaccggaattccctcatgataacatctctctccttctggtccatgtcaccatgcagagcagaaactgtgaagtctctggcatgcatcttctcagtcagccagtccaccttgcg

SEQ ID NO: 466549 - DNA, 1000 bp, Homo Sapiens; identical to SEQ ID NO: 336712

SEQ ID NO: 466550 - DNA, 1000 bp, Homo Sapiens; identical to SEQ ID NO: 157865

SEQ ID NO: 466551 - DNA, 1000 bp, Homo Sapiens
tttttttttttttttttttttttttttttttttttttttttttttttttttcatttcacaaatatttctttaaataatagattctaagcataatttttcctggccaaagggtcccaatagccagaaggagtaactttgttcttaattgcttttgcaaagcacagtcactaaagcccaccaaaaacttcttcagcacaaagctcaaaatatttttaaaggagaaaagaaaaggaaggaaggaaagaaaaagaaaaggaaaagacagagggaggtggagtttagactccaattaaggcatttttatacatatagtccaacttgagtcctattcaaagagaatcctaaaaagatgttttcaatggggaatggcaaaaatcacaatagtctattatcagcattgtagaactatcaattgctcacttcaaatgcaatcatgttgaatgtctgtttcttcgttcctcggttctctcattccacaagtgcataggttatgtcttctgtaggtctggggaaaatgggccaggggtggaaggtccatccagcccagacagagtgaatggcccatgactgttcagtacagaaggaaactggaaaagtgtgttagcaccttgcagtctggctggacttaggggagcaacaggactgagagtactccagaagtggatactggagagcaaggggcttggagtcagtatgatgggtgtctgtgaaaaaaatgctggtgtaagagaagctgtagggagagatgggctcagtattcccagtgggcttggatcactgctcgtgatcacaagggtgggtgccagttctaaccctttgggtttcttggatcttgatgaattatttactttgtccttttctagcaagactgaatcctggtctttaggctccagtgacaaattctctggaagttccattggctgagaagccactgaatcaatgtctgtgtcgatgtctgggtgagaactcagtggtggtgaaggtgttctgggaggttcct

SEQ ID NO: 466552 - DNA, 1000 bp, Homo Sapiens; identical to SEQ ID NO: 157866

SEQ ID NO: 466553 - DNA, 1000 bp, Homo Sapiens; identical to SEQ ID NO: 336714

SEQ ID NO: 466554 - DNA, 1000 bp, Homo Sapiens; identical to SEQ ID NO: 336715

SEQ ID NO: 466555 - DNA, 1000 bp, Homo Sapiens; identical to SEQ ID NO: 157868

SEQ ID NO: 466556 - DNA, 1000 bp, Homo Sapiens; identical to SEQ ID NO: 157869

SEQ ID NO: 466557 - DNA, 1000 bp, Homo Sapiens; identical to SEQ ID NO: 336718

SEQ ID NO: 466558 - DNA, 933 bp, Homo Sapiens
ttttttttttttttttttaagttaacagagatagatgttgagagtcagttttattgccatctctgggaggggctcaaatccgcccaatctccttcagcttggccaccaggtcctcagtggtctccaccttgacgccggccgtgcgctggggcgggtcctccacactgatcacagagagcttggaggtcaggtccacacccaggtccccaggcttgatcacctcgatcttcttcttcttggctttcatgatgttgggcagcgtggcgtagcggggctcgttgagcctcaggtcagctgtcaccacagctggcagcttcaggcgcagggtctccaggcccccatcgatctcccgctccactttcaacttgtccccctccagcgtcacctgggaggcgaatgtgccctgtggccagtcaagaaatccagctgtcatctgccctgtctggttacagtcatcatcgatggcctgtttgcccagcagcaccaggtccaccttctccttctctgccagcttggccaggacccgagccacctgcaggggacccaagcgttctgcttctgctgggggcacctccacgtggatacctcggtctgcacccatggccagggcggtacgaatcgtctcctggcactgtgcaggcccacagctgacggcgatgacctccttcaccagcttcttctccttgagccgcacagcctcctccaccgcgatctcacagaaggggttcatggagtgcttcacaccatccgtgaccacaccggtcctgtcaggcttcactcggatcttcacggcgtagtcgatgaccctcttgacagctacgagcacgcgcagctccgccatcttcccgccgcagccacttacagggtcagcccgcaccctcagcggctcagtccagaagccccaccacccccgccccccgcgcccctctctgc

SEQ ID NO: 466559 - DNA, 1000 bp, Homo Sapiens; identical to SEQ ID NO: 157870

SEQ ID NO: 466560 - DNA, 1000 bp, Homo Sapiens; identical to SEQ ID NO: 336722

SEQ ID NO: 466561 - DNA, 1000 bp, Homo Sapiens; identical to SEQ ID NO: 336723

SEQ ID NO: 466562 - DNA, 1000 bp, Homo Sapiens; identical to SEQ ID NO: 336724

SEQ ID NO: 466563 - DNA, 1000 bp, Homo Sapiens; identical to SEQ ID NO: 336725

SEQ ID NO: 466564 - DNA, 1000 bp, Homo Sapiens; identical to SEQ ID NO: 157871

SEQ ID NO: 466565 - DNA, 1000 bp, Homo Sapiens; identical to SEQ ID NO: 336727

SEQ ID NO: 466566 - DNA, 1000 bp, Homo Sapiens; identical to SEQ ID NO: 336728

SEQ ID NO: 466567 - DNA, 570 bp, Homo Sapiens
tttttttttttgactgaactaagtggcttttttattagagaaagccagaattacaaaagacttaagagttggcattggggcccttcttcttgccaaaggtgggcacaacgttgacaaagcgccggttgtactgcatccgccgcttagcccgacctgtcttcttcttcttcttctcctgtttggccaccttaggagtctgacctctcacttttccagcacgggccagggaaccatggactttacctccaagcatgcggcctgctacttccagggtagtcagggcctccaccccgcactggcccagagtggcctcatcctccaggggcgcgcctgccaggagcacgacttgatcttccggggcaatgccctccagtgaggctacatgagccttgatctgggcgaccgtttcctggccggtcacctcgaaggtgtgtagctcctgggcgcggacaaagagctgcatattggcgactgaacggcggtcccagctaccgcgaagatggagtcgagaaagaggaagaagcgagggcgcgtcagtacagaccgtgggctgcgtgtcacgtcactgct

SEQ ID NO: 466568 - DNA, 1000 bp, Homo Sapiens; identical to SEQ ID NO: 157873

SEQ ID NO: 466569 - DNA, 1000 bp, Homo Sapiens; identical to SEQ ID NO: 246424

SEQ ID NO: 466570 - DNA, 1000 bp, Homo Sapiens; identical to SEQ ID NO: 336731

SEQ ID NO: 466571 - DNA, 1000 bp, Homo Sapiens
ttttttttttttttttttttttttttttttttttttttttttttttttttttttttttttttttttttttttttttttttttttttttttttgggaggccatcactgccccattttattgatgcaggctggacaggaggactcaccacctgagctggggatactcaggtcctggggtgctgaggagatggggctgcatctggagagggtgctgttggggtgtactctcatctggagagggtgctgttggggtgtactctcatctggagagggtgctgttggggtgtactctcatctggagagggtgctgttgggggcactcccatctggagagggtgctgttggggtgtactcctgggaaggcaggggccatagaggagcgggagatgtgtcagctgcctccgtttgggtggcagaaaatgtcacagggacctttcagccacaaagaggcttttaggccgtggttgggggtcttcagggtcttgctctgggcctggctgtatccatgctcaagagtggagaggggcagagggggtgggcaggcggccgtcagggtctggtcttgaatcaggtcccatggactccgcggaaccttcgctggctggcggcgtgcatgtggccagccggtcgcacacccaggcgcccagcttacggtcgcagaaggcgtcgttccagcgaccggagccccgcatcatcacgcagtcctcgccctggctccggctggtgggctcccctggagcccagttgctgtagtccacgtggctcccatccacccagataaactcccccttcaggtccaagttccgaaggccaatccaggagccggtgtggctggcatgcttggtcaggaagtcctgctcctccgggctgtggatgctgaccagctgcccttccatgtcgtcacaggcataccgggcgtggacccactgcttggtgcccttgccgaagtagtagcacttccgttggaaattgatccacttttcagggcacgtgttgcacac

SEQ ID NO: 466572 - DNA, 1000 bp, Homo Sapiens; identical to SEQ ID NO: 157874

SEQ ID NO: 466573 - DNA, 1000 bp, Homo Sapiens; identical to SEQ ID NO: 336732

SEQ ID NO: 466574 - DNA, 1000 bp, Homo Sapiens; identical to SEQ ID NO: 157875

SEQ ID NO: 466575 - DNA, 1000 bp, Homo Sapiens; identical to SEQ ID NO: 336733

SEQ ID NO: 466576 - DNA, 1000 bp, Homo Sapiens
acaagttaaagaaatccaatggtaagattctccactgttgcaccagaaaagtcagagttggttttttgttttgtctttttttccccccagaaaattaaaaaacacacccgcagaactataaataatttggtggcaatatatacacatttaaataattaatttaaatatcttacacctactcttgcattaaactcttcatccgaagaaagtgcaccaaggtgaccctcgcactgccctcccaggggcttcccgaggctgaggcaagggtcctctggagggtcacagcctggggaggaagtgggtgaccttcatggtgggcgacactcggttccccttcttggtcttcccattcttgctcagggcgatgaacatgccggggtacttgtaggactcgtaggcgttgtagttgttgggaaggagaatctccttgaacgtgcactcatcggtgaagaagggcgagccatagagcttgcccttgctgctcatggccacgaagaaccggctggccacgccgaagatgctcaccacgccccgctccacgggcgagagctccagcaggctgtcgcgggtgtccgcgtgcgcgccgccgatgcggccgtcggggagcgcctggaggtggaagccgatgcccacgttgcagtagagccgccgcagccgcttgatgcccagcaggtagtcgccggcgccgctctggacggccgcctccttgggctgcgctgccaccggcaggcgcgccaacgagagcgccaccaggctctcccagcggcgctccagctcggcctccagcgtgccgttgggtgcagtgggtgcggcggcgccccctcggcccgcccagggcgccagcaaggccagcaggaccgccgggagcagcgctaccgcggccgtcccgggccccgacatcccggcccgagggcgtgcgtcggtcaggcggtcagtgcgcccgggaagctggggggcagagctgcgcctgtggcgtcccgcgggagcgcacggccgacct

SEQ ID NO: 466577 - DNA, 1000 bp, Homo Sapiens; identical to SEQ ID NO: 336734

SEQ ID NO: 466578 - DNA, 1000 bp, Homo Sapiens
ttttggaatttctataaataaatttaactttttttatttttattttttatttttttttattttttactaagaggtctttgctttaagttcactgcgatgataccagtgagaattaactgaaagtcttttaagtaagactgcaccctcgcgcaggccaccagccagaatcctgataagtcgaagtatggcagctgtgctgatataggatgaagtacaactgatcagaaatgaaaagcgtgtcttttttccagcatgcatcaggccgcagtccttttgctctcgctccgcccacatctcccgctacacacatacacacacacacacacacacacacacacacatacacacactcctagcgctcagtctctctctctctcctcttctctcatgataaatcaagcaagtggccctaggcagccctccaggaggagaagcctttaagtgcagaacaaaatcagcatattcccatccaagcctccatcatacattatgcatgcgacaaagtttggcaacagtggagctgatgtgatgacacagcgaatcaataagaacccaccgcgtgaaacctttatagtggttacttttttaagggctcaagtgaagaaattgtctttgtcaactttggcttagaatatccttatacagttcaggtactttgtcggggtccactggtctaggtaaaaaatgtgtgaatttctggtgccgtttagtcctagtcccttctctcggggtcccatctttatttaatgcaacatagtatcgccttccagtgtccacgtgcttatataggtttgacgagtacgtattataccagttttcttcgaactgttctctgaatacacactcttgggttagtttttctgatccatacagctcccccttctcattcatcccgaggtagagtccactgtccacgcctcgaatgctgaccaggcccactgctatactgataaattccagaatgccaaatcggctgtggtctttcctggttccctggata

SEQ ID NO: 466579 - DNA, 1000 bp, Homo Sapiens; identical to SEQ ID NO: 157876

SEQ ID NO: 466580 - DNA, 1000 bp, Homo Sapiens; identical to SEQ ID NO: 157878

SEQ ID NO: 466581 - DNA, 1000 bp, Homo Sapiens; identical to SEQ ID NO: 157879

SEQ ID NO: 466582 - DNA, 1000 bp, Homo Sapiens
tttttttttttttgagagaaggaaccatttatttagtcaaattattttacaacatggtcttctttgacagttgtcagcttaacacttaatatagttaaaaaagtcaacaattacctgcaaaattatatatattttaatgtctaaaaatatgttgcttatatagagcaggaaaatccctcctctccacaagggaaagtttcgttgtttttcccagagctgtgattattgcagtactgttacacgcatttccaaagcattaaagatctaaatggattatcttttccctgcttgtgtatgcctgttaaataactgtaccagtgctttgctttctcataagtcagtgacttaaacagccctgtttccttttcagctataggcatattatgctttttaaaaaggagcataaaaacatacaagacagcccaaatgtacagattgaaaaaagatgtacaaattacattaaaaaaaaataacagcgattgattcgatagtaaaactgcttttgtgaccgaggtcaactcgtttatttattcttaatttttaattatttattttttaatactgtgagatataggaaaataactctgcataatttatacagtaagttgccttctgattggttggccctggtctgatggtctgacaagcgcacagcacttgcgaatctgcttgagtttagaaatccctacaacttttccaagttctgggaccactgtcatcatttaaaaaaaaaaaattagtaatttaattccccgtctttcaggaatgtatgtatttgcattaaaatttcttagttcatatcttgactatttctagagagagtggtcagctgagtgcatactgtccactgagagggattctgcaatgcccttggcgtcttaaacacacaaaccttctttccatcaaattccagttgggtgaaaacttcactggccttacaatcaatgttccagttgccatccgctgaatttggtcctcctaaaattagattataagcttc

SEQ ID NO: 466583 - DNA, 1000 bp, Homo Sapiens; identical to SEQ ID NO: 336737

SEQ ID NO: 466584 - DNA, 1000 bp, Homo Sapiens; identical to SEQ ID NO: 336738

SEQ ID NO: 466585 - DNA, 1000 bp, Homo Sapiens; identical to SEQ ID NO: 157880

SEQ ID NO: 466586 - DNA, 1000 bp, Homo Sapiens; identical to SEQ ID NO: 336740

SEQ ID NO: 466587 - DNA, 1000 bp, Homo Sapiens; identical to SEQ ID NO: 336742

SEQ ID NO: 466588 - DNA, 1000 bp, Homo Sapiens; identical to SEQ ID NO: 336743

SEQ ID NO: 466589 - DNA, 1000 bp, Homo Sapiens; identical to SEQ ID NO: 336744

SEQ ID NO: 466590 - DNA, 1000 bp, Homo Sapiens; identical to SEQ ID NO: 336746

SEQ ID NO: 466591 - DNA, 1000 bp, Homo Sapiens; identical to SEQ ID NO: 336747

SEQ ID NO: 466592 - DNA, 1000 bp, Homo Sapiens; identical to SEQ ID NO: 336748

SEQ ID NO: 466593 - DNA, 1000 bp, Homo Sapiens; identical to SEQ ID NO: 157883

SEQ ID NO: 466594 - DNA, 1000 bp, Homo Sapiens; identical to SEQ ID NO: 157884

SEQ ID NO: 466595 - DNA, 1000 bp, Homo Sapiens
ttttttttttttttttttcacaaaggcagtgtagactttaattcaggttgacaggtgggaagagaactaggatttgcttccaagggtgtccagatgagaagaccatccttcagggaggggcagagagggcaagagggtgcgggtggcctggtggcagaatagggcgaggagcaggggcgtagccacacagtgcaaaattgccagggcttctgccaggttcagcagcaggtccagagcctgctgggccagacatgttgacaacagcaacagcttggacctcaccaggaaatccagtcctagaaccaccccatgaggccaccagaaaataaaccaggcccacaggatattcatccaggggcctggccccatacccaatgccttcttcagccccttggctccaaacaaacccaatggcaacaagacaaagatggcaagacaggctacagtgtgtgtggcctgcaaagccttcagctccgtgctgtatatcagggtgcagagtccaccagaagcaccactggccagggtgacaggcagtgtcagtagggcagccactccccaaattcccacagtgagccccagggtgaggcctgggacctggcctgcacccagtctgtggcccagggaggcatggcaccctagcagcaaagcctgggcaaaggctgagccataccagacacagtagcccaggctacacagggcagagctgcgagtgctacctagccctggggccaagacgggcaccacaatgctgaagagggcactgcccacagccagctgtgccaggacaggccagccagggcagagctgccagcggaagagaggtctgaaaagcatgaagaggacagtgctgctagctaggatacccaggacactggtgaggatgaagaagggcagtgcagagtcatccagcaggttacaggagtggcagggggcagctgcttccaggttggcaccatagtctccatctgggaaggaatcattcacaccataggaagaattc

SEQ ID NO: 466596 - DNA, 1000 bp, Homo Sapiens; identical to SEQ ID NO: 345769

SEQ ID NO: 466597 - DNA, 1000 bp, Homo Sapiens; identical to SEQ ID NO: 336752

SEQ ID NO: 466598 - DNA, 1000 bp, Homo Sapiens; identical to SEQ ID NO: 336753

SEQ ID NO: 466599 - DNA, 1000 bp, Homo Sapiens; identical to SEQ ID NO: 336754

SEQ ID NO: 466600 - DNA, 1000 bp, Homo Sapiens; identical to SEQ ID NO: 157885

SEQ ID NO: 466601 - DNA, 1000 bp, Homo Sapiens; identical to SEQ ID NO: 336756

SEQ ID NO: 466602 - DNA, 1000 bp, Homo Sapiens; identical to SEQ ID NO: 336757

SEQ ID NO: 466603 - DNA, 1000 bp, Homo Sapiens
aagaggaatacagataaatttattagttaaatactgattttccagccatttcaccttaagacaatgttaacaggtttgtgggttagggagggtatacgagggggcctttggaagaaaacaatgtaaatgatgattaaaacagaatcttggttcaaaggtattctctgctacagccagtaggattttggagtgaggggtctgggcgtgtggggaggcgtagtaatgccacagtcagctacagctctgctgagaaagaggaaggagtctccttgagctccagcatcaggggcagaaacagcaatgtgcagaggagaacgcggcagatcccggagcagctcagagtcggaggctccctccaggcccccctgccgtgtcttagcagtcgtcttctttccaggaattctgttgtgttgtgtttgtttgcttcgaattcgtgttgcagaatctctggctttttgcctcctggacaaaagacttctgccggggcgaggctgcaggtcctgagggactctggctgccatctgaccaagggctaggaggagcagacagacagcaggtgggccagcccttgggacactcctgccccctgaccaggactctgtccacttacactctccccagaaggacctcgaggctgggctgagtgcttgccagactggcttgagcagcagaacgttttgttcttactcagaacccctctatgtgtgacacggtgaacgaagggtctgcagtgaactcgagggggtgccgtttggctaaactacccagctcttgttttgccaggggagagacatgtacaagctgcgggcagagctgaatcgctcagagcgggaagagggatttttattttgagagatgttggaagtgaaggagcaaaggccggcagcagggggaaggcacctgggggagaagttgccagctgcattttgatgaggctgtgctgtggtgggttaagtgcccctgtagctccccaggaagtgttcagtcacttgtatgtcac

SEQ ID NO: 466604 - DNA, 1000 bp, Homo Sapiens; identical to SEQ ID NO: 157886

SEQ ID NO: 466605 - DNA, 1000 bp, Homo Sapiens; identical to SEQ ID NO: 336760

SEQ ID NO: 466606 - DNA, 1000 bp, Homo Sapiens
ctggggaagggcgcagcatttgtctttatttttcctcagcgactaaaggcagcagcagtgccctgaagattagcagcagcagcagcagcaggtggcaggaggaagtggagggaaaggacaccaagtcttggggagagggaaggacccttcttcggccttagaggggagaggagaaccctgaagtgggccctcccagtcccatctctgggcacagatcccaccagtctgctcaccagtctgctcagtcaaagcagagtgggtgcactggggtggacgtgtcagccctgagcacccggcctccaggctgcaggaatatgagccagtgtcttcactttgctcgtgcctcagttttacaattgtaaaatagggcactacctagaatactgggtacattttgtgtgtgagtaagaagggaccgcaagaggcccttggcttagggaaaagcagccggtcactatggggtggagagggtcagacgtgtggcagtggcttactggggttaagaagcagcagtcccaggggctcagaggctggggcggcctggtatgacacagcaaggaagaggcctttagaaatgggacaaagtcatgccctgcccccatggatacatcccctttctctcctgtttcagcatcttcaagaggatgagtcacttccttaattcccacaatccagaggccaagtgcaactggtcacccacaacccctacttgtatgcctagcgccatcccaattgcctcctcctccatctctaccagcgtcccctccagtctgcacggggcagtcctcctgggcttgacctctctgtacccacagctgggggccaggcagcccccctctatccctcccagcacctcatccctctccacgtacacaacagatcccccaagtgctgagaatcaagctcccacctgcccacagcgtgcccacagatggcatccctggatggcagctcaggtggactgagacacttgagtcatcgctcaggaggtccttctggg

SEQ ID NO: 466607 - DNA, 1000 bp, Homo Sapiens; identical to SEQ ID NO: 336761

SEQ ID NO: 466608 - DNA, 1000 bp, Homo Sapiens; identical to SEQ ID NO: 336762

SEQ ID NO: 466609 - DNA, 1000 bp, Homo Sapiens; identical to SEQ ID NO: 157887

SEQ ID NO: 466610 - DNA, 1000 bp, Homo Sapiens; identical to SEQ ID NO: 336764

SEQ ID NO: 466611 - DNA, 1000 bp, Homo Sapiens; identical to SEQ ID NO: 157667

SEQ ID NO: 466612 - DNA, 722 bp, Homo Sapiens
taaacaatatttttttaatttttctcttacaacaaaccataaatgggccacctagaggagcagtggataagggtctctggcttagaagggaataatggagagcaacatttctctgcggaacaggtgaagatggtcagaccctccaaggtggggtcctcatggcaatatattgctgactatgatagaggcaaaactcagcaacagttttgatacccccagcctcacagttccttctggaagctcctcctcagttacttcatcgggtaacatgtccctttcaagattagtaggtcctcctgcattgcaaaccatgctattacaacaacaaacccagtagaagctattagttttgaagatttttcctggggcttcaggaggctgttcagctgcatatacaaatgtgcagttgtttgtacagttcttataaacaagtagttcacgagaatttatgcgaatggagattgtcatacagcgcctaatatgatacggacatactctaatgttgggacagttgaagtcatttatgaccgcacagtcatggcatctcaaactgtaagtccactgagcgcgcatggtggcactggctgccaccaatgggagctccatggctaggagtaaggcaaagaggagcatcacttcacgcaggagcctggacctgtgcccctcggagcccgcagtgtgcgtgcccgccgcctccagccatttgagcctcccgcgccgac

SEQ ID NO: 466613 - DNA, 1000 bp, Homo Sapiens; identical to SEQ ID NO: 157889

SEQ ID NO: 466614 - DNA, 1000 bp, Homo Sapiens; identical to SEQ ID NO: 336765

SEQ ID NO: 466615 - DNA, 1000 bp, Homo Sapiens
attttttttctttctacattttattatttcaaaccaggtgaacaattccataaaacatgtgaaaaaagcaaggaagtgttcaacgctgaaggccccgggcctgggacaagggcatgaggggcgtggccccccagcaggcagcggcggttcctaggttagcgctagggagctacattttaggttaatagagcctggggccagggccgctggggcagggccctcagtgacgttggcagttgtctggaacagcccttggaacccaattctgtggagggcagggcaggggtgccgctcgcacgggggcggccagcagagggacgggtgtaaacacgcagacacactcaaggcacggagtcacttggaaggggggctgggggggggcttgctggtcaggatctgacagttttaaatagtttttctctaaaaagttttctagatttgcagttttttttttttcctttactttcatttttttaaaaagctacgagaatgagcaggtggactgtggtttccaggaatggtggcgtctcacgcttcttgtgctttttcctttggggcctccgagcggctggggttgggggactgggcaggaggctccctgtaaacatttggacttgggctggggcaggggctggtgttgggcaaagctgggggtccaggctggagaagcaggggcccctccagacgcagccttgggagactcagcatgtgcccccctcccctcatcacagaacaagacaatggttaaaaaccagaacagatgcccagaagggggtaccatggccattaccagcatctcagacaagggcaggcttcaaacagggaggcctgtggcaacccctcccctacgtctggagctgaggggacagggggagctgagaacaaagagaggaaagaggagaaaagcggcgggggaacaggcggggagcgtgatcttcttgcccccatcttcctcaggggttggggggtacaaagtcggcggtggcccatcccgccaggc

SEQ ID NO: 466616 - DNA, 1000 bp, Homo Sapiens
caacaacaaagagaatctaagaaagaagactatgcctaagtatagggaaagtttagagaatcatttttagacaggacacattttgcagtagtgaatgtggtaggttttctgcctaagaggctcaaagtagctctaattcaaatgcctgaggccagcagcgactctgaatgtgactgtaaaagggtttctggtcactctgtcgcttggggtcgactccaagtcttgggctaaggcaatgggaagggaccatctctcgtcagcctgcagcttcataaagggagaatcagagacggccgtggctcagggcatgcacgaacgctcttgcagtcacggttgataacgtggaaaaaaaaaccaactgtgtttttctccccatctaccaagttctcctcgatgaatcaataaagggagaatgaataattgggctcccacccggagagattctgctgcagtgtcggcaatgagagtcggtggtttgggggtgggatgctgcgggaagccgtattcaatgacaacagaagctacacaaccaaacctgaggggacagaggtagccagaggcttggtggtcgacacagaacgggacagacggcagcgagatggaactagagactctgcctcctaccatggcatggggctggcagtcaggcagtccgggggcgccgctccgtcgcagggtggcggccaagtcctcacaagagctcatactgcttgaggtgcatccgctggatgatgtcgcggcagtcgttgaacaccctgcggatgttctctgtgtccacggcgcaggtgaagtgcgggtagcagtaatgtttgccgtcaccggtggccgtgctgatcctcaaaaacaggtcccggataaagaacttggctcttgtaactttgggatcttctcctgcatctggtgttgcgtcttcaggaacagtataatttgcatattctgggaaatagtcttcaatttttgatttccctgccaagactttttctgccagcatatcttgttt

SEQ ID NO: 466617 - DNA, 1000 bp, Homo Sapiens; identical to SEQ ID NO: 336766

SEQ ID NO: 466618 - DNA, 1000 bp, Homo Sapiens; identical to SEQ ID NO: 157891

SEQ ID NO: 466619 - DNA, 1000 bp, Homo Sapiens; identical to SEQ ID NO: 157892

SEQ ID NO: 466620 - DNA, 1000 bp, Homo Sapiens; identical to SEQ ID NO: 336770

SEQ ID NO: 466621 - DNA, 1000 bp, Homo Sapiens; identical to SEQ ID NO: 336771

SEQ ID NO: 466622 - DNA, 1000 bp, Homo Sapiens
ttttttttttttttttttttttttttttgggtctacagtaattttattgtaacagagaaaccaggccgcaataagtctacatggttagagcagatggtggttctttccagtgggtgaagcctgaacccagctagcagcacgcaaagcctagaatatcctctttcctggtaccaccctgcgccgctggactcacagtgtgagatgagaggctgcacaccacattcaacaaagggaggaggtccaaccgggcagagacaacatcccaactggagaaacttgcactatcattcaagaggatgccgagataaagtacagtttcctactctccactattctttgctgaaaagggtgagggtacagcatcagcagaaaattatgttcttcattcttaaataaatctcgataggatggagttgatggtcaatcaagcagtagaatgggatgaaaatctgcaatagttaaaaaatctttgcgtgtaaggaaaagaacggcaatgacaagggagaaaagagagccttctctttttcttaaataagacaggaaactgcattatttcccttgctggagtggcagcagcctcattggttttcataaaacatcatttctgcagtgcggcctgttgataaggttgttccaagatgggaggacagacacgaggccgactactcatgacagaactaggccttctctcaaagcctctaacgtgtgctgtttctcacgaggaacctgacacttcagttaaagcttctgaaatattgcaatggcataattgacaggttttttggtgcgatgactttcttgcacatgtaaactctttgagaaaagttggagaaaaaaggaccggggagagtttggtttaatattccagacgccagccatggatgcctctgccctgtgtcactacatgttcttttctgagaaacattcaaatgctgagtgttacacactgtggctgaaagaaatgatccactcaccaccatccaccctctctcattgtctg

SEQ ID NO: 466623 - DNA, 1000 bp, Homo Sapiens; identical to SEQ ID NO: 336772

SEQ ID NO: 466624 - DNA, 1000 bp, Homo Sapiens; identical to SEQ ID NO: 157893

SEQ ID NO: 466625 - DNA, 923 bp, Homo Sapiens; identical to SEQ ID NO: 157894

SEQ ID NO: 466626 - DNA, 1000 bp, Homo Sapiens
tttttttttttttttttttttttttttttctggggttttgttcttttttttattccaacaggggctgcgatgtggcaaggggagggatgggggcccaactgaccccctccctgggggaggtctcatagaaattccgaggtttctccccccaaaaaagagaggaagagaagagtggaggggcaccaggggacacccatctgtccagaggccctccccacctccagaagcgtggggggctgcgtcaagtcttggggagcctgagcagtcccagaatggggtcctctccgctgactgctttccgcttcccagagccgcccccgaagtccccagcccctggagtcctcggttcctgcgcccttctcgcccgcggcaccctctcgcgagtccactggggggcgcaggcgggctccagagccaggcctcggacttcgcggggaaccaaaggcaaaatcgcggcgtccggggcgccggcgcacaagtcctgtcccgcgcccgctgcgggagcggagactgctggggcctggggcgggccccgtcccttcggtcagtccgggcgcccgcacagccccgcccgtggtcactcgtgctccgccagctcccgggggccggcggggccaggccgcggccggggcgggctggtggcttcggcggggacgcccaggccacgcggaggcgcgccggcccccgaggcccgcagcgcctggatgcgccggcactcctggcagacgcgcacgtgggtgcagggggtgggggcggcgggtcgggctccgctggggggccccgggtcgtccaggaggcgctgcgggcccccgtgcgcgctgcccgcatccccgcccgcgccggccgagtagagcttgccgttgctgaggcgcatctcgcggaccgcgcgcagtgacagcagggcccggctcgggccgcccgggcgtcggcgccggcgggaacgcgacgtcttgcggcaagaaacggcgtggcgcagctcctgcagcatctcctggcacac

SEQ ID NO: 466627 - DNA, 1000 bp, Homo Sapiens; identical to SEQ ID NO: 336775

SEQ ID NO: 466628 - DNA, 1000 bp, Homo Sapiens; identical to SEQ ID NO: 157895

SEQ ID NO: 466629 - DNA, 1000 bp, Homo Sapiens; identical to SEQ ID NO: 157896

SEQ ID NO: 466630 - DNA, 1000 bp, Homo Sapiens; identical to SEQ ID NO: 336780

SEQ ID NO: 466631 - DNA, 1000 bp, Homo Sapiens; identical to SEQ ID NO: 336781

SEQ ID NO: 466632 - DNA, 1000 bp, Homo Sapiens; identical to SEQ ID NO: 157898

SEQ ID NO: 466633 - DNA, 1000 bp, Homo Sapiens
tttttttttttttttttttttttttttttgagtcttctaaattttatttagaataaaaccagcatggtagaaatacatcagtgatacaagtgaaaaagaacttgattccttaataaaatgacttacaagtgcaaaaatggaccccatatgtgctctgctttacttacacccaactctaacctgcgagcatattaggaaaaaagaagcaagtgcatccaataaaattatttgtaacttaatttgtatgaggcgggacaaggttgcttttgatccaagtctggtatttcttggttaacagggtgtagattccaggctttgtggcaacaccacattcatgacctccagagactatagcgtggaagacacctttacagatcaaggggccccctgagtcacccttacaggaatccttctggcctttggcatctcctgcacagaccatgtctttggtgataaaagggtcgccgttgtagtaactttggctgttgcaaagttttcgacttaggacagtaacagtgacttctcgcagggtgtcagaaggtcttaatgaatctggatcggtggctccccagccagtaaccttgcatttggttccagatctaagagaggttttggatcttatgtggagcatcttgacatgtttattgagttttgcggctgtttgaagcttaaccagcatgatatcatttgattgaggatctgatgtaactcttgagaatggtataaattttttgatctccagtgtttgtttggaggcctcattctttgagagagagtgtgcgcctaaaaccacagtgggagactggcctttggtaaaccgatattggcagtgggctgctgtcagcacccactgtggatcaatcagaacacctccacaaacgtgatgtccgccatactggatggaggccataaatggcctggaatgaggtgacacttctttccctccaataatttccatattgaaacacacatgagtcatataagccccaactattaggaa

SEQ ID NO: 466634 - DNA, 1000 bp, Homo Sapiens; identical to SEQ ID NO: 157901

SEQ ID NO: 466635 - DNA, 1000 bp, Homo Sapiens; identical to SEQ ID NO: 336786

SEQ ID NO: 466636 - DNA, 1000 bp, Homo Sapiens; identical to SEQ ID NO: 157902

SEQ ID NO: 466637 - DNA, 1000 bp, Homo Sapiens; identical to SEQ ID NO: 157903

SEQ ID NO: 466638 - DNA, 1000 bp, Homo Sapiens
tttttttttttttgtaaataaattatatatatatattgctaacctgagtgctacttctctcagggaaagccagggagcaaggccaaatggccgcagaggggtcacacatgggatgtcccaggagtcctgggtggctgggcctggctgggaaacaggcagaccccgacccggctccagcaaggctgcggcggagacctcctcagcctggaggtttcctcagacacgagtcaactgcgcaaggcggcaggcaacagcggtgaccagggccgcacctttgccggacccatcctctgactgcaggaacgtgaccacacagcgaggggccagctcccgcactgtggccgccaccaggctggagaagcgcgggtgcagcttgtagagcgttccatccacccccacagacactgccagctcttccaggccccggttcccccggatcttctccaccacggcagctacacccgccccacagagctgggcagccctctgggacacagcctggcacacctctagcaccatcagggcgtcatctgaggtcaggggtagccccagatcctctaggatggctcggacctgccgcagggccaggctgtcactttcgatctcagagaggaacttggtcttgaagatgtccctggtctgaaggcgctggatctgctggccccggaagagaacgccaaggctggttaaatgtaaaaggatgtggcggacgatctcccccaggtacatgccgctgatcatcttttcaaacctctgcttgccggggttgatggacgcctggtccacacttgcatcaaagcgggtgctgagcatggccagagagccatcgtccccaaaggcgccccactccatgttgatgcacatgcggcctgagtccccaggcacgcccgccacattccggagctcctccatgtagcaggcattggtgccggttccgacaatgaggcctatctcgcaacgggggtcctcatagccacaggacatcatggtccccaccgtg

SEQ ID NO: 466639 - DNA, 1000 bp, Homo Sapiens
tttttttttttttttttttggaaggttctcatgtgttccatttattttgtctctcaaattttaggaatcttctcctttaattaactcatcaacctctcatggcaagaatttgagaaagtaaatttatactaaggttctaattttaatagggaaggaagaagttacagctcagtgcaccatgaagttgagacagagatggagacacctcagccccacctctctggaacaggaaagatgattggggagggagcacaggtcagcgtgggaagagggtcatggtggacatgggggtggggtggtctccccacctcctcacattatgcctacacgaacacagacacatgcaggtgcctttgcagaaacaaagtcagggttcttcaagtcacaaagggaagggcaggaacaactcttgcctctcagtcccacacaaggcagctgtctcacactttacaagctgtgagggacacatcagagccctgggcactgtcactgcttgcagcctgagtgtaactccctccttttctatctgagctcttcctcctccacatcacggcagcgaccacagctccagtgatcacagctccaaggagaaccaggccagcaatgatgcccacgatggggatggtgggctgggaagacagctcccatctcagggtgaggggcttgggcagaccctcatgctgcacatggcaggtgtatctctgctcctctccagaaggcaccaccacagccgcccacttctggaaggttccatcccctgcaggcctggtctccacgagctccgtgtcctgggtctggtcctccccatcccgctgccaggtcagtgtgatctccgcagggtagaagcccagggcccagcacctcagggtggcctcatggtcagagatggggtggtgggtcatatgtgtcttgggggggtccgtgcgctgcagcgtctccttcccgttctccaggtatctgcggagccactccacgcacgtgccatccaggtaggctctca

SEQ ID NO: 466640 - DNA, 1000 bp, Homo Sapiens; identical to SEQ ID NO: 336790

SEQ ID NO: 466641 - DNA, 1000 bp, Homo Sapiens; identical to SEQ ID NO: 336791

SEQ ID NO: 466642 - DNA, 1000 bp, Homo Sapiens; identical to SEQ ID NO: 336792

SEQ ID NO: 466643 - DNA, 1000 bp, Homo Sapiens; identical to SEQ ID NO: 336795

SEQ ID NO: 466644 - DNA, 1000 bp, Homo Sapiens; identical to SEQ ID NO: 157905

SEQ ID NO: 466645 - DNA, 1000 bp, Homo Sapiens; identical to SEQ ID NO: 336797

SEQ ID NO: 466646 - DNA, 1000 bp, Homo Sapiens; identical to SEQ ID NO: 336798

SEQ ID NO: 466647 - DNA, 1000 bp, Homo Sapiens
tttttttttttttttttttttttttttttttccaactacatgtctattttttattcaatatattaaatatattaatcagaaaagtcacatactataaatccaggaaaatacacaaatataaatgtcagaatctgtcatttgtcttcttcctagagtgacagtttatgtacatgtggaaggagggtaggaagagagagccagcaggaggctggaaaggctgcccaggaaggcggggcccatcccttcctcccagccccgctcccacctcaagctctttcttcctgtatttacagcagcactgggcttatttacagcacggcgctatgtgttaaaaacggtttatcttacaaaaaacataaaggccggggccaggctgggggggataagacaaatcgtggggtcacccccatgaaggcatccccctccccaagggcttgagctccctgcaaacctcctggagcaggtgagaaggtggagtcattctgcagctcaagcccaggcttgggggtgctctgggggtccgtggactaaaggcacatggggtggcatatgagagtgcgcatgtgcacacgtgttcccaggcaggggtcagaagggcagcgtgtccatgaagatcttgtcaatgatgggtggagggggcaccaagtcctccagcttgaggtagaagatgcgctgcaggccctgggtgcacagggtccgcagctcgggcagtttgcccaacagacgtgacaggcagctggctggctggggctcgcccgccacagctgccacgtgctccttcaggcagctggcgatgcggttctgcagctcctccacccgccgcggctcctgcagcccatgccggtcggtgatgaggacaagggcagagaggcaggcgaaggcagggacatcgacaagcaagctgtgcagggaccttgagaaggccaggatactgtcaatccagtccccgaagccacgggcacactgcagccggtgtagcaccaggcctgagcagaagatg

SEQ ID NO: 466648 - DNA, 1000 bp, Homo Sapiens
ttttttcctttagaattattttattaaatcataaatgtacaacagcttcttaactctacacacgcacttaaatttttttaaaggaaaaacgttatgtcttattacaccatgatcctggctaatagcttttcaaaactttgagaaaaatcttaaaaaaggtttcacatgtcacctgaaacttacaaatttaacattatcaaagaaggaatgcttctacactcttacaaagaccactagaaagaaacaacaattaaaaagctaagaaactgtctcaaaggcatttttttttacaatccttcctccacagtaaggtaatgttattaaataatccaatccattcacaaaatggctctctgcatctgctctggtgtcttctgccatatcactgcatatttatgcatgactgagataagagtttccttaacattgttatttcgataacctgaagctgttctgttacctctgggctctcatcctctcctatttatacagtgaagcccatggcaaataggaagaagctcagtatcggctcctcccaccataacccccacttcctccactgcctcctggaccatagtttcctccaccatatggtccccccatgttcctgctaccaccaaagtttccactcttcattggaccgtagttagaaggttgctggttataatttccaaaatcattgtaatttccacttccataatttcctcctccatagttgtcataaccacctccgtagcccccaccctggttgccatatccaggtcctccaccaccatatcctcctcttcctcctccataaccggggctacctccaaaattgccacctccaggtcctcctccatacccattatagccatccccaaatccacgtccactgccatatccatcagatcctcctctaaagttacttcctggtcctggtccgaaatttccaccgccaccacgtgaatccccaaagccaaagttgcctcctcttccactcctagaactctgaacttcc

SEQ ID NO: 466649 - DNA, 1000 bp, Homo Sapiens; identical to SEQ ID NO: 157906

SEQ ID NO: 466650 - DNA, 1000 bp, Homo Sapiens; identical to SEQ ID NO: 336801

SEQ ID NO: 466651 - DNA, 1000 bp, Homo Sapiens
ttttttttttttttttttttagaaaagaatcaatatattttatttggcaaaaagttaaatatcatctcaacacaacaatttggtcagtaggccttgaggtaactattgcaaaatatacagtgtaagttcagtctgatggaaaccccagattcatcaaggatacaaatctacagtagcccaatggcggtttcatagtgtataatttattatcaataaaattaactccgttacaatcagcattcatttcctccaattaaaattaagcataaaccctaggtagtaaccttctgcacatatgtatagctccgaatttcctcactgttcgtctggtgcaaaaacaatattcaagcttgtctgattatgcatattttctttaatcatatagattatatatacaatagacaagacaggactatatagataatggacagacttaaatgcccgcatttttaaggtggagaaaatgatgaatctatgcatccccgagaacacttaaaatttttttttatttcactgggaaattcttacagctactttacaatcataggttaacagcctagttatacagaagacatattccactacagagctatactctatgcaactgtttttttcccctcataaacaacctgagttcaaattgaattctatcttccacaatcacaatgggtgcatcacccagtacacagaagtttgaatcacaaaacataattaccacaataaaacacagtgttcaagtatcttggcagagcaatctgccgcacaaactgcaaattaaattaactacacagactaaaaactatacagcctaccatcaacagttgtgcattataaaaaggtagtttctttccttttgttttaagtcaggaacaggtagatttttaaaaatatatatacaagctaacacacacagctatcagcactaatgcccccccctcaacttttcctttttcttatagaaaatggaaagcttacaatacctcctccatcaaagcggcag

SEQ ID NO: 466652 - DNA, 1000 bp, Homo Sapiens; identical to SEQ ID NO: 336802

SEQ ID NO: 466653 - DNA, 1000 bp, Homo Sapiens; identical to SEQ ID NO: 157908

SEQ ID NO: 466654 - DNA, 1000 bp, Homo Sapiens; identical to SEQ ID NO: 336804

SEQ ID NO: 466655 - DNA, 1000 bp, Homo Sapiens; identical to SEQ ID NO: 157910

SEQ ID NO: 466656 - DNA, 1000 bp, Homo Sapiens
cagagtgggaaacaactttaatgagaaacccagtttcccagtttccctttcatttcaagactatgacattccgacttctttgagggcttccattgcctaggtggcctttttcttgtagttaggcattcttagagctctgggcatgggcttgtcttggccaaaatgtcttttagcaaagtaatcatatatgccaataggcaaatagtgagcaaggcagatccacaagtaagcgcctttccctggcgtgtaataggcaaaagggctcttcgccaagatagcatgctggatgtcccgcagcaccggagagaagtccttgctggctaacgagttgatcaataggaggaaattccgctgtgctaagatgtagtcctggccgtagtcttcctgtacctcagcggggaggtggtccagaatgtccttctccagcttttcccacttgtcactggtgcctgcgatatttgttaggaagcctccaggttggatggaagcaactttaattccccacttggaaagctccagtctcataactgatgagaacatggtcacagccgcctttgatgagccataagatgccagcctttccattggggcccctcctcccatgctgctgacattcaccagcctccctttggattttctaagaagaggcaaaaacgtctttgtgacctccacagttccaaagaagttcacggccatgcattgtttgtagtcagtcataagaagaagctccccatcagttggaaagccaagcaccccagcattgttgatcacagcccacagtcctctgtcctgcagcattgctgcaaccttgctgtaagcatcttttatctgcactggcttcgtgatgtccatttggagcaccgagaggcgcggagagcaggttcttcgcaattcctcagctcctgggccattttcattcaaaactccggcaaataccgtgaagcccagctcatccagatacttgcacaaagcatggccaagcccgcaatcaccacctgtc

SEQ ID NO: 466657 - DNA, 1000 bp, Homo Sapiens; identical to SEQ ID NO: 157911

SEQ ID NO: 466658 - DNA, 1000 bp, Homo Sapiens
ttttttttttttttatttaggtctataactatattttacataacaaaattcatacatgcaagtaacaaagtacacaaaatataggtgaaagcaatgttaaagtgccacacaagttttaataaattaatgactttttatttgaagcagaagaggatgaaccgccctccccccaaaaagtcaaaagacttcagttatcctgggaagaaagttctagctttggagggaaagttcatctctgaagggcaggatcatagaagacagtctagaaggcccatagcatagccctgacagtcacagctgacttatcacgaagggccattcaatcaacctcctcaatgatggggccggtgctggggtccccctggcgggcttgagtgccacaactgctgcccccagggacaccaggccccccatagagcctggagaagatggggcgacagatttgctccagctccctcttctgatgctcatactcctccttctctgccagctggttgtgctccagccaggcaaggacttcccgacacttgtcttgcattttgcgcctgtcctcttcgggaatcttgtccctaaggctttcctcttgcaaagaacctttcacatggaagacatgggcctccagcgagtttttggcagccactctgtccctctgggcctcatcctcagccttgtactgctcggcttcatgaaccatcctctccacctcctccttgctcagccggcccttgtcattggtgatggtgatcttgttagccttacctgtgctcctgtcagtggctgtcacgctcaggatgccattagcatcaatgtcaaaggtcacctctatctgggggactccacgtggggcaggagggatgccactgagttcaaaacgccccagcaggttgttgtccttggtcatggccctctcaccctcatacacctggatgaagaccccaggctggttgtccgagtaggtggtgaaagtctgggtctgcttggtggggatagtggcgttcct

SEQ ID NO: 466659 - DNA, 1000 bp, Homo Sapiens; identical to SEQ ID NO: 336808

SEQ ID NO: 466660 - DNA, 1000 bp, Homo Sapiens; identical to SEQ ID NO: 336809

SEQ ID NO: 466661 - DNA, 1000 bp, Homo Sapiens; identical to SEQ ID NO: 157912

SEQ ID NO: 466662 - DNA, 1000 bp, Homo Sapiens
tttttttttttttttttttaaaaaagagcattttattttaataaagaataaaagagatcaatatactgttttaatggatacaaaaataaatattcattcagcatattaaagatatgtgctttgacattcatttgaattggagattcaagcctattgttatcttatgaacacttcagcaaacaggtctgccattcttaaaaatataatgctttgttggacaaaagggacaagccacgtcccctggtcctctcctctattcgcctgtgaactccatccacacgtaaaggacctctgggtctgactgtcccctccacaggcatggtgctgggaaaaggaaacaggcatatctggcttttcagattttaaaccggaaactctcacagtcacaaatccaccatgagacttgggagattggatgagctgtctcccaaaccctaacaccttccaccttctcaaaatgaaggctgccctttcactgggaggttctgaatgcgggattggtgctgactcaggctgggcacaaaggagaaaggaggacatggaaaatccgacaattcgaagtacaaatatttcaaacacatgtgaaaaccatttggaaagaagaaaagaggtatctggaatgatttcatgacagaaatgaaaaaaataaatttagttctaatcttcctggcaacaaagccccagaggagaaggtttcattgtctgaagataaaaacacacccgtttgcctggatatgaacacatattcctgcaccaaattctagaaagaatatactttcttctaacaagccaagagtttttcttgtactcattaaagggggctttaatctaaatatttttaaatcttattaaaatgcataaaagtaaaaagatatttcacatagaatcaagcctatgaaatcataaatctataactctaacaaacgataaagacaaaaacaaccttgttttcacaagttgatttttaaactccaaattcctttatcgaagcagctatctg

SEQ ID NO: 466663 - DNA, 1000 bp, Homo Sapiens; identical to SEQ ID NO: 336812

SEQ ID NO: 466664 - DNA, 1000 bp, Homo Sapiens; identical to SEQ ID NO: 157913

SEQ ID NO: 466665 - DNA, 1000 bp, Homo Sapiens
tttttttttttgtgaagagctttttagtagctaaatatggcaccatgtgttccaagggcaatataaattacagtatgcaaaacatactgactggctgaggtaaaacgcactgctcctgcctcacgtcaccatgaggggaaacacacatatgcttttaaaaacatctggcttataaaaaaacatcccctagaaaggcctccagagaggggctgtgaggctcaccctctgccgcgctcaggaggacccgccggctcagccctggcccctccactgcagccatgggtggcgcctccccctactgcctgcccagggctctgtccaggttgctcttgatggtgtcgaggaagtccgtggtgttcaggaagtgctcgttcagcttcacattgctgaggccgtgaatgcagcccgccaggtccttggtcatggctccactctccaccgtctccacgcacaccttctccagcatctgggcaaacctgatgaggtcttggttcccatccagcttcccccggtgctccaggccacgtgtccaggcaaagatgctggcgatggggttggtgctggtgggccggcccttctggtgctcccgatagtggcgggtgacggtcccatgagcggcctcagcctcaatcgtcttcccatcagggcagaccaggacggacgtcatcaggccaagggagccaaagccctgggccaggatgtctgactgcacatctccgtcatagttcttgcaggcccacacaaagccacccgaagacttgaggacctgagccaccatgtcatcaatgagccggtgctcataccagatcttattcttgtcgaagtcggtcttatagtgcttgtcaaagatctcctggaagatgtccttgaaacgcccatcgtaggctttcagtatggtgttcttggtgctcatgtacagcggccatttcttctggatggcatactggaagcagctgtgcgcaaaacctgagatggactcgtcggtgttgtacatgcccat

SEQ ID NO: 466666 - DNA, 985 bp, Homo Sapiens
gggcttggaatttctttattaaagaataaccaaataatataagaagttttaatagtaaaaattaataaaaagaaaataatatattgactaaatattagattaacatattttgatataacacaatgtaaaagtacacataatattacatggacaaaaataatttaaatctaataaataaataaatatttcaatagatagataattagatctatcagcatggtcatctgtaaaggactagtgcctgcacaggtaaacatgatgtttccttacactcctgaaaagatctgaaaattttgattcaactcatgcggtggttataggagaaatgagtctttgaaatggcagaagtcatagaagtgtggactggtgtattagtcaatacagatcatttccatgttgaaacggtttcattccttcctccttaatctttcttgaaaaatttttgataaagagaaggatctcatgatttctgctctgacaacctcccaagcacaagggctgtatttcttctctgtcagataaagagtgattctttggaagtatttcttcacagccaagatggagtccacattcatcaggggagtctcttccaccccaacctcctgtatcacgcaggcttccatgtcattcagctgctggttaagttcagtggaaaatttttctaggaggctctgttcccaagtagcagatgagtcctttgtgctgaagagattgaaggtctgctggatcatctcatggaggacagagatggcttgagccttctggaactggttgccatcaaactcctcttgggggaatccaaagtcatgtctgtccttcaggcaggagaaaggagagattcttcccatttgtgccaggagtatcaaggccctcctattacccaggctgtgggtctgaggcagatcacagcccagagaacagatggatttgtagctgagcaccagcacggccatcagtaaagaaaaggacagggccattgggatgt

SEQ ID NO: 466667 - DNA, 1000 bp, Homo Sapiens
cgttttcatttaatttttaaataatttatatccctctgaaacaaaaccctgaggctcaggtacatcatctgaggttctcttaaatagaagagttggtacaggacaccggagaaggccgggaggctctggatcggtaagtgctgaagatgctgaggctgtggggcagcttttcccgggacaaccacgtgggagagccggctcacctggtccccacggtgaggcgcaacaaggaggggttggcacaggccaggcacctttataagccagagagaggtgcacaggccagaaagaggtgccccccagactcacaggagccccgtggtgaggaggagggggaacactgcagtcaccagcagacagaaggaaagtggccccagcatctggccacatgggaacgtgcaagccaaacgccactccctgctccctgcctgagcgccattcgcagtcttgtttcctgtttcctctcagcaccctcatcctaacgggctgagctggcaagtcccagacattggaggagtgacttcaagtttgaggccctgggtattctccagggactggaaccttccccaggatccagaggctgggatgtgggttttggcggggagtaaggggaagggacgtgcatttcccaagccccacctgcacgagcactgttgtcccccaggtgctttcctccacattgtgacatcggaaaagcttatccctggggtccaaaaacccaaccttccccaacagggccctccgctcctcccccataggcccctccgctcctctgtggccctggtggaggcggagcatggtctgccagcgccctgggctaccatggagagagctccgcggggcgtgcaaggatgcggccggtcacgtccccctctccttcctccggctggtcctctggttgctgagctcactcagcttcttatccagcctcctctgcagctgggccctcttggctgggtccagggatccgttcttggtcccgctgccggcatagaggacc

SEQ ID NO: 466668 - DNA, 1000 bp, Homo Sapiens; identical to SEQ ID NO: 336815

SEQ ID NO: 466669 - DNA, 1000 bp, Homo Sapiens; identical to SEQ ID NO: 157914

SEQ ID NO: 466670 - DNA, 1000 bp, Homo Sapiens; identical to SEQ ID NO: 336817

SEQ ID NO: 466671 - DNA, 1000 bp, Homo Sapiens; identical to SEQ ID NO: 336819

SEQ ID NO: 466672 - DNA, 1000 bp, Homo Sapiens
atctgtcaccaactttatttctggcttcagtttgatagtcaatgaaacaacttgttcaatgtcccctcccccagtgttcaaggtacccttctatatattaactctttgctaacatatttaatatttaaatacaaggaaaaacaataaattactcgttggctgagagctggctgctggctggcagacaggagcggctgttctgcccctctcctgaccctgcctcggatgaggctccgaggccccaggaccccagtgaggtagcagaattctgtacacagtacttattaccagggactcctggtgtccactgctttagtgctggggccctgagtctctgaacccttggctccaagtgctagcagccacagtcttccccaatccccaacggtgacaaacacactcatttaaataacacacaataataaataagaccaagaagaagtgtgcctgagctgctgtctgcctcagttgcctgtgtgtgaagtgggtccctgtcccaccacatgtctggcaaggggggcacccactgtaatgctacagtgtgctctagggcaggggaggggtgtagggacatgtcatccctgggtccaccgagctcagggccctggacagaggaggcccaccaggctgagccctgggcaaggggaaggctgaggtcggctaggctgaagacgggcagcacaggctgaggtctaagctaaggaattttacccctccctaaccctccttcccgcctacccaagacatttttgacatcagaaagaaaaatgaatctgcaacttcaatagtcaggtcctgtctctgcaaataatgatgctttcgaagtttcagttgaactgtccctcgcgaaaaagtttctttaaatgtaagagcaggtcctttacaaactgggccacctcgattttggtgtctcggacatgcaagctggaaaactgcccagctgagaccttgtgcgggcagaatccgctcagcatcctctgggtcttctcgatggcactgc

SEQ ID NO: 466673 - DNA, 1000 bp, Homo Sapiens; identical to SEQ ID NO: 336820

SEQ ID NO: 466674 - DNA, 1000 bp, Homo Sapiens
ttgttttgttgcaaaagtggtacagaaaaaggaagtgtgaccacctgcacacgattgttcttttaccagtatgtgtatatatgtaatgtgtggaaatgcctgtgtgtgtgtgtgtgtgtgtgtgtgtgtgtgtgtatgctgatatacacagagataagtgtcacacagacataccttatgacctgggtaattgggtaggaaagtgcctgtgatgggccctttcaaactcatggctttctagatgctatttgggttgttctagtccacactactgcagactagattggttgattcaaggctcacaagggaacctcaaggggggaaaggacaataccccgtttaaacaactgatgtcatcagtgtgatttcagaagaaataaagggtacaccattctccctttccctcccaattcctgtctctttcactgcttcatctctgagccctggctaaggattttttccacatcttccttcatctgtttcatcaggttttgtttttaatttacttttgtttttttttgtttttttttttgttttgtttttaatttctatttttctggttaactcagaaaccttaaaaatttcttcattttgccactgtcttctctggacaactcttgctccctttccccctgggctgggcaactctatgagcacccacactcctccacgatcatgttctgaatgtcctttttgatgatgttttgaccatcatcatagtacaacatggacatgggtctcagcttggtgggcacacagcacgatttgaggttggcaaaggggctatggccccgcatgcggtagtggttgatgactgttgagtggaaggacagtgaggacccggacgtgcctgctatatggctcgggcactcaccctcgcagtagttggcatgatagccagagggagcaatgatccagtcattccagccgatgtccttgaaactgacaaagaactgtttcttacagcagatgttgaccttgccatcacactccaagcccc

SEQ ID NO: 466675 - DNA, 1000 bp, Homo Sapiens; identical to SEQ ID NO: 336821

SEQ ID NO: 466676 - DNA, 1000 bp, Homo Sapiens
ttttttttttttgactttgaaaatattttatttgaatagtaaatagttatacagttgaaacagttctattgaagctttctataaatagctaacaattaagaaaataatgtatgtagaaaagagattgcatttaaaagtaagagctgtcggttgtacaagggccctggggaccctcgaagcagaataaatgataggttgtctgtaattcactcagataggtataaaagttaaaactttaagcagatccctttagaaaaaggctctcttctaaaacgcacagtggaatgtcaagagtggcagggtggggagggggcagcgcgccaaaaaaatctgcaatcaaataatatcataatcttcataattaatataaataaataaagaataaataacaattactcataaatcaacatatacatttagagggaactgatagtcctacctcaacaaagatgatcaaaccaaaaagtcttacgtgaaacactgaggcagttactacagcatcttcggaacactcccttccctccccccacaaaacaatcccagacaacagttcaaggcatttgtggctatactaaagaaaactcttttttaagcaatttgatttgttcacatacaaaaaggtaaagccagactccagcagttcacaagccataataaagctaatcgtgtgggaagttcaatttacagcctgtgaaatataaaggcatttattcctcaagattcacccaaaacaacccgtacgctacatacatagagagcagagattggtaggcgaggcgagaccagaccgcatttctagaccatgaacacagcgaatactagcaagaaaaaaagcttctccccgccaaggggaggcttccaaccacgagacaaacgcgtacagcttttctcccttgtacagaaagagactgactcctgttgcgccatgggggaggcggagggacacaacgtaaaagtgggggttccaaaaggagtcaaaaggagagtatggggttaccgt

SEQ ID NO: 466677 - DNA, 1000 bp, Homo Sapiens
cactgaaaatagatttcatttcattcaaattagaaatgtgttctcccaaaccgcctcccaacaaaggtctctgcttgataaatgaaaagatagtaaaagaaaacttcacatttctttttatgtggatctatcaaaaggtacataatcaaaacaactttaacacccgacctatccatgaggagtctggatgattcactctgaaggaaaaggggagagaagagagaatcactgctctgatttgaagtgtgcaaagttcttatctatgtcacttaacactggtataattaatacagaaaggaaaatgaccctcaagaggaaggtttcattgagcagagcgtaagaggaacaataagagggtaggagacacctcctgagaaggtttgcttgtgttcagctgaagattaataggaaacagtgaaaaagcaacgtcctgtgatcagtaactttaaagacaagcttggttctctctttctggcactactgacattcccaccattctagcttccaaattctggaaaaagagaagatgattaacaaaaatagagaatgtagaaacttctggttttgtgcctacaggattggcaccagaccctcagtgctcacttgctccatctacaaggcagcacccctcccagaggcagccagggaggcctctccaccagggcctgcgctggctggtggtgcggcttcctccctgggcgcacgaccaagtgcacgtctcctacttggccatcttgcggatcatgtagttgaggatgcccccgttgaggaaataagtgagctccacatcagtgtcaaacctcatgacagcctggaaggtcttgccagtatccagcttgacctggactttcatttgtggtttgaggttttctggaataatgatagtgtatcgttcttgccctgtgagccccagggcatctgcattctcaccagggagatattcaagtgggatcacacccatcccaaccaggttactgcggtgaatgcgctcgtagctctc

SEQ ID NO: 466678 - DNA, 1000 bp, Homo Sapiens; identical to SEQ ID NO: 157916

SEQ ID NO: 466679 - DNA, 1000 bp, Homo Sapiens; identical to SEQ ID NO: 157918

SEQ ID NO: 466680 - DNA, 1000 bp, Homo Sapiens; identical to SEQ ID NO: 157919

SEQ ID NO: 466681 - DNA, 1000 bp, Homo Sapiens; identical to SEQ ID NO: 336826

SEQ ID NO: 466682 - DNA, 1000 bp, Homo Sapiens; identical to SEQ ID NO: 336827

SEQ ID NO: 466683 - DNA, 1000 bp, Homo Sapiens; identical to SEQ ID NO: 336828

SEQ ID NO: 466684 - DNA, 1000 bp, Homo Sapiens; identical to SEQ ID NO: 157920

SEQ ID NO: 466685 - DNA, 1000 bp, Homo Sapiens; identical to SEQ ID NO: 157921

SEQ ID NO: 466686 - DNA, 1000 bp, Homo Sapiens; identical to SEQ ID NO: 157922

SEQ ID NO: 466687 - DNA, 1000 bp, Homo Sapiens; identical to SEQ ID NO: 336831

SEQ ID NO: 466688 - DNA, 1000 bp, Homo Sapiens; identical to SEQ ID NO: 336832

SEQ ID NO: 466689 - DNA, 1000 bp, Homo Sapiens; identical to SEQ ID NO: 336833

SEQ ID NO: 466690 - DNA, 1000 bp, Homo Sapiens
tgtagtcaaaactggtccaagagaccatgaagcagactgaacctctgctcctggagaatgctcccagccctgggcctctagctgggggccacagtgacatctcaaatgggtggttcgagctcagtttccttgtttgtaaaatgaaggggctggactgaaagctcagcatgggccttcctggccatgggctcttgagagctgacagtggaagcttctgtgttccacgatgctaaggttcaggatgcgaggttgaggccctaggatttggccacatggaactggagacacccacttcccaggctcacaccacctttctttatttgtaatgagtgggactcttcctccccatggtggtccaggccccagaagcggccctgcagttgcagggggaagccaagtgtacagggtgggcacagctccttccatcagaactacagctccacagaccagcaggaaatctccactcccgggggcccctcctggtaatccagcctgcgctctctggtggcagagtggtcattgccctgaaccctcagcgtgcgtctgccgtcatctgatgctgctggagatccccagagcacctcctggtaaaactggccaagggtccctccaacgtggctggagaagcggtcagtgtcacgcagaaggagccggagcccctccccacggccatcccagaacaacaggccgatggtcactttgtctgggtcactgagcagcaggagacccgtcttgtccatggtcatcttcaggccgggcatcactgagaatagcgtctccttccacttgtacgcagagcttcttcggttccgagtcaccaccacgtgttcaggggatgcgtgaacccataccagggggttcttgaaggtcacttcgatccatgagaacccagccttctccctctcatactggccagtcacctcaaccccttgctcagggtctgagagcaggttcactggcccctggcggtgtctggggtccacacagagccgctccacac

SEQ ID NO: 466691 - DNA, 1000 bp, Homo Sapiens
ttttgtctttgagttttattaggaaggggagtccgtcgtggtgtgagacgttagaccggaaggtctgggcttgctaaataaaatccgcggtctggcacctctggagagggcagagcctcctcagaagagctggcctgaggaagaagccctttgccccctccccttctataagttagtgtcatttggctctgggaacgctggggcccgggtgggcaaaacccctggcatcggcggtgcccccccttagtggctggcacctggtcctgcaggacccggtgaactgccctgcaccgcggggctccagtctcaagccggcatgcacagtggggacaaagctgcaggtccacatgtcaggtgagcggcccgcggggacaggagtccagcctcatctctcagccaggctggccaggatgccaatgagattgtccagccccagcaaatagccgtcctcgcggttgccctcctcccagggccgccggtggtccaggatctggccatcggggaggggcgtggtcttgccgaagtcgatgagccacacgccggcgcgatggcagtgatcgtgcacaaagaggagcgagctgccgatcacctcgtgcctcctgaagaactcggatacctccagggtgtcccggatctgctgcaggcggttcagataccgcctcagcacttcctcatctccttgcacaaactcttcaaagacgcgaagcacctgctctcggcttcgcgtagtcttgaagtcggtgctgcaggagccgtccgctttcttgatgccctcgatgcggaagccgagggtggtgctggagctgatgccttcccgccactgcatgtagcgcggcttggtgacggcgcgctgcgcgtgctcctcctccgtgggagcttcaggatccaccgccagcattttcttgtacatgtccttccgcagcttgggccgctcacgggccttggtcagctcctcctctaggtaagtcctgacgcccattttgcagtcgagcacacaagg

SEQ ID NO: 466692 - DNA, 1000 bp, Homo Sapiens
ttttttttttttttttttggtctccaaggctttattcaggaaggtttgcatctgtttgacaggcactgtgcaggggtttgtaacagttcagttttctccaaggtcccatggggagaggggtgcagaacaggaagagagcctctcggcaggcggggggggtcctctcctccagaacaaaaggcactgacgaggtgaccaccccagagccaggggctgggttatatacacatggggtggacagatgcagagaaactcaaagctaaatacaactgaaggatgaaagagtccatcttacagggccagggctgcttctgggctctttctaccaagtgggaaaggaagttcaaaacaaaggcaaagctttcaaggagaaacaagagtccagcctttcggtcttagtgttctgtgcaattttaaaacccaacaaaataaatataacttaaaaatgtcttacatgacactaaaggcaagcctgggaaaagcaagcagttgaagaaaccttccgagaatgctaagcagtgctgaatgccaggaactcgtggggccccccgcaggacagggcaagaggaccctgcgcccattcacctgggcacaggtacacagagtttgtcctgcctgctggcacatgcactgccaggacccaaggagtccctgtggtgacgagggctgggcaggcacggtcttccaggctgccagggcaggggttctgggagattccatttcacaatccatctatcccactgagacaaagggaagggccagatggcagggaagcgagtggcaaaatggcttgagagacagagtaggtgtagaagagaactagcacggtaaatacaaaaaaagagaaaaaaaaaacagaaaacaaaaaccctaagtaacagaataaccctaaaatgatgctacttcatactatgttcacatatttaatgtaacccacagccaagtattgccaataagaggccccatgggcctcctttaataagcacatcatttgcatatt

SEQ ID NO: 466693 - DNA, 1000 bp, Homo Sapiens; identical to SEQ ID NO: 336834

SEQ ID NO: 466694 - DNA, 1000 bp, Homo Sapiens; identical to SEQ ID NO: 336835

SEQ ID NO: 466695 - DNA, 1000 bp, Homo Sapiens; identical to SEQ ID NO: 157923

SEQ ID NO: 466696 - DNA, 1000 bp, Homo Sapiens; identical to SEQ ID NO: 336837

SEQ ID NO: 466697 - DNA, 1000 bp, Homo Sapiens; identical to SEQ ID NO: 157924

SEQ ID NO: 466698 - DNA, 1000 bp, Homo Sapiens; identical to SEQ ID NO: 336839

SEQ ID NO: 466699 - DNA, 1000 bp, Homo Sapiens; identical to SEQ ID NO: 336841

SEQ ID NO: 466700 - DNA, 1000 bp, Homo Sapiens; identical to SEQ ID NO: 336842

SEQ ID NO: 466701 - DNA, 1000 bp, Homo Sapiens
ttttttttaaagagaaagcctgaaggtcccttgtagtaaggtttcaggcacactgatcgaatctctcatttgcttatgtacagaacacttttacatttgcttttaaatttcatttgttggcttgaaagttcttgggaagcatctttaaaaattattgcctaataaatggcatttaatccagatcatgccttattgtggttaatatctaacattccaaacaccatattttcctccttgattcagtcattatggaatgacataatgattttcatagttaaaaaatgcatttgggattcatttcacctccttagagtctcagacttaactttattttttgtgcggcttattcaaacagtggttttccttatgaaatcatttaagtaggaaccatctggaaaggttactgtgcaagagatgccatgacaacctttttcgggtttcccaggaaacatgggttgctatggaaactgcatcagtcaggtccgaattagtaacttccgctggaaggggtgtctgccactttaatcttcttgtgatactgccgaagcttatctctcagatgcattaggaaattttttgtttctctcagcaacactgaaaacatctgtttctagactttgatagttgttggggctgggacatatgcacagaacttcacaggaatctgttagtctaatgctttagaaatgcttagcaagcccgaaagaattaaactaattagtcagatcaggacatcttgggcatttccctttattcaaagttgtagagacacttaaaattccgggaaaggggattcaaataggaatttaagtcaaaaaccaaataactcatggtgggtttacaagtcattattctagttagactcttcatccacatatctacagggtaggcaaccgaaatacatattcaataaataacgttgaaaggtccatcaaaccgaagcatcatttactacgaattgatgtgcttaggaaagaaacaactgcctttaaaattctga

SEQ ID NO: 466702 - DNA, 1000 bp, Homo Sapiens; identical to SEQ ID NO: 336843

SEQ ID NO: 466703 - DNA, 1000 bp, Homo Sapiens; identical to SEQ ID NO: 336844

SEQ ID NO: 466704 - DNA, 1000 bp, Homo Sapiens
ttttttttttttttttgcacagagcaggaggctttattgagggagatacagaagcgggcgtgggctctcgtgccagccaggccgcggcctccactcgtcccacacggccctgcggctcctgcacacccctccctcccgggctcctggacagcaggcaacatagaggagtcttacccagccttggcagaggtgccgggagggccttcagagtctgtccaggggagggttggggggacacaggacagcccttctgtgctgtcgatgacatgcctgccacatctacccatctgtccaccgcctggtccatctctgcctgaggggccctcctgtcacttgcaactctggagccgggtcctgtggtgcttctcctcggtcaggagggggatgaaggtgtcgctgtgggagagcttcagccggctgctgcagctcggcgcctccttccccgcaggctctggagggaggttgtccaggtcactgcgggagcccccggtcttgccctcgcccccgctgctggagttgagttccatcagctccagctcgtgcttggccgcggtctccaggacgcgctgcttgttgtagtacctgacaaagttgttgatgatggggtggatgggcagggcgatggcgatgacaccacacaagaagctgatggccgcgttgagcttgcccagcgtggtcttggggtagatgtcgccgtagccgacggtggtcatggtgatgatggcccaccagaaggactgggggatgctcttaaacagggtctctggatggctctgctccatggtgtagcccagggcagagaagacgaagatacccactgccaggtacatgagcagcagccccagttccttgaagctgcgcttgagggcataggtgagggtctgcaggcccgaggagtggcgggccagcttgaagatgcgcgcgatgcgcatgatccgcagcgcctgcacggcctgctgcacgttggtcagctccatcatgcgggcacccaggtgcgtga

SEQ ID NO: 466705 - DNA, 1000 bp, Homo Sapiens; identical to SEQ ID NO: 336846

SEQ ID NO: 466706 - DNA, 1000 bp, Homo Sapiens; identical to SEQ ID NO: 336847

SEQ ID NO: 466707 - DNA, 1000 bp, Homo Sapiens
aaagggaaacaaaatggtgctttattttattttatttattttaaaaaggcgctacagtggcaggacgctgctggggatggggacacacagtgtaagtggtagattttccaagacttcccctccctattgtcctccgagttcctctcttcctggtcctatcagtagcataggattcaacaaaagccttcatgaatgcctctttatttctgaaaaggaacttctacccctccctttcccatttccagacttgaaatccttcatcagctatctcacttccatgttgaaaccaggaccactgattgtaagtctgaaaatctgggtgtcctaccccataaccaggccaagatatctgcccccaatgctaaagtctctgaatatttcctttctgtacattcaatatatttgggcatatatacatctatatacatctttctatatatatattatctctgtttctttcttcttagataaacctttcatatatgtcatatcctaatttcccaagcctccccacttcttgtttgcgagcctaagcaagactcaagagtttcattgatttcactaggtccctcagcatcatttctttctcatcttctcaccccaggtatcttcccccatcagttgtttcgcccgtcttctgaaatctcccctttttacacctgtgcctaccgaaatctcccctttttacaactgtgcctactactctgctgatattccaagtccacagttggtatgggggcccatttctcaccagacctggctgcttctaaagctcggcctattgcctaaaagaggatttcaggtcagaggagacagactatagtctaaagaaccatttagagttaaggtagggggtagttgttccctgtagggggcttgtgggagaagatgccagatcgcattaataggacagtgtgatttaaagtgcaacttaaagcaaagcctgggtaataatggaggagattccaaaagggtaagtcagaaaatgttttcttctcac

SEQ ID NO: 466708 - DNA, 1000 bp, Homo Sapiens; identical to SEQ ID NO: 336851

SEQ ID NO: 466709 - DNA, 1000 bp, Homo Sapiens; identical to SEQ ID NO: 336852

SEQ ID NO: 466710 - DNA, 1000 bp, Homo Sapiens
taattgacatcatcacattctctgtagacagcaggtgctcaatacaaatctcacaaaaacccaaatgaccttcctcacccaggtcacctcccccatgggccccgctggggcctggcacacagtgggtgtccatcaacgcggttggttgaaggggagcgatgcttctggccagggctgggccatgctgtctgagggatctcagcgccaggtggggctggtacaggtgtccctagagagttgtccctcactgagctccagcccagagggagagagggcttctaggctaggattctaggctaggccggtgatgggaacaggtttttctgattcccacattcatcttggtacccagggctggaggtctacctcctgggacatcaccagtgccttccagccatgcacacaggcagccactaggcgggtcctgctttattcagaaccagcacggacccctccccgggctgctccatgcccaccgggggcctggggagagtcgggggaccaggtgaccagaggaagctccgggctcccctgccctcacccatggtccagccctgccctctgcctgggcagtctgggcggggcaggcctcagtccactcagcctgactcagcgttggcttcttgaactccaagaggcgccactgtacaaggcttcccggaggtggcggccacacgatggccaagatttaggggtctggtggcgggcagggccgtcacccgcagtccgagggggccacgggcgtccaccggcagggggagctccgggctgcctggtcttgggggccggggccgggcctgggaggcaggggaggcgggggtgggcgtatggcttgggcgatgaggccaggcagggcctgtagagaggcacccagcgcatccaagcggctttccagggtggccaggcgggcctccagctcctcgtgctgagcgtgcagctccgatacaaggtcgtacatgacggtctgggtcttggctaggtcggtaagcgtgttagcctg

SEQ ID NO: 466711 - DNA, 1000 bp, Homo Sapiens
ttctggctttaacatttattacaaagataagagcagaggctggtgagttacacttcttcctccccaccaggtgctctctgcagctctggaaaaatggtgtcctctttgttgtcccaccagggggcgccacctccagccccgccccagcctcatacccagttcttcagctcggccagcggtaactgaagcctcccagaatcctggatccgggcccctagtaccctctttcccagggacccaggagtcctgcctccagtcgcctgcacttgtaactgagagctggaggtcgtccatagcagcatagtgagagtgtttttgatgagggtatgcagagtgggggtgaccatgttcccacctggggcctcaggtgggccaaggcctacccactttagccagcgtcccctccagcagccatcagcaagccaacccactccaagccagggccccctttggtccttgcacttgaggtgctttgttcagggctgggtcaggagtggcagagacgatgtccaccacctcagtactggggaaagtagcctggttcctcctcgtgggtccagctacttggactgctggctgggttctggaagctgcctcggccccagggcagtgctaagcagctcagtcagggcatccagcttccccgccagcgtgtcaatctgtttctccagggcccggtgtgagctgctcagattctgctgcaggtcatacaggatcatgtgcatcttggagatgtccaccatggagttcacttgttcccggagcttccggtgtttcagccgcacctggcggaacgcgttgatggcggccagcagcttgcgctgatgcctgcgggcagcatgagactccttcctgcgagtatgtttgtagaacatccaggcttcttgtagcactcgggcagcggactccttcatctctttggtatactggatatccatcatgaagttgtgcacgtgcttctctgccttgttaaactccagcttccgggccaccacggcca

SEQ ID NO: 466712 - DNA, 1000 bp, Homo Sapiens
ttttttttttttttttttggggcccagctctttatttgcataatggttttcactgatacatgggaaggggagcgagttgttgcttttctgccaggaccacaaacagcctcatggtaggctcaggccagatgattccctcttgagctttctccacatcagtattagggacctgtttgtagggtcagaaaatatggaagccgtcgggtttcttggtgtgttctgcaagaccataagggtgctacacgcagcccttctgatctgcccctaacctgggttcagctgggcctagatgtaaggagcagagtgtgcagaagggctggtatgtgtgtggtgaattcaagggaggccctttgctgcttagctccatcctctgttccaatctggagacccagaatccatgcgtatgtagggggcccactatgtactaggccctgtgtatgacacacaccttcacacatgccattctctctgcttggagtactcccccctggaacctcatttgcttaattagcaatttatcatttggatggcaggttagattgtcacttgctcaggaaagccttctcactttctcgggccatggtccctgatacattatacacacctgtacttagtagagctcgctatatttatgtgattattgcattagagtctatcttccctactagtcggtaagcttcatgagtatagggatatatttttccaccactgtatctcttgagactagtaagcagcccataagtcagaagccagtatatcagagtggctgggcataacacaacggcatgtgtgtctgtttgtgggtggcagcgggggagacactatggggaacctgagagtgcatgcctcacgcaaaggcattcagattcttaaaatataataaaaacactgttggactaagccgaaacatgactgcaggccacacatgaagccccagtttaagactcttccaacgggtatttgttgagtgagtgagtgaagaacctacaaggaatatatt

SEQ ID NO: 466713 - DNA, 1000 bp, Homo Sapiens; identical to SEQ ID NO: 336854

SEQ ID NO: 466714 - DNA, 1000 bp, Homo Sapiens; identical to SEQ ID NO: 336855

SEQ ID NO: 466715 - DNA, 725 bp, Homo Sapiens
ttttttttttttttttttgagttacgcaacatttcttttattgcctcgggttggaagctccagcgccccctcccttagccctacgtccccgccccccgcccccgccccgcatgctctgactcctttggggtctgaagttcactgccccgcacctgcgccccagccccgcccagcgcttctgccgtggttccctggtgccgcctcccgcttgccgaagcgcaggccgaaggagttccagttgtagttcggcaggtccttctcccgctgcaccagcaccgcgccctggggtgcggggatctggcggctgtggggggcggacaggcccggctgctgggggctcccggagctctcggggggcggggacagcgaggtcccccgacggctcagcctggcagtagcagctggcttcctctcggtgcacggcaggctctgctccccgggggccaggaggcccagggattctagctgctggcctgtgggtctagaattccccacagaggccaccttttctaatggctccccaaagtgggtggcacagaggaaaagcagtagctgccaagaaaccagtgagttcatcttggtgagaagaggcaggtcctagaagtgccttgaggcttgcctcagtcctggcctgggcaggagtctggcggagcctctgaggtgacgagaccacctggctgggtgaatgtccagagggtgggcagctgggctcccggtctcaagag

SEQ ID NO: 466716 - DNA, 1000 bp, Homo Sapiens; identical to SEQ ID NO: 157927

SEQ ID NO: 466717 - DNA, 1000 bp, Homo Sapiens
aaaatgagccagaagcgagatactgtttttattttgtgtggggggagggggaagcggcacagtactagcaggagatgaaataaaatagattaggaaacaatgaggttataagatcactgttcttatttgggttaagcaggtcatgttgagaagatggttatttctttcagataaggatgctatcgattaaaggaatcgtgtgcagcatgaaaagattagaatcgagctgcacctaagaaaaaaaatcccaaagttactttcaaaagtatgtgttatctgccagtcacagaggggaaaagcctagggtgaactccaattttttaatgaggaccttgatcaggaccacaaagcctgaaacatttattttaatgcagaaacacagcccctagttacactgattgcatttgggaaaattggaggggttttttcgtccttagttttttttattaaattacaggatatggttttcgattactaagtattcgaaaagaccaaagagaagcaaaagcgaacaaattaaatgtgcccagaccaaagagaagcaaaagcgaacaaattaaatgtgccctgctcttacccaccagtatcacatttaggagtcaaagtgttaattcttcagcattcctgacaactagaaagcacattcactgaaggctgaaggtgagggagtggatggtttaactttaatatctgaagaatggcgccaatagaggaaagaaaaccatccaatctcagtaaggattaatgcaatctggctagaaaaagccaccaggtaatccaagggttcactgtggaagaactcatgaaaagtactctgaagtataccaacaggtctaaacatctcccttgtcgtaagtagttgtgtaaaattcaagataaagatttagtctcatcttttaatgtcagttttttcccccatgttaaagggaatgaggaggagtcctcttttattcccccacaagaaaaagggagccacattaatatgtgtatattcccataa

SEQ ID NO: 466718 - DNA, 1000 bp, Homo Sapiens; identical to SEQ ID NO: 157928

SEQ ID NO: 466719 - DNA, 1000 bp, Homo Sapiens; identical to SEQ ID NO: 157929

SEQ ID NO: 466720 - DNA, 1000 bp, Homo Sapiens; identical to SEQ ID NO: 336859

SEQ ID NO: 466721 - DNA, 1000 bp, Homo Sapiens; identical to SEQ ID NO: 336861

SEQ ID NO: 466722 - DNA, 1000 bp, Homo Sapiens
tttttttttttttttgcttcttcacatccactgcggagttgtaactggagacatatttccacccacaaaggctccagatgttaaaacgtttcccaacatcgacttaatacagtgacggcaacacctccctcccgcccctcccagtagggttgggattgtactgtattccctactggtttacccttcccccctgtaaagggtaacattttccctgggtgcagaggctcccttatagtctccaagactgaaggacccctaattttgggactgcagcttaagtgtattagattaaacaccataaaaagctgcaagacgctcttttaagggaagaggaaactggtcagagaaacgcctccaattttcatcgccaacttgatttttaaatccatgaaggatcttacagaacatgtctctgagatcatcttttgggttaatccatgatgcaacggcatcacaaaaaaatataaaatcttggattacgccactgggattcacactgatcatggtacaaattccacggaatgctgaatccttttcctcattgtctcttatgtttctcagagaggtgcaccagggtcttataaactgctgtagcatgggggccacctcttgaggacaaacgtaaccaagacgaccaattgttattgctgtattctctaacaacgtctttggtgtgttgggtctgttaatgatttctacaagctggtgcaacaccataggaatataaggctgcatctctatacccatttgaatggagatttctccaattgcccatgtggcattgttgcagactgaaatgaattctggatttaggttggttcccaatattggcatgaaatcagctatacaaggcttaacatgctgaaagcaagcttttgtgaggtcacctaacagggcaaaagaactctgtcgaacttctggcattttatcctgcatgcactgatacattagtgtcaggatgttacttcgggctaccagctgttcaatgttgcctccaagt

SEQ ID NO: 466723 - DNA, 1000 bp, Homo Sapiens; identical to SEQ ID NO: 336862

SEQ ID NO: 466724 - DNA, 1000 bp, Homo Sapiens; identical to SEQ ID NO: 157931

SEQ ID NO: 466725 - DNA, 1000 bp, Homo Sapiens; identical to SEQ ID NO: 157932

SEQ ID NO: 466726 - DNA, 1000 bp, Homo Sapiens
atttgcaaaaggaaaagtaattctttattacatgaacagacactgtacaaatgagcttgttacacaatacagctgcatctccttgctccaaagaaggtggggagaggcagagggggaatagagcgcatgcaaagccctgaaataaaagaccgagggacccttttcagctctctgaaggcagggactggagtttgcatgtgcaggccctctggccagtcctccacttggcctgatgagagtggggagtggcaagggacgtttctcctgcaatagacacttagatttctctcttgtgggaagaaaccacctgtccatccactgactcttctacattgatgtggaaattgctgctgctaccaccacctcctgaagaggcttccctgatgccaatgccagccatcttggcatcctggccctcgagcaggctgcggtaagtagcgatctcctgctccagccgtgtctttatgtcaagcagcatcttgtactcctggttctgagcctccatctcgcatcggagctcactcagctgggcctccaggccaccaatgagcccctggatctgctgcagctgcgtggcatagcggcactctgtctcggccagtgagttctccagcccagctttcatgctgagctgggactgcagctcgatctccagctcctgcatcgtgcgtctcaggtctgtgatctccgtcttgctggtctggatcatttctgtgttggaggccacctctttgttcagctcctcagtcttgctgaagaaccaggcctcgacatcccggcggttcttctccgccatggcctcgtactgctccctcatctctgccagcacacgggtcaggtccacacccggtgctgcgtccatctccacattgacctggccggccagctggctgctgaactccttcatctcctcttcgtggttcttcttcaggtaggctagctcctcattcaggccctcgatctgcatctccaggtcagtcctggccagggtcagctcatc

SEQ ID NO: 466727 - DNA, 1000 bp, Homo Sapiens
tggtgcaagttaggcatcaggggcctgagcaaatgcactttattgttctgccaacaaaagccctctactgcatttcagaatccaccggaacagcacctagaaggaaaacctgacccaggaggcagcctgagaacagagaccctggcacccattgaaatgatgaggagttgagacctttgggggcagccggcctttgtgacaggctctgagaaactttagggcatgtatttgcagaaagccttttcagccagaccctgggcctgggctctgcgcgaagagaggggattgggctacaagggttaagtttgggtagaggccaagttcaagccctggagacaatagccatggccatctgggtcacccgctctcagaaccgaccccctgggcagggcacacaaatggggcgggggctgcagtttgtgcgggctgcactaggaccgcaggaggccgcaggaagacagggaaggcatgacttggagggtgagtagtcaggtgcacatgggttacaggggagcttgctgtcctcactctccagcaggccccggtacgtgttgatctcacactccagccgggcccggacgtccagcagcacctggtactcctggttctgccgctccaggtcagcccggatctcggccagctgggcctccacgttggtgatcatgcactgcatctgggccagctgggagctatagcgggcctccgtctctgccagggtggattccaaagcatctctcatgctgtgctgagcctgcagctcaatctccagggcgttgaccgtgcgtctcagctcgatgatctctgcctggcaggactgcaactgctctgagctggacaccacctgctggttcagctcctcactctgggtgtccaaccagtcttcagcatcccggcggttattctccaccagggtttcatactggcacctcatctcctccagaactcggttcaggtcaacaggtggggcagcgtccacctcaacattgaggcggtcaccaag

SEQ ID NO: 466728 - DNA, 1000 bp, Homo Sapiens
ttttttttttttttttttgattcgctacaatgagtttattggaaacacagagtgaaacaaagacaaaggagaaggcagcagagtcattagtttttcagaagctcttgagggcagccccggaaggagatgttctccccacacgcgtgggcctgtccctcgcagagtcatagaaccactatccagggtccgcgtctccattccacaggcaaaagcacatgggcagagtcccaggtcgtgcagacagggacattcccgggccctcccccgttcctccaagctttgaggaagagctcaggcaagaccaatgcatacatgaaaaaaaaaacagaaggtaggaggaagaaaaagatgaatcctcgggacaacaaattgactaccaggaaaggctacagagagagaccatggcgcctcccggccctccccggactcctgcgaccggggatggctcccggagcggacgtggggagagcgcttagagtgcaggcagcgggcggcggctattgggaggccggcgcgggcggcgcgttctcctggcgcgaggtactggctgggtggagagtgacggcgacaggcgctggcggaggcggcagcctccttagcacctcttacagctgccgccgcagacgccaacccgggcggagggggcgcaggcgttagtagtgcccaccaccacgttgctgttgctggggacgctactgactctggtggagacaacaggggcagtagtggaggcgcagagatcgccacagacaacgccaccgcgggagctgctgacgcagacattcaccgagccgacgccttcgcacagcctctgctcctcgccctccagcaggcgcctgtaggtggcgatctcgatgtccaggcccagcttggagttcatcacctcctggtactccctgatcaggcaggccatgtcctgcttggccttctgcagggcaccctccagctcggccaacttgcagcgggcatcgctgagggccgcctcaccctgctgctcaga

SEQ ID NO: 466729 - DNA, 1000 bp, Homo Sapiens; identical to SEQ ID NO: 336168

SEQ ID NO: 466730 - DNA, 1000 bp, Homo Sapiens
gctgctagacaggacgtttatttggactgggctgctgagatctgctggctgcctcagctccaggtcagagctgctccggctcgggctcgggctcgggctccggttccggctccggctccggctccggttcttgctccagctcctctatcttgctctgagcctgcggagggtgaatcccttgctctaaggcagaaaatcgtcttggtcgccactgtcttctccaaaggtgaaagccaaaggctccagtcaccaaaaggagcagagaaaggacaccaagggtgagaaacagcaggaggtggcctgctgggagggcacctggggctctcccagagcgttgggcacctgggctagacagctctgtgaagtacactgctgctccaagaagcctctccccctggtacagctggcattgccaaggctgggaaaggagctgggcctcctgtgcctccagccaaggtcctgagaaactcctctgggatggggtgtccagagagctccacacaaagcgttcttgtccagatactggagtcacctcacaaagcagcttccccagggatccaggtgacccaaaggatttgggagtcactgtgatgattgccaatgtgacagtggcattgagctgctgttcctgcagatggatatggcaggtgtaggtcccagcctgggcctggctcacatcctctagtcgaagggtaaagtcgccattgtctccagtcaccaggaggtcagggcctcccccaggaggagtccacttggcagtgaggaaagaccgggtccccacaccagcaggcaggcggcagggcagccccaccctggaacctgctccagcgtacactgtcaagggagttgggggctccagacccagaacagtgaggttatacatgatggagacgttgaagccatctctgtaggtgaggatgcagccccagggcccagagtccatggggctgacttggggcaggaagaggaagctttccgctaagtggtgatggggggactc

SEQ ID NO: 466731 - DNA, 1000 bp, Homo Sapiens; identical to SEQ ID NO: 336867

SEQ ID NO: 466732 - DNA, 1000 bp, Homo Sapiens
tgttagaaatttactttattaaaccttgataacttcagctataaacctaaaatattcttcttatactgatagaccaaacaaaagggctaaaaagaaatctatcatctaatttagattatatgtaagttagtaagtctcttcaaaataaagaaaggtagttttaggacagagatttttatatagattgaaagttatcttccctggaagaaaggtgaatctgagaatctagccgcacttcaaaaatgtgtgcaagtgtttatttggaatcccttctattttattagaaacagaaacagtaatttcaccagtaggaattgcgtgtgctctcaatacaagtaagtttgcctctccttcaattgttgtccattgcagacactttggattcaaggttaagaatccaaatgagaaataagaaatatccggtccctgatgattcgtttaagtcctgttcaactcgatgaaagcttccacccgaaggaagagttactgttcctcctggctggctttgtgtttctttcagtgctctaaagaactttgtatttgggcagctgtgctctgtcatgtcaggctgctggacaggagttgatgcttacggcgccgctgaccagggctgctttactgaagctcactgggtgtccatcaatcacaaagtggcgtatgcagcctgtgaagggtttgctgggggccaagcgtggtgtcagtagagattctggaacacctccaacaaacacaggctccctgtgatcaattggttttggattcaggggtccaaccacatggttcacttcagagtccacatccaactgaaccacattagaatctctaataactgtaattctgtgccatctgccatcacagagactctgcttgggtgttactgaggtggaaaaatctctgatgccattattgactttcactatgacctgtccatttttcatgtgaacatttaggtactccccattgacactgtggccgtggaccagggttccggaactgcttc

SEQ ID NO: 466733 - DNA, 1000 bp, Homo Sapiens; identical to SEQ ID NO: 336869

SEQ ID NO: 466734 - DNA, 1000 bp, Homo Sapiens; identical to SEQ ID NO: 336870

SEQ ID NO: 466735 - DNA, 1000 bp, Homo Sapiens; identical to SEQ ID NO: 336871

SEQ ID NO: 466736 - DNA, 1000 bp, Homo Sapiens
tttttttttttagaagtacaactcatgtcgagacatgtatttattattatgctttgatatgcaatcccaggtattctgatctggagtaaaaagcaaactaaatgaagacaacttttagaaactgatgtttattttccatcaaccatttttccatgctgcttaagagcctatgcaagaacagcttaagaccagtcagtggttgctcctacccattcagtggcctgagcagtgggagctgcagaccagtcttccgtggcaggctgagcgctccagtcttcagtagggaattgctgaataggcacagagggcacctgtacaccttcagaccagtctgcaacctcaggctgagtagcagtgaactcaggagcgggagcagtccattcaccctgaaattcctccttggtcactgccttctcagcagcagcctgctcttctttttcaatctcttcaggatctctgtagaagtacagatcaggcatgacctcccatgggtgttcacgggaaatggtgccacgcatgcgcagaacttcccgagccagcatccaccacatcaaacccactgagtgagctcccttgttgttgcatgggatggcaatgtccacatagcgcagaggagaatctgtgttacacagcgcaatggtaggtaggttaacataagatgcctccgtgagaggctggtggtcagccctggggtcagtaaccacaagaagccgtggctcccggaaggctgcctggatctggttagtgaaggttccaggagtgaagcggccagcaattggagtggctccagtggcagcagcaaacttcagcacagccctctggccagtattcctggaggatataacactgacatcagcagggttttcaatggcaacaattgcacgagctgccagcagaagcttctcccaggtcctcttgagatttatgatatagatgccatcacttttccttttatagatgtactgttccatctggaagtcaagattggtgccacctaagt

SEQ ID NO: 466737 - DNA, 786 bp, Homo Sapiens
tttttttaactgctgaagctctttatggagaaccaggagagggggcgcagggcagggggaaggcggggggtggtaggaaggggtgcagccagccgcgttctgcaggggtggggagctttttccatgtccctgtgaatgacggaggtgctggatggtgccgtccttgggctgctgaggagccaaggtgtcccctgcccctaatcgctccctggagagcaggtttcgctctgcctggggatgaggatgctctccgtgctgagtccgcgggctcctgcggctttctcaaagtcctccaaggcttccaggttgttcttggggtctctgcccacgagcttcacccctcggaccggcttcccgtgcagctcgccctcacagtaaaagatgtagtggtccttcacgtgcgacctgatgatgtatgccacgtgcttgcccccgtcggccgtgtattttcccggctcgtcagttttctccaggacggccttcacctcctggcaccggccacttatcagcatggtgaccttggcttccaggttgcccccttccagggtcgtgagggtcatgggtgtcaccgattccagattcatctcagggaactccctgtccaccgtcatggccttcagataccacgtccctgacacatcctgaatctcctcgtctgaggccaggaggtggtgggcctgcagggcagcaatgaggccaaggctgacggccaggagcaggggcttcatctccggagtctgagtccacggccgcctgacaggtcgcttgctggggctgggagaggct

SEQ ID NO: 466738 - DNA, 1000 bp, Homo Sapiens; identical to SEQ ID NO: 336873

SEQ ID NO: 466739 - DNA, 1000 bp, Homo Sapiens; identical to SEQ ID NO: 336874

SEQ ID NO: 466740 - DNA, 1000 bp, Homo Sapiens
caggtctccaatttgtttttattttttaagatcaatgaaaatactttcaaaatttaaaatacacagcctgctatcttctgttctccaaacagtggaacattagaaggctttaatttaaaatattagatccttttgaatattccaaagtgtttctgcactcttcttgaaaagggcctcctcctcagaattcaagttaattttcacaacatctgagacaccattccgccccaagacacaagggatactgagaaagagttcttcttttattccatataatcccttaaccatggtggaaactgggtgcactctcctaagatttttcaaaatggatcctaccagatccatcacagacagtccaatagcccaagaggtataccccttcagcttgataatttcataggcactttgaataacttgtttatggatatttttccagtgttccttatctgaatccgttcctaatttagggtccagagtcttcagagcaacaccagcaacattcaccccactccataagggcacactagaatcaccatgttctccaataatccaaccatggcagcttgtggggtggacacccaacttttctccaattaggtaacggaaacgggcagagtctagattacaaccacttccaattacacgagttacaggtaagccacttatcttccagactatatatgtcaaaatatccactggatttgaaacaacaagaattttacaatcaggactataatggactatggcaggaatgattgatttcattatagccacattacgttggaccagggcaaggcgagtttctccctcctgctgccttgcacctgctgtgacaataactattctggagtttgcagatacactgtaatcttttccagaagtaatctttgaagtactaaagaaaagactgccatgctgaagatccatcatttctcccttcagtttgtccaatgcaacatcaacaagggcaagttcatcagccaaatccttcagtaagata

SEQ ID NO: 466741 - DNA, 1000 bp, Homo Sapiens; identical to SEQ ID NO: 157936

SEQ ID NO: 466742 - DNA, 1000 bp, Homo Sapiens
ttcatttggaacaattattttcaaatttgactctggtttcttttctctctcccacccacaactataatctattacactttatattacccattataacacaaatctgaaggtttcttcagtgaaattacacagttaggtcacacatcttgttttccatgatcttatgagtctgagtagaacaagtttggaattgaggcatgtaagatgcaaaagtcttcttactagaagttcctaagttgatattattttctacaaagtgtgagcaactgtcctggagaactctgatgtccgtgaataaacagggggctgggaatgggcacgatacccttgacttgtcagtcaaaagcacaccactctctctctttttgattgaggtgacccctaaataatagatagactttttatcattattttcttcagggaaatttccctccaatttcaaaagttcatccaatccttctgagaatgtgaggtgtggtgaaattatgttgggatgctgatctgataatataaaaaatgcctgggcctctatctcccatgagctattagagaaagaatccttcaacggagaatttttgctagagaagcacttggtgactgaactatttataagcccttgttcttcaccagtttcacttggtttagagttgctgatcagcgtggcgtatttaacaaagggttgtctctggctttcgtcctcataggttacctcagtaccctcagcctcagagaagttaacactgttgaactggtcactaatacaaacagaacccttttcaagatctgttgttgaaagtagagagaccacagttgttggcatcatctcatctttatttttccatgatgtatcaacactgatatcttctgaaattgtttcaggctccaaaagaagaggaccacatgtcactgatgctgtatgcttgataaaaagatgctcaaacgtttctggcttctgaaaattaagtccttgtgcccaggaacaattcttggggttcggaac

SEQ ID NO: 466743 - DNA, 1000 bp, Homo Sapiens
tttttttttttttttttttttttttttttttttttttttgctgcaaagagcacctttattcacagcaaaaggacgtcaccatagcaacaacacttcaattccctgagaacttttcccttatcattcgctttcctagctatgtctttgcaaagagaaaaacaacaagaaacacagcccacgggacaggtgagccatgctgggcccagcggggaggtggcagctacacaggaggagggcagggatgggaggttccagatgctggaacgcataaatacacagagtgccagacagtcccacttcagctttaaaaacaaagatgaccccgagtttggcttctgttttttctgatccacagaaaagataagataaaataagaccctcccccacccccaccctcccaagcaaaaaacaagaacaccctactttttacccatcccctttcaaaaaaaacagcacagtaaaaaaatactgtcacaatatttacagacacgcccactgtgggcgacttgctctctactttggagaggagattaaatgctgagctctgactcaccctgtcctggggaggcaaagggaagacctctgaggaggcctggaagactccccactcagaagagctgggaggggtgccactgtttgcccagctggacagccagccactgggggcttcgtggggccactggaactgggcggtggctgctgttactcttaagccacagcgtccaggccaggaggaaggggattgggtcacgcacccccagacccagcctcccctgcaatgagcatggctcagtgagtcgtacttggggctatgacacaggggccaggacttcagggcacaggtacccccagcacagagcttgtggtcagcaggaagagaaaggcacctacgcatcgcatccctgcaaagtagcccggagccccgtagctgtagaaagatccaaaaatcctaacagaattgccctcggagtggcctccgacacacaaatccttcctccaa

SEQ ID NO: 466744 - DNA, 526 bp, Homo Sapiens; identical to SEQ ID NO: 336876

SEQ ID NO: 466745 - DNA, 1000 bp, Homo Sapiens; identical to SEQ ID NO: 336877

SEQ ID NO: 466746 - DNA, 1000 bp, Homo Sapiens
cgaagagtagattctttattcatttctcttttttttcttaaaaaaaaaagtgattcatttggtataaaaaataaatattttaaatatgacattgaataaataaaaataatctgtcagtatgaaacatccccacagggtacattcatcaaagaggaatttgtcacccaaggccatgtgcttttcagtggaaaggaaggagggaaacctctaaggccgcacggtgggcccacggagctagcacgtgggcgggactgaaggctggatgccgggattgaggtggggaactagagatgactctaaggcaggaacatctgtaccatctgcagggaaatgctacctccccgggtgccagagctccaaccccacacactatgtctactctggagagccggcaaggcagagctggactggctgggtcagggtggaagtgccccaagtcagggacaaggaggacgatggggacgatggggaggagagacaagtaaactagcagtgctttttaaaaaaatgtttaaataataaataagggcccggagacatctctcttggtaaactctctcttcctccggccaggcccaggtgtggtccacaccagcagataaaaagggaagagaaacccagctcccggcctggcagagctgtttcacgcaaaggctctgtgattcagtgatgctgtgcagggtggacgccaagctgccggacgggatctggagggagcactgaggatgggtcccatggggccaagtccaggctgggtgggagagcgactcagagccagggccgcaaggtgggcctggcacagagctcccaagtccacagggagatgaggtgatgggcgagtcagccgggccccccgggtggaatcagcaactctggtttccagacaagtttgtctttctcgaagcccatcctgggggaatgcagccagccccaagctaagccggatgaagcaggaaggagaaggcagtccctgcatcctggacaagggtgagtgtggccc

SEQ ID NO: 466747 - DNA, 1000 bp, Homo Sapiens; identical to SEQ ID NO: 246426

SEQ ID NO: 466748 - DNA, 1000 bp, Homo Sapiens; identical to SEQ ID NO: 157937

SEQ ID NO: 466749 - DNA, 1000 bp, Homo Sapiens; identical to SEQ ID NO: 336881

SEQ ID NO: 466750 - DNA, 1000 bp, Homo Sapiens
cccggaaacattcataagtttaatccacgccagtaataaaatcgcattacatttctcataaaataaatgttcccatttatatacagaagacagactgtacaggcccggcctggccccaggaggggtcacacacagacgggcggtggtggaggaggaagggccatccctcccatcgaggacggagaagttctaatgtggcaggagagcggctggccagcctgcactggtagagtggctggctggccggccaggcaggtgggcaggcgggcagatggacagacgggcctggaggccaggcgccgggcgttactgaacttgggattcaaaggtgccattgagctgcccttcctcatagtccatctgacacaagatcatgttgttcttcaggaagaatttgtctcccacacaaaatctctggttgcagagctggcaggcgaagcagtcgaggtgatacacgttgtcccgggcccgcatcaccatctcgaaggctgggatcagcttgctgcaagcagcacagttccctgtggtgccaaagagcctcaggtagtcgcgtcggcacaggatgaggttggccttggtgtagagggtggagcccacctcgcccaggcggcagtcacagcacgcacacttgaggcagtcttcgtgccagtacttgtccaatgccttcagcagatagcggtccttgatcttgcggttacagcccgcacagcccttctgcttccctttgggctggacggagagcatcggcacgccgtcctccttgtccagcaccatcatctcgggcgctccgtgtccagccgcagctaggctcggccgggagaagggcgccgactcggggcgcgctttggcggggcggccggtcctcgggcagctagcgggctctaattacccgcttgtccggctcttaacctagattgcactcagctagaattacattcaggagtgaagcacttcgcagatacaaaagcagtctcacctacttttgtgcctccgaattgga

SEQ ID NO: 466751 - DNA, 1000 bp, Homo Sapiens; identical to SEQ ID NO: 336882

SEQ ID NO: 466752 - DNA, 1000 bp, Homo Sapiens; identical to SEQ ID NO: 157939

SEQ ID NO: 466753 - DNA, 1000 bp, Homo Sapiens; identical to SEQ ID NO: 157940

SEQ ID NO: 466754 - DNA, 1000 bp, Homo Sapiens; identical to SEQ ID NO: 336887

SEQ ID NO: 466755 - DNA, 1000 bp, Homo Sapiens; identical to SEQ ID NO: 336889

SEQ ID NO: 466756 - DNA, 1000 bp, Homo Sapiens; identical to SEQ ID NO: 336890

SEQ ID NO: 466757 - DNA, 1000 bp, Homo Sapiens
tttttttttttttttttctgataagggaatcaatgtctgtttattaaggcagatgctcataaaagtgactttcagtaacattttcagtataaaaatggatttacatttcatttctggaaaaccgttttgtacagtctgaccatggctaggagtcccagggacagcagcctctgctcagggcagactctgtgattcactgtctgtcctgctgctaccccacgtgggggagaacacgtgggctgagaaaaaaaaacagcatgtgcaaacctgacagatgtcaagggtcccaacacagttccttcagcgaaaataaagcccagttttaagatgtgcagggaagtgttgacactgaacaggcagctgaccaagccctgcagggctctgagcaggcaggcgagtcccaaggagagtcagtgacagcacatggggcaagggagctggacagaagaccccagagggtgcggcacctgggtgagagccctggaccgcacaccaaggcagaggggtgcccctgaaggactctgggcaggcaatgacaggatctgagggtgtccagacgcagatctccactgcctgagggagagtgatcagccagggggagaggccagggactgctacctgcccagaaggcggcagggaggggaagagcagatgaggaggtatagggtgtgccctgggcaaggcagcaggggtaacgaagctctcagtgactcctcccagtagccaggggagagcagtgacagtctcaggtggccctgagcatgtgagctgctcatccacatcaggcaaaggcaaagccaggacctgaacttcccaccccaagccctacatccatgcaagccagaccagactgggtcagaggctagaagggagctcacaggattgcctggggaagcctcggcccaaaacctggccctcgctccagcccagagcacccacctgggcatgagactggcggcagccgtaggggtgccctgggtatatgccgggctcccagggt

SEQ ID NO: 466758 - DNA, 1000 bp, Homo Sapiens; identical to SEQ ID NO: 336891

SEQ ID NO: 466759 - DNA, 1000 bp, Homo Sapiens
ttttttttttttttttttttttttttttttaaggagagaatatcaacaaaatttctcattttacttcttgctaagacgacagcagggaattgtaagcagatggatgggcaatccccaccttcagcaggggaggccaaggccccaacacacctggggagaagagctgggggcagtgaatggctgaggctttcttggggagctgggccatcttcttcggttttacttcctgaggaattcacaggcttccaggaggggggaggttgagcactttttcagattagtaatgcctgcgacatactgtggtcccaaatatttttcatatgttgttttgccatggagtctggccagacactcagtgttgtcattgaacagaaggtttttggtttcagactggaataagcaaaacttgtccgggcagtcagatccatttctcccaaatttagcctgttggtggagcaacacctgtttcaggcgttccaccttatccatccgagacaccacggcatgattcggggccatggcaagatggcagcttctagcctcagtcacaggcttccgtttgccatcgaggcacagcagcgcaaagtctgccagcttcaaatccttagcccatgcctcattgttatttccatcagtgttctgcaagacagtgacatctttcacaaatgcaacgtctccagcattctcagccaggcaccggaaagccccagtgtagccgtagtatctctcgttgctgttgggcacgcacttattctcaccctgctcgtcgccaatacacagagcacagagattagatctcgggtcagacccaggggcacagctttgactgaaatattcatcaaatttgcaggagcccgtctggttgaagagcaggcccatggggatattccagcctgcagtcctgtccacggcggtgtggcaggacttcttgcctttcacagagttccaggtaaggctagtgtctgatctcctaaccaccgccacagcaagatatccttcc

SEQ ID NO: 466760 - DNA, 1000 bp, Homo Sapiens; identical to SEQ ID NO: 157943

SEQ ID NO: 466761 - DNA, 957 bp, Homo Sapiens
tttttttttttctcaggactcaaaagtgactttatttctccgcagaagacgcccttccagctgggctgttgcttcacttcccctccgggacctgggggtccccccccaccctcatccccaggcctcctgcccagatggcctggtttcctggagatgtccagctgcctgggactcagagctggcggagagacagggaggcttcacgtcgggggaggagtgagagccacaggccacagccacggagctgggccaaggctgcccccagccccagccacgccaggctggggagagggcagccacaggctcaggggagcaagctcagaagccccgtgggaaggaggagacatcagggcccagcccagaggagggcaggccccaggctgagcaggagccccccggccagggcccaggggctgtgccctgcccctgccgccccattgcacaaatccttctcgcagcagtccacgtcgacctttaagatcccagagttaataaaccccatcagatagtctgagaaaaagtgtcgcttaacgaagtcacaggaggaggcacacatcttgttcaccgagtgatccttcctgctgctgctgggatcggtgattcggacactggcacacaccgtgtcggacggctggcactgctttggggtgcaatggctggagttggtggtcagggtgcagtcctggcaccacaggccatgagcgggcgccgagcacagcaggacggccagcagcgccaggccgaggcccttcatggctgcaggcagcatgctccgggtgggcctgggggcggcgcgggggcttggggcgcgggtcctctggggcgcaagcatcccgggggtgtccgcactccgggctcgggcggcgtgcgcggcgcggggagctgtgcccttcggtctccctgcggaccggaatccgggcgcagcctcgtctttcggggaacgcagccgcagacgcg

SEQ ID NO: 466762 - DNA, 1000 bp, Homo Sapiens
tttttttttttttttttttttttttttttttatttcctgccttttattttaaataacactgcagtgagcatgatattatgtacatcttgtgtcatgtgtgacaattctcttgggttcttttcagcagtgttgagaaggtggtgtaaaggacagctggtccaggcccctcagcaacatttgaccagtcttggtagaatttcgaggaggaaacgctataagtgtgcgaggtgacaaatggggcaaagacatctgaagcccataggctccaagaaggagcctgtgtctgaactattaatgggtttgggagtccttaagggtgagaaggagggggaggggccacatccaggcatctctgaggcactgaaggaaattctgaggtgcttctgtctgtgagccccaggccccatgaggtccagctgactttccaaccccacggtcccaggagagaggcagcagctgcttttcctttcaggtgaaattttcataggtaggactttcaggaatctcaagatcattctgttgtggtggtggcaccacctgaggtttccgtatggagcagtagattgtggctgagctctcttccttctgagaaactggggtctttccctgtaagttgaacacttgtgcatacatggtgttctctccaaccacagactcaacttccgtgacatatggagtgacgggatcatagtctgcttggccctcaggggctgggtcatgtccagcgccctcctgagtgacctggtcaaatacctcatatcttccactgatgggcttgtgcacctcaggcctgtcctcatcctcctcagttgtgaggttgctgtcagagctgctgtctgaggtgggtgtaggctgttgcctggcaggcctgaggggagtgtccagcttctcatatccttgggagagcacagagtatagcgtgtggccagctgtgggttctggtgtatccgctggggcctcagcttggctggaacagaaggctgggactgaacaccgtcct

SEQ ID NO: 466763 - DNA, 1000 bp, Homo Sapiens; identical to SEQ ID NO: 336894

SEQ ID NO: 466764 - DNA, 1000 bp, Homo Sapiens; identical to SEQ ID NO: 157944

SEQ ID NO: 466765 - DNA, 1000 bp, Homo Sapiens
tttttttctttttttttttttttttttttttttttttttttttttttttttttttttttttttttttttttttttttaaataaagctttcaaacactttatttaaatgtgaaagacttgatgattcaaaaaaagctttttttcaaaaaaaggctcttggaagtgaacatgcaaacataattcatatgtttaggattattccagaatgaacacattatagagttaaaattagttacgcctattacaatttaaactcaagccatataattaaaaattattaaacctatgcaacttattatgaaagtaggatttttaaattcctttacaagttcatgtgatgcttttacctcaagaaatggtaaaccacccataatgcattactcaggccacactccacttttgtactcccacggcatccatattaaatgctcagaaatcaggtcttgccagtacatggagaatagctctgtctctcagcagttcactaattaaaaccaagttcaccaacacccatacacaatccagaattcccagttattattttacagtgaagcttagccttttcatatggcccatggaccagagtatttgcactgacctatctatctgcctctaaagaccagatctacctacacacggggaacctcgcttatcatgtacttatcaactttcattgttattttttccttgtcttttattgttattttctttcactgtcttttatcgttattttctttcactgtcttttatcgttattgtttcttttctcgtccaacaagacagtgaactgagagcagggaccaggtgtttttacttctatgccctcagcgccctattatgtttgttgagtgaatgaattctgtgagccctgtagcaaagtgacatataatcaatcacaaaatcacaaaaatataaatgtgagaagaaaatgccgcataaaattctgtatctcgtgtaggtttcaatcacttggaatttttttaaaaaataatacaaccata

SEQ ID NO: 466766 - DNA, 1000 bp, Homo Sapiens; identical to SEQ ID NO: 157945

SEQ ID NO: 466767 - DNA, 1000 bp, Homo Sapiens
cagtttaaaatgttttatttcatagctcataaaaaagtatgtatgtacaagactcaagtaaatagaaaggcagctttcaatcacaaatcagtttttcagattttactgtggaagcatatttaatgcacacatttgaatgttacacataaataattttaacgatggagtccaagttctggattttacattagatctgcatatataagacacttgtggtcaaatttcaagattggtaaagccagtttcaagctgcttatattttgagtacaggtttcactattacaaatatatgatgttaaactaacaaactcatgaccttcaaagatgtcttcgtcccacgcacacacatttgtaatttgtgtccatttgctatttcccttcttctataatcttcaaattatatagttatgcattgagttccctatgcatctcacccatctcctttatctcagccttctcatactttgccattctcttctttctggaaataaccagcacaacaattccagcaacaactgctatcaccacaaccacaataacagcaataacaccagcttttagaccctgcattgagaattcaggtgctttttcatcaacataataaattaaagtttgaccaggatccagatccagttgttccccatttactgtcaggtccattttcttagaatgaaacaaggattcacctttaacatctttttcaaaataataagccacatcagctatgtccacatcattctgagttttttgagaagaattttgaaccagatcaatagtgataacattattctcatacaaaatactcgtgataaattttggatccagttgataacgcgttgtgatctccttctgaagtgcagtccgcaaacttttactatcataaggtttttctcttgctttgtgttttagttcaatgatgatccagtaggttctcactcgctcagagcaggttatttcagtgtccttgtctgttcttctgaccccagcagtgttcacacac

SEQ ID NO: 466768 - DNA, 1000 bp, Homo Sapiens; identical to SEQ ID NO: 336896

SEQ ID NO: 466769 - DNA, 1000 bp, Homo Sapiens; identical to SEQ ID NO: 336897

SEQ ID NO: 466770 - DNA, 1000 bp, Homo Sapiens; identical to SEQ ID NO: 157946

SEQ ID NO: 466771 - DNA, 1000 bp, Homo Sapiens; identical to SEQ ID NO: 160470

SEQ ID NO: 466772 - DNA, 1000 bp, Homo Sapiens; identical to SEQ ID NO: 336899

SEQ ID NO: 466773 - DNA, 698 bp, Homo Sapiens
ttttttttttttttttttcacatgttcaggtctttataaaataataaaaattggattttatcacatatttattaaagacaatcatttatagttcataaaaaaatactgccctgatatacacaaaattttctactcccacccaccccccatgtccacaccaatattcagtctagattggtttaatcttgaagtgtaatccaataagactgaagaccaaacacttcaggtcctggacaagataataaaatactcgtaagccttctggatccttggattgattgacatcaataagggaaccaatttttgatgttgtaaaagaaatgtgttcatctccaatgacgatttcaagctcctgccggcccactcggtcaggaggaggccacaatgcatcatcctctttggtaatttcactgtcgtcaattattctcttcagttcctccatcacgcttttatgtacataagcctcttttctgatcatgacatcattcttgtaattgctgttgttggcatatcttaacttcccgtccggtcgaaactcaaactccaggaactcgtggccgaacttgcccttgtgccccacgtagtaacgcagataaaagtcactctccatggctcccaaaagacaaccgagcctgaacttccaagagcaagccgcactgccgccgtctgcctcgtacactgacgtttgcggcggcgcc

SEQ ID NO: 466774 - DNA, 1000 bp, Homo Sapiens
tttttttttttttttttacactatctgcaatgaacttggtttattgttagagttggaggtggctccgttacagcagctgggaactatagcagggaagcgtggggaggagcagaacacagcagcacggggagggtggagctaggaagaacacaaggtgggctcattttggtttcccagtcgtttggcagagaaggcaagcccacatgactaccagcttctgggtttctcagtctggcagtagtctggcagggctgctcactggcttgcttggggcgaggtcctctcctggggtggtattttcagcccgttttcatttcactctgtaggagttaagctgtggctcagcttctccctttttccttcctccatctcattttccccaagtcctctggcctggcttccacctcccagatcctctgtccaagagcgggtttggagaggcagccagtgttcccatttcagctgcaggatggcatagtggaatgttgggggagtcacacattgctggggtgtcaaatgttgggatgtcaggcagtggcttatttttaacccattaaacaccaagccacagcagatgaccacatgcagagaagccaagcaggggatgagaagggatcaggataattgaaatggggtgagtaaaaacttcaaagagtcagggagtttggaagaattctggcattggggcttgggctctccttgccgttttgtgctgtctggacacagccctgggatgtgaatggtataaagcagggtctgggggataagctcctttctcctctcaccagtctattggtctaaagagcttcaagttttaaattgagacattcagatactgagggaagcagtagaacagtatagcagtgggatacccccaggaccctgctagaactcagaccctggtggttgaggagatgggggatgggaaatggaggaaagggtgcagctctgggcacctcactgacggtatcctgccccaggtcacataaattactattgg

SEQ ID NO: 466775 - DNA, 1000 bp, Homo Sapiens; identical to SEQ ID NO: 336902

SEQ ID NO: 466776 - DNA, 1000 bp, Homo Sapiens; identical to SEQ ID NO: 157948

SEQ ID NO: 466777 - DNA, 1000 bp, Homo Sapiens
tttcatcattaattagtatctcatgcatatgggatgagatgttcttctgtatcacatttaggagatacttaagtcatattccaagcacaaactaaaaatgacctgtgttccaccatttttatccacaacttccctcacagttcttagacgacagtctcaactgtgaccgtattacaattgtctttctggcgccgaggttgcatttcatctttgaaagccctggtcagaacaacttttaaggactccttgaatctcttcttcttactgcttcccacaaagaagtaaatgaaagggttggcgctactgttgattgtggagaagagcagggaaatgtggtgtaggttcccaaaggtcgaccaatactcatagtacagcaggtaaaggagtctcatgggcatagcgaagatgaggaatataatgatggtgaccatgatgactatgtaaagcttggaggaatgggaagcccacgtgttcttccggatcttcacgaccaagatggtgctggacaccagcatgaggggcgtgaagaccaggaagctcaggatggctataaagatgatgactgctcggcagtcattccgagagtgactctcttcttctctgtcgatgcacatgacatactccatggtggtcaccaagcaagaaagagcccacagaagggcacagaccaatgccgactggtacttggggcgatggcatcggtaccagatggggtaaaggactgacaggcacctctccacactaatggccgtcagcagatagaggcccgtgttgtagccaaacagaaaagtcactgataatgtgacaattgtgtagtaatggccagaagaaagctcataatctaaagcatagtcgatagacaagatgaaaatacagaagagcagtgagatgtctgcgatagacaggtgggtgatgtagacagtgaagggatttcttctcatccggaagcacaggaaccagaggagaatcccattctcaacaaaccccactggggagatgc

SEQ ID NO: 466778 - DNA, 1000 bp, Homo Sapiens; identical to SEQ ID NO: 336905

SEQ ID NO: 466779 - DNA, 1000 bp, Homo Sapiens; identical to SEQ ID NO: 336906

SEQ ID NO: 466780 - DNA, 1000 bp, Homo Sapiens
gaattcccctaagaaaacatttcttcctcctttccttctggaggctccttggttggtagggaaataggagttggtgggaaaagaggggggagaggagcttgtaccaagggactctactccattctcccctctcccccgcaaccaacttggagctcaccagggttgggagggaagtggctgagagctcacaggcaccccctccgcccccgagagggagcccacagctgtgggaggggctgctactgctgccgctgctgccgctgccgccgccattggacaaacctcaccagtacctttgttgcagagctcacagacatggtgaggaccctggctgtgcaccttcatgtggtccgaaatataagccgagctcagcatcttgccacacacgtgacatggcactttctcctcgtgtcgtactgtgtgcgcccgcagccgatccttcgtggcgaaagctgcctcacatttctcacatttgaagggccgttctgttgagtgcacttgtctgacgtgactgttgaggtgatccggccgggagaagctcttgccacagtgggagcagttgtagggcttgtgcacagcgccgtcatgtgagcgcacgtggtagctcatgcggtccttgcgcttgaagcgctgctggcacaccgggcactggtagggcttctcgtccgagtgcgacagcttgtgtcggttcaggtggtagacgtcgcggaaggccttgccacacatctcgcaggcatggttcttccggatgcgcttccccgaggcggtcgtggtcaccacgccaccggcggccactgcagcgccgccgccggcacccgcctctccccctcccccgccggctccgctcagctggggcacgctcaggaggctcaggggcaccatggtcggcatcttcatagcacccgaggggacccggccggccttggctcccgtgtggatggcttcgtgcctccggagattgtagccgttcttgaactccttggcgcacagagcgcagatg

SEQ ID NO: 466781 - DNA, 1000 bp, Homo Sapiens; identical to SEQ ID NO: 157949

SEQ ID NO: 466782 - DNA, 1000 bp, Homo Sapiens; identical to SEQ ID NO: 336909

SEQ ID NO: 466783 - DNA, 1000 bp, Homo Sapiens; identical to SEQ ID NO: 336910

SEQ ID NO: 466784 - DNA, 1000 bp, Homo Sapiens; identical to SEQ ID NO: 157950

SEQ ID NO: 466785 - DNA, 1000 bp, Homo Sapiens
ttggtgtgagctccctggaagccccaggatgtgatctttaatcgatgctcctggccctgcctccccacccccagcccaggtggcgtatgtacaggatgctgtgtggaggcccaggcagaggcagcctccactcctccctgggttctgccagggtaggcactcgccagggcggggcaggaggatacagacagctgggagccagggtggactggtcacaggaagtctcatgttccccaccccatatacacgagcacacacagatacgcccatatgtgcagaggtattcacacttgtgcagaggtgtggatccaaaagctgtgcccagatgcactgtacctgtgtgcacgggtgcaccaccagaggacagatgccttaaggcagcgcagcaatagtgcaacacccagcccttcccccgccctgcatcagcttgcagggctggtggagcagagctggccggaggggcccctccactcagcccttgagtgggcagtgccagctggagctcagtgtgtggaccccactgctgtcgggtgcatccagctacccaaaatggtgtcagcgggtcccaggcctgtttgcccctgagggtgttgtgaataaacagggggcgatgccctccacaacgcctcctcgaaggtgccccagaaacaggggctcaagcaggtagctcacgggccctggggtgtcagaactccctgccgagtgagggcagggcaaccctggtgacaagaactgtattcacttgtggctttcatccattaggtagctggcccccatcttgcccctgccagctaccttttagggtcaaggagccagtgctccaccctcccaagcaagggtcatgagggaaggccaccggcaggactgtgtgagaagactgaggagctgtgcctggctctacctggctctcaggctcgctgcagcagggatgggtgggggtacgtaatgggggaaacatctgtaaacttactactcggctctggaatgggggtagggagtg

SEQ ID NO: 466786 - DNA, 1000 bp, Homo Sapiens; identical to SEQ ID NO: 336912

SEQ ID NO: 466787 - DNA, 1000 bp, Homo Sapiens; identical to SEQ ID NO: 157951

SEQ ID NO: 466788 - DNA, 1000 bp, Homo Sapiens; identical to SEQ ID NO: 157952

SEQ ID NO: 466789 - DNA, 1000 bp, Homo Sapiens
ttttttttttttttttttttttttttttttttttttttttttttttttttttttttttttttttcaaaaatgaaatatttattaccgctttttgtgacttaacacctttttttttttaacataacgtcacagtcctcatacaagtattttaatgtaaatttgacaaagcttaaaggtaacagcattttcttctagtgaggaacacgtgctgagaaaagaagaattcatggacatacaataccaattccacagcagatctgatactagcaaaaacattcttttttttttcaattgaggtaaacacatagaatatctaacatgaaacaattaatagaccgaactctgtacgaagtttgttacagtattctcttgctcctttttatcccccaagctttgagtttctgataaagtcctagttatggttcaatgaccattaataacttttttttgtgttgaggaaagctgcccaacttaagattgttttgtccacaaccaaggctcagaactcctggaagaagctcctgctctgtctttaaatcttcattggcaagctctttgaagaagagtcccccaaaaataataataagaattggcttatgaagcacgaactataaagatctgtttgaaactaaaggacacatttatggaggaacaaaggccgggcatgaaaacacattcttgaagctggagttcgagtgatgaggttcagccaaaagttcatcatgatctccagtgtggttcttttctcattggcccaacaggtttaaaatatataccacagtctctcctggatggtgaattcactgatgaaccaaaacagtcattcttttgggaacaacacacatagtgtggaaaacaaggatatatttttttttctcttctaaaactatttgaggcaacataacggcgtgatcaacagaaatgtacaagtttaacttagttcctatatttatactacagtagttataactctcggagtctttttccagaggatctttac

SEQ ID NO: 466790 - DNA, 1000 bp, Homo Sapiens; identical to SEQ ID NO: 157953

SEQ ID NO: 466791 - DNA, 1000 bp, Homo Sapiens; identical to SEQ ID NO: 336915

SEQ ID NO: 466792 - DNA, 1000 bp, Homo Sapiens; identical to SEQ ID NO: 157954

SEQ ID NO: 466793 - DNA, 1000 bp, Homo Sapiens; identical to SEQ ID NO: 157955

SEQ ID NO: 466794 - DNA, 1000 bp, Homo Sapiens
ttcctcctggacccaaatgcatctacttacagagccctgggtcctcctggcaggccggtctcccacacggagcccaaggcccagggatgccaaatggtgggctttttcccggcctggccaccccccagaggctgcctggtgagatcctgcaggctctcttccccaatcctgcctaccctcccccgctacccagggaccaccacgcacactccagtggcacctcctggccacagcagtcttggcagtcataagggccacccagacgtcacggcctgcgccctctcccaacaggagggatattttctgagctcaaaggcctgacccttgattcacaagggcttcagtagggaaaccctacccccacccccactccccacccactcctggtcccctcaagaaccaaggagccggcaggaggcagggagatagcgctaggggccgccgccacccccgccctgtcacaaaccctatcagatcatgcagctctagacttccgcctcgtccagtttgccccgggcgggcggccttccctcgggacccctgtggcgccacccgcccgccgccgtgctcctgggctcctggtaggggttgtccagcaggtagtggaaccggtcgtagttcttcagcaggtacttgggcgcatacatgtgctcgctggggtctgcaggcgggtactcctgctgcgtgccgtcgaaccagcccccggtgcggatcaggccgcggatgtagttcaggtcccgcttgtcctcgtagtcaccccagcgtgggaagtcgccattctgggcggacacgagcttgaagtagatgccctcgggcgtgaagcaccaggagcagtgccagccggcgaagtgcagggggctgcccagcgaccactgcaccaggatgtggccggtgcggttctcatactgtctgaagttgggcatggtgtagtactggcggcggcgcaggcggatgccgtccagcccatacactgcctgcagcatgtccaccgtgcagcctg

SEQ ID NO: 466795 - DNA, 1000 bp, Homo Sapiens; identical to SEQ ID NO: 336918

SEQ ID NO: 466796 - DNA, 561 bp, Homo Sapiens
agtctctaaaccgtttatttctccccaccagaaggttggggtgggcgggcctagaacacagcgtgcggcgggttcccgggtggagccagcgcagacagcgtgggtccctgcggctcttaggcgaaggtggagttgttccagcccacattggccgcgttcatgtcgtaatagttgatgtagaccctgtccgggctgatgcgcaggcgctcggccagcaggccgcacagcagcttgctgtaggagcggttctgcgcgccgccgatcttgccgatgctgtgcaggctgcagagcgcgcacggctcgctggagccgccgaaggccatgagctggtccgggaccacgtgcaccgcgatgtactgggggggcttgccggtggcctgcgccagctgctgggtgagctcggagaggaacccgtccggcacggaggcgcggggcacgttggtgtttacgatgaacatcggcatgatggcagaaggaccaggagacccgcgcagaggcacagacgcacgcgccgcggccgccgctgagctacgtgcctgacttctcggacaccactgtggt

SEQ ID NO: 466797 - DNA, 1000 bp, Homo Sapiens; identical to SEQ ID NO: 336922

SEQ ID NO: 466798 - DNA, 571 bp, Homo Sapiens
ctgtatatttcatgctttatttgctggaggggaatttgctttggaaaggtgttttccttccaagcccagctggcaggctctgtaaattcccagggcctcacttgggcaggaggggcctcccaaatctgtccaccttctccccagcgtggccatcacttggctgcatgctggggaagcatctcactcagcagcccttccagggtggccgggtacttttccagctgtctggagttcatcctcattccaatttccagaggagcagtcagcttgatcatttcgttttcttcttccctgatgggctccgcagggtctacaggaccttcctccccagacctctgccatacactcagggatttcttttgccctttattccgttccttttcctgcatcctctggagttcgccataggtgaagatggggacgaaggcttccgtctgggaggccagcatggcagctacatgcaccaccagcagagcagccacagccttacgggataccatcttggagggcgtgcacgtggtctgagtgggtctggaggagtctctctgcttgtcttctggtgtccggctga

SEQ ID NO: 466799 - DNA, 1000 bp, Homo Sapiens; identical to SEQ ID NO: 336923

SEQ ID NO: 466800 - DNA, 1000 bp, Homo Sapiens; identical to SEQ ID NO: 157958

SEQ ID NO: 466801 - DNA, 1000 bp, Homo Sapiens
aagataaaataactgacaaatcgtctttattaaataagcaaatagtctacacagatacagtcacttgtctgttgcacacgagtgcttccccttctcttgggaaagatcactctatgtgacaaggtgcaagctaagcagcagcccatttgaatgccctgtaataacataaaaatgaccggcaagatacagattcacgctcaagttcccttgagtgtgactcgagtcacagcacaggcaggagaaaacgaacatttcaattcacagagacttaggtgaagaattattagcttcatttaaagtgcccatattgtgccttctacatatctctttcaacaattaagccagctgttactcttcaaagtgtgtgtcactttctttgcatttgggtcaaactccaactgtgaagatccagtaaagaaataaaagaacccaaattcttcaaaaacagcatcaatctttgagtcaatccctggaaagtcttcagctatttgcttgggaaagcctggctccatggaatttctcttctcatcaaatctccagtatttgtcctctacaaagaaatatgttttgttcttttccttatcagaaatggctgcatcgattttcctcacggttggagggaaacctagggtgtggatgcctcttgggtatccagctcgtacctcatttcctctgatagcccagaattgatttcctttaaaaatgaaaacgaggtccttgctagtaacttcatatgcggcatccacgcctgaaggaagagatggccaaaatgaagagatcaaatgcaattcaggttcaagcttcctgagggatttgcgccaaaagtgcctgtctttaaagatcaggatttctcccctcagagtgctgacagcatcaaaggacaaagcaggatcacagttggctggcgtcccaggttctggagggacaggttccgtgggtaccaggggggtctcaggggagtcagggggaggtccatagagggactgaatgccatttatat

SEQ ID NO: 466802 - DNA, 1000 bp, Homo Sapiens; identical to SEQ ID NO: 157959

SEQ ID NO: 466803 - DNA, 1000 bp, Homo Sapiens; identical to SEQ ID NO: 336926

SEQ ID NO: 466804 - DNA, 1000 bp, Homo Sapiens; identical to SEQ ID NO: 336927

SEQ ID NO: 466805 - DNA, 1000 bp, Homo Sapiens
ttttttttctgttgaaaatatatttttattataaacaacataaacacttcctaatacactttgcaaatatgcatttcattttctttgcctgagtttttatcaacagtgtctctgagcacaatagttcttcccttgatggccgatcatatattcaataagtgccaagcaccctccccaagtatcaataggcactgtgggaagtgctgggggatttttttaaatgcagagaaaaaaaggcatccttccatatctcaagggatcacaatctagtagactgctttaaaaaaaaatttggatgtctcttttttaatatacatacttccactttataagatatattttatttcatgctatacaagtctttagaaaatagcctatatatccaagacaaaccggacaattaaataattagctaggtaaaatagggttaaaatgcaacttttagtcttaaataatcaaataatttatgaaaaagggatgccatggccttagactattttgataacaattttaactttgtaatgtgtgacttctgaagaacctgaaatattttaataaaaagacatcatccttctttatcctttataatatgcaaaggaatatttgtcttatatgagagcagactttgagtcattgccaaaagtgaaaattaaacagaattcaaaggccacatctactattcttaccactgctcttttgtctcctgtctttaatgactttgatatttcgttagtgtctgtgtgaagaagggcacatacatctgaatatcctcagtgcaaaatgaaaattatttatttggaagttacagtctattattacagacattttcctttggtttatttcttttatgtatggctctcccaaatttccattttcatactattttatactttttagtaagaatgatttattcattatatgcatgtatttactttatgcccttgtaaaatttccttataaatatatttttaaattatgctctcattgacagaccatgtgt

SEQ ID NO: 466806 - DNA, 1000 bp, Homo Sapiens; identical to SEQ ID NO: 336928

SEQ ID NO: 466807 - DNA, 1000 bp, Homo Sapiens; identical to SEQ ID NO: 336929

SEQ ID NO: 466808 - DNA, 1000 bp, Homo Sapiens; identical to SEQ ID NO: 157960

SEQ ID NO: 466809 - DNA, 1000 bp, Homo Sapiens; identical to SEQ ID NO: 336930

SEQ ID NO: 466810 - DNA, 1000 bp, Homo Sapiens; identical to SEQ ID NO: 157961

SEQ ID NO: 466811 - DNA, 1000 bp, Homo Sapiens; identical to SEQ ID NO: 336934

SEQ ID NO: 466812 - DNA, 1000 bp, Homo Sapiens; identical to SEQ ID NO: 344592

SEQ ID NO: 466813 - DNA, 572 bp, Homo Sapiens; identical to SEQ ID NO: 157962

SEQ ID NO: 466814 - DNA, 1000 bp, Homo Sapiens
ttttttttttttgaagtcttcctaaattttattggcactgaaatagaacatggattgagcataaacccctccaaaaacaatttttaaaaaacccaaaaagtacacaaaaaacccctgaatacaaaatctaaccttttcccccagcctccctaagggtaagttactgactttaaggcagctattaatagattgccccacaattccaggtttcaatttagccaatataggacatatcaccaagtgagctaattcacagcaatgcacacaagactcctcaaggtcaggcacagagtggggggtggtggccagggggaattgagggaggctctaagctaggggcactgcatggtgggacaggatggccccttgaggactgaaccctggggagaagacaaacagtaataataaaaacaaataacaagtactttaagaatggattgtatgacctatagtgacagatgacatcactaatactgaaagcttcttatattaataattttggcaaaatgtcattttgtaatatagtatatgctttccaggtgtgggggtggtaaagtaatgaggccaaaatcatcctgccccaagactaatatcttctaatggtgcattagcaaggaaggcagaaatcaatatttagatatcagtagagtacataatactgtagaaagaagaagagcacacatgagacagagaaggaggtggatgctcctgggttgagagcaaggggtgggggtgtggaagggactaggccagaatccccagcagctctctggtttacagctccaagggacagaacagctggtgtcaagacctgggttagaggtttgtcaaacagaggcagggcccagtcacctctttggaggggagtgatgagaaggggattttggtcacctgagagggttgagtaaacttggatcagggcacaggcttctctcaccatactcagctttttgcactcactccctagttgagcctactggcatcaagctctagatgccaa

SEQ ID NO: 466815 - DNA, 1000 bp, Homo Sapiens; identical to SEQ ID NO: 336936

SEQ ID NO: 466816 - DNA, 1000 bp, Homo Sapiens
ttttttttttgtgctttaatagtcatttgttcctttattggttcaagggtcagtgttggtgtggtcactgctgagtccactgtgcccagaagacagggtccacagcaggcactccataaatacatgttgcaggactgccctcactggctcactctgtggagtgagggacctaatgggcccatttacctattgcctctgaaagttaaagggcaggaacaaggtggagggccactgctctggcctggcatggcccagaggcagccttggggttagctcaaggcagctaagcaggtccagcccaagaactaagtcaagtgggccgaggaggctctgagagtggccggggccggcgtacattccctggcatgggtgagaactgcggctgttctggacgcacattcatctcatgcgaggtgctggggcccaagttcatgtaggttgctggcagctgcacataatggtccccaagcagtgcagacactatctgctccacctcccccactagtactctgaaggtgggtcgcactgctgggtctgcctcccagcattgctgcatcacttggtacagagaatcagggcaatactcaggctggggcaggcgccgaccctgggccaggaagtgggtaaggtcaaaagggtcaatgtggcggtatggtggggcaccccgtgtcagcagttcccacagcagcacaccaaatgaccacacatcagacttggtggtaaatctataggtctgcaggctctccagcgccatccacttcacaggtaggcgagcgtggcgatgctgttgaacactatagtactccctgtccaggatgtcgcgggccaaaccaaagtcagccaccttgactgtgaatgactcgtccagcatgcagttccgcgcagccaggtccctgtgcacaaacttctgctctgccaggtactccatgccgcgggctacctgcaggccaaagctgatgaggtccttcacggtggggttccgctgaggtgagcggatgaa

SEQ ID NO: 466817 - DNA, 1000 bp, Homo Sapiens; identical to SEQ ID NO: 157963

SEQ ID NO: 466818 - DNA, 1000 bp, Homo Sapiens; identical to SEQ ID NO: 336937

SEQ ID NO: 466819 - DNA, 1000 bp, Homo Sapiens; identical to SEQ ID NO: 157964

SEQ ID NO: 466820 - DNA, 1000 bp, Homo Sapiens; identical to SEQ ID NO: 336939

SEQ ID NO: 466821 - DNA, 1000 bp, Homo Sapiens; identical to SEQ ID NO: 157965

SEQ ID NO: 466822 - DNA, 1000 bp, Homo Sapiens; identical to SEQ ID NO: 336941

SEQ ID NO: 466823 - DNA, 1000 bp, Homo Sapiens; identical to SEQ ID NO: 336942

SEQ ID NO: 466824 - DNA, 1000 bp, Homo Sapiens; identical to SEQ ID NO: 157966

SEQ ID NO: 466825 - DNA, 1000 bp, Homo Sapiens; identical to SEQ ID NO: 157967

SEQ ID NO: 466826 - DNA, 1000 bp, Homo Sapiens; identical to SEQ ID NO: 336944

SEQ ID NO: 466827 - DNA, 1000 bp, Homo Sapiens
tttttttttttttttttttttggctcaatgatatatttgccagttattttattttttctaaaaacaatagaaaaaaatcaactttaaaaagcaaaatgtacttaaataaaaaaaattagggtttatagtacctataatactaggtactatatactaggattgaaattctgtgtaactgctataaacgttttattaaagttatttacatttaatggcaatatttacagagaaacattgtgtaaatcttaaaattttttaaaaacaattcttaaatacaaatctgttaaagaaaaaaaaaagatggtaagcataaaaaagttcttttatgcccaaagtccaatttgaggcagtttacattatggctaaatctttcagtctcaagactcagccaaggttgtgaggttgcatttgatcatgcatttgaaacaagttcataggtgattgctcaggacatttctgttagaaggaatcgttttccttacttttccttacgcacaagagttccgtagctgttcaagtttgtgtttcaactgttctcgtcgtttccgcaacaagtcctcttcagaaatgagcttttgctcctctgcttggacggacaggatgtatgctgtggcttttttaaggataactaccttgggggccttttcattgttttccaactccgggatctggtcacgcagggcaaaaaagctccgttttagctcgttcctcctctggcgctccaagacgttgtgtgttcgcctcttgacattctcctcggtgtccgaggacctggggctggtgcattttcggttgttgctgatctgtctcaggactctgacactgtccaacttgaccctcttggcagcaggatagtccttccgagtggagggaggcgctgcgtagttgtgctgatgtgtggagacgtggcacctcttgaggaccagtgggctgtgaggaggtttgctgtggcctccagcagaaggtgatccagactctgaccttttgccaggagcctgcc

SEQ ID NO: 466828 - DNA, 1000 bp, Homo Sapiens; identical to SEQ ID NO: 157968

SEQ ID NO: 466829 - DNA, 1000 bp, Homo Sapiens; identical to SEQ ID NO: 336947

SEQ ID NO: 466830 - DNA, 1000 bp, Homo Sapiens; identical to SEQ ID NO: 336948

SEQ ID NO: 466831 - DNA, 1000 bp, Homo Sapiens; identical to SEQ ID NO: 336950

SEQ ID NO: 466832 - DNA, 855 bp, Homo Sapiens
tcagaatcccagagcccagcctggccgtgttagagctgtttattaacagggagggcctgtaaggtccttggggcagtggtgtggtgataagtcgaggactccatctcagctcacccagccggggcctctctttaactcaccctggtatggctaaagccaagggccaggcacctggaagactctgcttcaccctgacatgatgtgcttgacaaaggcttcataattgatgcagccattggcatcctcttgcccagctaacagctgctccacttcagcctcagtcatcttctctcccagggtggcaaggacgtgccgaagctcagcacccatgaccgtgccattgctctccttgtcaaagacacgcaggccctccacgaagtcctcataggtgccctgctccttgttgcgggaaatgtgctgcaggatgggcaagaacgtctcaaagtccagcatcttgacattcatctcttcaggcttgggcttgcccagcacacgcagcacctcggcattggtagggttctggcccagggcccgcagtacatccccgcactggccgtaggtgatcttcatctctccagtcggggtccggtcaaacaatgaaaaggcctctttgaactcttcaatctggtcggcagtgaagtctatctttacactcttggggtcaaaggcaggttccttgggagcctcaggagctggggcaggggctggtgcaggggctggagctggagctggagctggcttggctgcctccttcttaggctcaggcttcttgggagccatgttgtcttgttgggatctttggcagaggagtgatctaagaagaaaccgagagacgtggcgtctgggagatgagat

SEQ ID NO: 466833 - DNA, 1000 bp, Homo Sapiens; identical to SEQ ID NO: 157969

SEQ ID NO: 466834 - DNA, 1000 bp, Homo Sapiens; identical to SEQ ID NO: 336952

SEQ ID NO: 466835 - DNA, 1000 bp, Homo Sapiens; identical to SEQ ID NO: 157970

SEQ ID NO: 466836 - DNA, 1000 bp, Homo Sapiens; identical to SEQ ID NO: 336954

SEQ ID NO: 466837 - DNA, 1000 bp, Homo Sapiens; identical to SEQ ID NO: 157971

SEQ ID NO: 466838 - DNA, 600 bp, Homo Sapiens; identical to SEQ ID NO: 336957

SEQ ID NO: 466839 - DNA, 823 bp, Homo Sapiens; identical to SEQ ID NO: 336958

SEQ ID NO: 466840 - DNA, 1000 bp, Homo Sapiens; identical to SEQ ID NO: 157973

SEQ ID NO: 466841 - DNA, 418 bp, Homo Sapiens
tttttttgaagaatacagaagtatttttatttctttttatttaatgatgcaaaatacaaatgctggcttgatatatattcacatataactttttctctcacatttacaactcaacagatggtgaatccagaggaacagctacaatcactatacggagcatactacattagtgtttcaaaagtttattccagcccatttcttcttttgtactctaaaatatcttcattgtgttgtttgatgagatagatccacaagaagacagtggtgcccaaggtgaacccaactttcagccagtcaggtttggcattcggcggctctcgcacgtagaactttgatcgcactgaagggccgctcgggagcctggcgggggccagcagccgggaaaggggacgcagcaaggcggacggcgccatcttgc

SEQ ID NO: 466842 - DNA, 779 bp, Homo Sapiens
ccgtggggtcggagtggttttattgggcagcaggggctgcaggccggtggggcgtcaccgatacaagtagtcagcctggatgttggcggcgatctcggcctcccacttgtccccgttgttgagcaacttctccttgttgtacagcagctcctcatgggtctccgtggagaactcaaagttggggccctcgacgatggcatccacgggacaggcctcctggcagaagccgcagtagatgcacttggtcatgtcgatgtcatagcgggtggtccggcggctgccatcagctcttggctcagcctcgatggtgatggcctgggcggggcagatggcctcgcagagcttgcaggcaatgcaacgctcctccccggatgggtaccggcgcagcgcatgctccccacggaagcgagggctcagcgggcccttctcgaacgggtagttgatggtggccggttcccggaacaggtagctcagggtcatgcccaggcctcggaagagctcagtccacagcagggtgcgggctgcccggtcagtcactgacttcatgtccatctcgggatcctgcatgttcacatacttgtaggtggctgccactgcactgctgtggaggctccggccaccaggaggtcctgcacgtgcagcctgggccagggcccgcagcagcataggcgtggtcaggcagcgcatcttgaagcgccgccgctacttgccttgccaagcaggccagtcaatcgggaggcggaggctacactgtaggacgctgccattgggccagcggg

SEQ ID NO: 466843 - DNA, 1000 bp, Homo Sapiens; identical to SEQ ID NO: 157974

SEQ ID NO: 466844 - DNA, 1000 bp, Homo Sapiens; identical to SEQ ID NO: 336963

SEQ ID NO: 466845 - DNA, 1000 bp, Homo Sapiens; identical to SEQ ID NO: 157975

SEQ ID NO: 466846 - DNA, 1000 bp, Homo Sapiens
tttttttttttttttttttttttttttaaagttaaattttataatttaattaagtgcttgtttttgtcactctacttctcaagtctcctgctactgctctggggctcatggcttgctctagggcagaaggaagttgctggaagcctggcctccaggctggaggggtgccaatgcaagggtcacactaatggaactatcaatgcacctgccttaaaggagcctgaagaatgcctccagtgggctgctgggcataagccctggactgtccatatactacttggaatattcaaacagagtccagagctcagaggcagggagagccaataggctgctgaaggcctagggaaagcaacacaggacagttgtccatttgagactctttctctatcaaagaggagttagggatatactggtcagttcagagaccacagtgtgaccctggcagaagaacttgctctctatatttcctaccatcatgggggacggccaaactgattgttactgaacaggttcagtgatgtggtatgagaagtgccagggacttaaggaaatagaattctgtaaagcagcctgacccccttctaggtctagaactgatcacattgaaaatgccaaaataagttcagctagatatacctatgagaggttttggcaaaagacttaggtatgatggctgggtttaagataacatgtgtgattccggatatggtataccaattcattatttggtatttcagactaaaaaattcatttgtgctcctaaagattttgatcagtttgggtaaagcaagcaatgtctgtctgatgtttcaggcattttcaggaggacaaataactgggacaactgaggctatgacttagtggcataaagttggtttcaggctaaaagtttggtttgtccaaataaagcccaatagtccctcaactctcagagcaatcacagtgatggtgtaaagagcctctttgaatgcgtgattgcatacctagtgaccatacaatc

SEQ ID NO: 466847 - DNA, 1000 bp, Homo Sapiens; identical to SEQ ID NO: 336965

SEQ ID NO: 466848 - DNA, 1000 bp, Homo Sapiens
ctttgctatttaatgttcatcacttaacgttttgtgtgtaagtttcaggagggcccaagaaatgattacacaggaggcaaggaggggaggtgataggagggttgctgggggtctggagctcatggcccccagctgggggccaaaagggttccatctcagctcaaggggagtaaaaaggggccccagaaccaaacacatgctaaaacatacttgcaagccaccaaaccccctccccacctgctggggaggaaaataaatacacccagactctgtcccactccccaggtgcccaggtgaggggccagcaggtgagtttcctcccctcatcacaggttgaggtcaaagaattgccatttactacagtgctcctagtcccttccacagggctgggggaaccctgggctggggagcggtggttgtcagcgcacagcctgcctggggcttgtcatgctaaatagaggggagccacactcactccaacttcaggcaaaacagaacaggccagggagggggtggaaagtccactgaggcctcatggcccccttctggccaagctcaggaaaaaacagtcctttgcagggttgtctagagctgggagaaatccccacaggtcacagtcgaagtcaattccttcttgccgcattcccacactggcccgcttttcttcatcgcaaccttctgggcccagccaaccccatgtttgcagggaaggggaggatgggggagcattcctccacgtgtaagcccttgaagacagacgccagctccagcctcggtcggcagtccttggcccgccaaacccgggggcgagtgaagacggccgagcagacctcaattccctccgatgcttctctggcagctgccccgggcagtatccagtctcagcccaagagaaaaaactcatggagaaaagtgagatttctcctcctgtgtgtgtgtgtgcgtgtgtctgtgtgttgcaaggtgaggggtccttggtccctgacccctaggctgattc

SEQ ID NO: 466849 - DNA, 1000 bp, Homo Sapiens; identical to SEQ ID NO: 336967

SEQ ID NO: 466850 - DNA, 1000 bp, Homo Sapiens; identical to SEQ ID NO: 336968

SEQ ID NO: 466851 - DNA, 1000 bp, Homo Sapiens; identical to SEQ ID NO: 336969

SEQ ID NO: 466852 - DNA, 1000 bp, Homo Sapiens; identical to SEQ ID NO: 336970

SEQ ID NO: 466853 - DNA, 1000 bp, Homo Sapiens
gttttctattaaaatcaacaaaatgcaatatatacagatatcacacagacctgggccctgggacaggaagggtcaggcccagccaagcacagggagggaggaaggaggggtcagttccgggctggggagggggcttctgagcccccttcccaaccgtcactcaatcctgcctatgactaccagaaggggagggtgcagtcgggcctaccccagccccatcccaagaggagcaggactacaccaagctgaggtcaggagttgggggggaggaggagagggaagaggaggagatgggaggagagaaaagggtgggagcacacaccacaggcctcatcccactttctgggggtttgaggccctcactccctgctcgtaggtgacccgctgactgatgaggtattgagcggcttgcgtggccgcggggctgcccgtgatggtgacccgccggttccgcgtgcctggcaggaactcgcccttcttggagatctggatgcgagcgcccgtcagctcctggtactccaccaacgtcttgccccccttccccaggatggctcccaccaggttctcaggcaccgcaatctccaccagctccttggcactctcagccgccagcttctccgccgtcaggaagcccccggccgccccggccgcggctgcagcggccaccagcgggccgccccctccgcccgccccgccgcccgccccggccccgaggtagccgttggcggctgcggccaacgcaaaggaccccagggctccgggaggcgggggcggcggcggggcggcccctccggctggcccggccccggcctcgcccgcgtaggatgccaggaggttggcggcggcggcggccgctgggttggccccggcggccacggcggccaggacgccggaagctgcggccgagttgaggcccaggcccagggagttggtgttgtagccgtaactggccagcgtgttaagcgccgtgctgatggccagcaggtcggtgcctgagaag

SEQ ID NO: 466854 - DNA, 1000 bp, Homo Sapiens; identical to SEQ ID NO: 336971

SEQ ID NO: 466855 - DNA, 1000 bp, Homo Sapiens; identical to SEQ ID NO: 157978

SEQ ID NO: 466856 - DNA, 692 bp, Homo Sapiens; identical to SEQ ID NO: 336974

SEQ ID NO: 466857 - DNA, 1000 bp, Homo Sapiens
agtctttctccactctttactgggtaaaaataaactcaacaattcatgtcatttcagcaagaaaatgaaaaaaaaaaaaaaagcaagaataccagtagaaatagtgcatttccagaattgctgatgggaggtggcaggtcccatggttttgacccatttgatacccaaaaggctgcagatcatatgaaaaatgtacagctttggttagcaaataatgaaaaagtgagatacatcgattctctttcatattatacagtatatacattataacaatatcaaccatagggggtttgctttttttttttttttttttttttggcaaatgagacaaaattgggactctaagtattgggctttttttttttctcttcaatgacttgttccctttcaacaaattgcacttcagtccactgtgtacagaagtaatacatttcccatcgttagttgaataaatttacacactgtgtttaagagatgaaaccacgacttcgtcaagccacatttggttgccataagattccaaaggattctatcctcttaatgtgaaccacatgtaacccaaggttcttctatcaaggttagaactgatattcaaatcctcggctcattccacttagtaagtcagctccaagacacaggttcaccataaatggccagttttacctcctggtccccaacatgcttttgagaacaggtggcccctctttggagctcactggaatgactgaacctcatgccagcctctcctcaccccctcactgcccacaagacacccccttggtctcaggtcccagggctggtgacaaagtgatctttgcagtcttagaaaataaactgggaatctacaaaaggaaaagaaagcatacaaaatgtatctctttcttccaaaatacatgctttcagttctacgttttggtggagcctgaaagtattttcaagggagatataggttgagttaatttataggtttgtccttttctttcataaaaatactcttgtt

SEQ ID NO: 466858 - DNA, 1000 bp, Homo Sapiens
ttttttttttttttttttttttttttttttttttttttttttttttatctttcagtgcactttaatcgaaattccatcatcagaagagttctcgtagcatacaatgtcaggatgggcatgtcgacttggtcctacaaatggaatatccacagatttgcacttcaaacatgtatgaaaaataaaatatataatatttagctttataaatttccccacttagtcactttatctttaaaataaattactactcccgtccaatacagtgagtagcttggagtcactcagacaatctctagccaaatgatctctgttttcttgaggagttctgtagggaaatacttgatgaagacagtccagtgcttacaagaatcaacatgaatttaaaacgagcacactcttcacagtggggcggaacatcagaaaatgggagccttcttctaatggctgttcttttctgttgggaaaaaaaaaaaacaaaacctccaaaccacaccggatggttgtaaaaagctgcaacggaacctttggcaccagatgagaagagaggccttttaatgccatagctagtgatgattcagtcaaagcatcagtctaaggaaggatgatgggggaagggaccggagatcacagcccttctcctttctgagcccccctcccccccgatgtcccctttctggagacacagacagcccctctgctttggggaaggcggggctttgtctgggcaggctgggcgttcttcagacgggaagattcacaatgtatagaacacaaagggagaggcccttttgcagatcggggggtagccgcttgctgcgagcttagtcaccagcggggatgcactcaatgcacaagggacatggccactccagcgggacggctgcacagccatgaaaggggacagacagaaggggtgcacgggacaccaaggaactggaaggcggcaggactcaggctgcgatagcatttacaggggctctgaagaggggctgctggacct

SEQ ID NO: 466859 - DNA, 1000 bp, Homo Sapiens; identical to SEQ ID NO: 157979

SEQ ID NO: 466860 - DNA, 1000 bp, Homo Sapiens; identical to SEQ ID NO: 157980

SEQ ID NO: 466861 - DNA, 1000 bp, Homo Sapiens
gggtttttttttctttctttttttttccttttttcagtgttgtatgtgtagcaggcacttgagtttatatgaagatgttcgcttcagtcaaggatggaaggagttgtgaggtggaagggagatgtgaggcagggagagaggaggcaacagagtatgaattcatgaccaccagccaccactagccaagaatgtccaggtagattggggtggccttccccaaagcatggaggattttgtagatctccttgatgttcaaccgctgctgtggttccctctgccagcaccccagcatgacatcgtacacctctttggggcagactcggggccgctccaaaacacgaccttgggtaatgcactcaatgacctccgtgtttgagagttggaaccatggctgctttccataggtgaagatctcccagaggatcaccccgaagctccatacatcactctctgtagtgaacttccggtacatgatgctttcaggaggcatccagcgaatggggagcatggtgtgtcctcccaccctgtaataatccgtgctgtagacatctctggacatgccgaagtccccaatcttcactagcagattcgctccaaccaggcagttcctggtggccaggtctcggtgcacaaagtgctgggaggccaggtacaccatacccgaggcgatctgactggcaatgtggagcatttgggagagccccagctcacccttggcctggcgtggctgtccatccacaaggatcattgcatctggcccatgggccctgaggaacttattcaggtctccatgcttcatgtattcaaagaccatgatgagggggtccccatcgccgcacactccatagaacttgacaatgtgctcatgctgcaggttggtgagcagctcggcctccctctggaaatccttccgggcagccagggtgggatccttcagggccttcacagccacaagcatcttgtccttggtcgggctgaggttgtagcactcggccaggaa

SEQ ID NO: 466862 - DNA, 1000 bp, Homo Sapiens
ccacatcgaggcccttcggccacctttattgagagatacacggggtttgttttcaccacctgcagatggtgggagtgggggtgggcgtttgagctgtgagggctgtgccgtcaccaggggccggctcaggggctccggactccatgaccgacgcactcatggcacgcagggccagcttccggggccacatcatgacctggccgcaagctagtgatacgagatcaggtgtcgtgggtgtgtctgtggtgcatggacacgtgtccctacctacggtaagtgcacagataggagcatcaagacatcaacgggaaagccgacttcagtcacagccacagaccccgccccagagaccccacgtctaccgagggtctagggcagtggggcatccactctgccctctctcagagcaccatcctgagagacaccgttctgtctgttccggggtggatcctccaggacagtctcatccagctgagagggcggaacgaccacatctgttccttagatggggaaaccgaggctcagaaattatggcccaaggtccaggagccccagagaagggtctgaggctgccctgtctggctctgagtccaggtcctcgttcagagcccagcctgaggggccttagcatttgctagactctgagcccactcctgagcagggataggggctgcaccgacctctggacatccctggctggcagcaaagctcttccgcccagagcagactatgtcatgggagctctgtgggggaggaaggcccctctgtgctggccctgtttccctggggttggtggcccttgggcactgggagggctgcctggctgatgaccaggcttgtgggggcaaagtttggcaggaagtgcagcgaataggcctgactcccctgggccccgttcttggtgagccgaagggtcctgtggttggagagggattttgtggggttcaaggaacccgtcaactcaacagccagatccaagcgactgcagatactgtagcat

SEQ ID NO: 466863 - DNA, 1000 bp, Homo Sapiens; identical to SEQ ID NO: 157982

SEQ ID NO: 466864 - DNA, 1000 bp, Homo Sapiens; identical to SEQ ID NO: 345733

SEQ ID NO: 466865 - DNA, 1000 bp, Homo Sapiens; identical to SEQ ID NO: 336980

SEQ ID NO: 466866 - DNA, 1000 bp, Homo Sapiens; identical to SEQ ID NO: 336981

SEQ ID NO: 466867 - DNA, 1000 bp, Homo Sapiens; identical to SEQ ID NO: 157983

SEQ ID NO: 466868 - DNA, 1000 bp, Homo Sapiens; identical to SEQ ID NO: 336983

SEQ ID NO: 466869 - DNA, 1000 bp, Homo Sapiens; identical to SEQ ID NO: 157984

SEQ ID NO: 466870 - DNA, 1000 bp, Homo Sapiens; identical to SEQ ID NO: 157985

SEQ ID NO: 466871 - DNA, 1000 bp, Homo Sapiens; identical to SEQ ID NO: 157986

SEQ ID NO: 466872 - DNA, 1000 bp, Homo Sapiens
tttttttttttttttttttttttttttttttttttttttttttttttttttgagcatagaccttttattttccagatgtttgacagtgtaaacatacataaaatacatattaaagtttagatgctttatattttgtgcaataaattgaagccttaaaacatttcattttttttataaaagaaactcattagtttacttaattaagacagtaaaatagcagcaagtaccaagacattgtgcatttcttttatttaagacaagttacttcatttacatcagagttagaaatgttaagactggctttcttgaatacttaaatatagctcgaatcactggttagatatggacatattttcccaactgtacatcagggaggagtgctttcattagtttcagaaaatgcagaccctcagacagccagcatgaccacaacattgagcaataagagaaatgaagcatttactttccaagcatttgccacagaaggtaatggagtctttacatttgtggttgtctcttccctccataagttaagggttgtgctttgttgaggcatttcagagaaattatttggcatgccactagtgatacttagggtcatgggtgttggggatgattttgttgagctagtgaggcttgtgtttgtgaccattccatcttggagatgaatagttagagttgcagctgctgcttcatgtgaattgatagtctctgtggatgtatcttctggatagggcacaaaagccttatcagtgctagtaaaggtggtgtctttgcttagagtggcaccaaacgttgtttcctttgttcgatattgtttgggtattttggtcactttgggttgagttaccacactcagagagttaatggtgtccactgtctgcatcccacttacagtgaataagcttgaggtaaatccagaaggtgtgggatacatgttatgttcctttaaagatgatatttgggtagaacatggagtccctatcacatgggcttttgt

SEQ ID NO: 466873 - DNA, 1000 bp, Homo Sapiens; identical to SEQ ID NO: 336986

SEQ ID NO: 466874 - DNA, 1000 bp, Homo Sapiens; identical to SEQ ID NO: 246427

SEQ ID NO: 466875 - DNA, 1000 bp, Homo Sapiens; identical to SEQ ID NO: 157987

SEQ ID NO: 466876 - DNA, 1000 bp, Homo Sapiens
ttttttggattttaaaaagaacttgtatttattatattttgcaactatgatcttttaaaacagtggccttaggaaaatctgctttggcaagcgactgcagaggctcctgtggagaggaagtgaaaagaatgggcatataaacaagggctgctggcacgttcaaagcgcaggggatagttcacagagcaaaatgtagtcctaagtaaatgggtttcaggcaatttcagtgttaagataacatcattaagagtagaacagattgtgctcaaaccctgctgtttataattaacacgttgcttccaaatactccagggtccctggtaaatagtcttctgctcacatccacccagaccaatcagaatattttcatcagattccatgctgggccagcacctgtttggacaaatccaatagagccaaagaactcctctccttggccagctaagtagctggatgaacacagcttggcttagtcattgtcacagtgtccatatggctttgaagcttgttttcacaagaaatcatacaagtattttattatgtcaaagttcaccgtccttgcaatagctctgatgaagtctagagacactgtgcatttgtattttggtccatcaagctgatcgtcatggccaaccagggttaacagctgaagggtcactagagaggtaatctgggaaaaaatatttgctgttggagcaactctgctgtccacgatactatataatattgctaataatctgtctagtggaaatggttttggcccaaggagatgattgcttgtcttttcgtgtttttttagaaagttggttttcttgatttttccatgatgcttaagaaaaaacctcttgtcagttcttgctggattgtatgaagcaaggtatgcagcaattagaatgaacttagagtaatatggaagttccacatgagtatgcgctgagaggcctttcagttgccccggatctgtgtcatctttctgtagcttttcccactgggaacttga

SEQ ID NO: 466877 - DNA, 1000 bp, Homo Sapiens; identical to SEQ ID NO: 336989

SEQ ID NO: 466878 - DNA, 1000 bp, Homo Sapiens; identical to SEQ ID NO: 157988

SEQ ID NO: 466879 - DNA, 1000 bp, Homo Sapiens
ttttttttttttttttttttttttttttttttttttttttttttttgtttgtcctcattccctttattgtactccacccgtcgcttcccccagaccttctgttcagacagagccaggcaggccttgggagctggggctgagccacaggcagggagcccaggatttggctggggctcccaccccaacccgaggtagctgagtaaggattcatggctgggagggctgtcctggcctggcacacttggagagaagcctttccctatggaggtgacatggcacggaccatgtgtgtgtgcttgggggtgtagatgtgtgtagatggttgtgtttgcagggcccaagctgttcacatacacagtgtggaaggatgctgtgtgcacgtaggtggtgtgtacactgggttgtgtgcatgagacactgtgtggcacgtgagcacacaacacacatgctgaaggtgtttgagaccctgttcagtgtctgcacctgaacaggaagtgcaggctcagggctaagtctgactcccgctcaggagcttagagtcagaaagttcgaggacggcacttcttaaacttaggtcccagaatggcctggggagtttgccatccacacagatcatacggccagccctggagcttttggttcaggaggtctgggggtgggcccaggagcttgcattgtcgataagttccccagggaaaccgaaggccaggaagaaacagggctcaagcagggctgtctaatagaactttctttgacagtgaaaatgccccgagctgtccagtatggcagccactaaccacacgtatctactgagcagttgaaatgtggctagttcagccgaggaattgaattttgtgtttcattctattttattttagtttaatttagtcacctatggttactgactgccacatcggagagcacagatctagagaaatggaggcagcgggttggataatgagagtccggagagagaagcacgaagctagggtgcaggtgt

SEQ ID NO: 466880 - DNA, 1000 bp, Homo Sapiens
tcccatgccccttgctcaggcagggtcctctgtggggaggcctggagcctttgtgagtgtggggccctggaaagaggccctagtggcctatggagaaggcccccgaatcggtggactgcttctccgctgtggtctggtcgctggggtacactgggttggtcaaagccgcgattttcagcgtagtctcattcacctcctcaaacttcttggctttgtactggtcggcccccttgaggaagttgagcaggatgatgtcacagagaacagttcccactcccacagaagtaaaggccgccacagagctgatgatggtggggatgatgttgaacttgccagcattcccgtataccagcacgtcgaagcggatgccaaaagccttcaggagggtgcggtactcactgccattttccattttgtagtacttggcaaacctgaagttgtagcctggggacacgctgcttttctcagaaacgctgtcgagccgggtgaaggagtatttggggatgcactggtcccaggccttgtccaagtcgcacacccagccgatcttaatgcccagaactccccccgtgcgcgccagtttggcaaaatcctgccccgcaaacttgaccacgtcccctacccgcaagatggggcagaaagggtccttgtccgggtggaagcggcaggtcttcatgtccctggctgtcaggttgggaaggaggtttcccttctcaaagttgaagagggggaaacggatgctgttcttgatgaaaatagtgaagttctcagcttccatcatgatgggcgtttccactgtgtccacctccgtggggcaccagccctggatctcacaggtccggagcacagagctgtagttcacgcagcggccagtgaggatccccccacctggcaagcgctcaggcccgcactggctgtctgatacacagcggtatttctcctcactctctgggcagaatccttgcatctgattttcagtaacaatcatcttggtgatgat

SEQ ID NO: 466881 - DNA, 1000 bp, Homo Sapiens; identical to SEQ ID NO: 157989

SEQ ID NO: 466882 - DNA, 1000 bp, Homo Sapiens
tttaacagtcccccggctggttttgaggggacagtcctttattgtttttttccaaaaccgggcagaggggtggcagctcttgtgcctggggtccctgccagtccgtggaccaggcctggagactggccatctggctccgtgcccgcttcgtcctcacattaccccgtcctctgcccacccacccccaagatgccacttgggtgtctggggtcttggggtgcccccagaagtcttatacctgccaccctcccctaccccaggccgtccaccaactaagccagctgccactgtgtactcggtccgggacccttggcgacagaagacagcctccgagagcgcgggctccaagggcaataaagcagctccactctctctacttggttctttttgttcttgcgtctccagtcctgtggcgggggccagtgcctcccctcctctgggcgtggtctggtccctgaccctgcagggagccctgtggccagcgctgtgggtgggaaaggcgactgctcctgcctgggctgcagctgggcctgacctggctgcaagcacaggtgttgctttttgggggaagggatgtgtcggggctcgggccctgccctcagggttctccagcaacacctagggtgaggaggcagcttccgctaggccacatcattggctcagctcacgggactggggctctgacggtttaggggcggctgtggcattgaggggcagggcttggccagtgctcttggcgtcctctgggttccagctgtccctgtagccggggcagtgtcggcagcagcagcccaggctgggcactgcggccatgtagagtagagggtggacacagaaggccaggggcatgaggccccgcatcacctggtagcccacgtagggccccagctccagggctgctgtggcctgggctatgtctgcaaagctcgggcagcgggtgctccagcgccgccgagcatccacgttgagcacccgcatgatgtggtagggcacataggag

SEQ ID NO: 466883 - DNA, 1000 bp, Homo Sapiens; identical to SEQ ID NO: 336994

SEQ ID NO: 466884 - DNA, 1000 bp, Homo Sapiens; identical to SEQ ID NO: 336995

SEQ ID NO: 466885 - DNA, 1000 bp, Homo Sapiens; identical to SEQ ID NO: 336996

SEQ ID NO: 466886 - DNA, 1000 bp, Homo Sapiens; identical to SEQ ID NO: 157991

SEQ ID NO: 466887 - DNA, 1000 bp, Homo Sapiens
ggaaaaagccaagtagaatgattctgataattattatatatgacataatccacagaaaggccaagaaaagaatcttcatattgttcagtatttaggcttgatgttgtcccaagaaaacagtgataataattcaatgaatgtgttacacatacaactaaaaagtccccttctggtttcaaatgaatttaaacaacaatcttccttggctaatttttctcctctgtcaaacaaaccttctatgtacaggaccagtttaaatccctcctccccttcaaacactagatatgaacatccaggaacattctacaatgcaaagtgccttaagaaagagaaggattctgtagtgccagtgatagaactgatctgaggaagctgagatgctattaacactgataagagccagtcaggcaatggtggtttgtttctcctcaggtgtttcctccaacaactgcatgatcagttcatgcaggggtttgcagatctttgcatagccccctcctgtcagatgcagaaaatcaaacatgtcgtggcaggagatggcaccgtccgagtgcacaaaacccccgtcggtatccaggagctgcacgttggcaagcttcggcagcgaaaccttgaggagttggttcaccttggcgttcttttgcctcaaaggattgggtttctcacctcgaggtaacaaacccaatacaatgattttggcctgtggctgccttgtgttgataagttgtacaatggcctcgatcccacctgctacttcttctgctgtattttcgtggttatttgttcctacccagacaacaatgaccttaggcttaatattctccagttctccattctttagtctccacaaaacatgtcttgttgtatctcccccaattccaaaattcagtgcatgaagtggggaaaaaagctctcgccatatctcatattgctgcattaactgcaccatggagtctcccacgaacagtacatcaggctctttgtctttacagtccaaaac

SEQ ID NO: 466888 - DNA, 1000 bp, Homo Sapiens; identical to SEQ ID NO: 157992

SEQ ID NO: 466889 - DNA, 1000 bp, Homo Sapiens
gttgtttggaagcaggtttatttattatatacttgcaattgaatataagatacagacatatatatgtgttatgtatttctagaaatgcacataacatatatttgcctattgtttaatgttttttccagatatttattacagaagggcatggagggtacctacttattcttcattatgagaacaattaaaggcatttattagataggaaattaacagatcatctgcttctataactttattagctacattaaataggcagtgagcaataatttaaaaactcaccattatataaaataataaataacaaagtaaaagttaatgttataaaaataaactgatagtaaggaaaatctaaatgggcatgatcccattttagaagaccaaatgattaatagggttgtcatgttataatagacaattgtctaattatttctgtgtttttatttagtgggtagcagaagttgttcagaagagcagaaatatgtagaaaacatctctaaatttttggcaatttgaaatagcaattctgaggcacacagctcatctacaaaaatcttttgcagaagcagcacgcttagttttagggtgaggaaaatctgccgaaaaataaaatgcagttggttatcttatgcataataagaaaaagaaaaggatgatctgccacaaactgtgggcctccatgtccagttctccctgtcataacacctcctgtgccagcggctgcttcagtgccctcctcattcacatccaccatggcttggtggaacacttcagaaagaaacaggtcattcctctccgacatccctgagaaattggcccgtcccttgttgaaggcgtcctccatgcccatgcttctcagaatggatctgagttcataatgctcttctaatttgaactggggtatgtatacctcaacttcatcttcagccattttgtctttgctggtccacttgttgagtttgtcataggttatttcactttccagcagctccaagccagt

SEQ ID NO: 466890 - DNA, 1000 bp, Homo Sapiens; identical to SEQ ID NO: 337000

SEQ ID NO: 466891 - DNA, 1000 bp, Homo Sapiens; identical to SEQ ID NO: 337001

SEQ ID NO: 466892 - DNA, 1000 bp, Homo Sapiens; identical to SEQ ID NO: 337002

SEQ ID NO: 466893 - DNA, 1000 bp, Homo Sapiens; identical to SEQ ID NO: 337003

SEQ ID NO: 466894 - DNA, 1000 bp, Homo Sapiens; identical to SEQ ID NO: 337004

SEQ ID NO: 466895 - DNA, 1000 bp, Homo Sapiens; identical to SEQ ID NO: 337005

SEQ ID NO: 466896 - DNA, 1000 bp, Homo Sapiens; identical to SEQ ID NO: 157993

SEQ ID NO: 466897 - DNA, 1000 bp, Homo Sapiens; identical to SEQ ID NO: 337006

SEQ ID NO: 466898 - DNA, 1000 bp, Homo Sapiens; identical to SEQ ID NO: 157994

SEQ ID NO: 466899 - DNA, 1000 bp, Homo Sapiens; identical to SEQ ID NO: 337008

SEQ ID NO: 466900 - DNA, 1000 bp, Homo Sapiens
attgatcaatttagatttttattcaaaatcagtatttaatgtattaaagacaaagacataagaggctgaatttccctttgttcacacaaagtctcaaacttattgttgcaatatgcttttggattttttaaaagacatcactgttacgtctaataggtgctaaccgcctctttaagaatggaatttctggtgactcagacatccattagtagcacatttctgcattaatactgtttcatacatttattttattttcatactatttttctgtatatgagaaagaaaaagactcaaaaataaaatgtacaacaagtggaacaagcagtgattggctgacaccccacggccaagggcaggctccagcaggtttcggagtagaaaggtcatcacagtatggtgcataatggagcatcatattagagtggaattcagccaaacacagtaatgtatggatgtagacgcatctgtttgctgtacttgttattggtttgacagctgtactcagagcagtgatctgatccaattgaaatgttgtctcctgctcccacaaatgtgttggctggtggtagatcttgtacggcctggtgtttttttcctgcagttggtgactggggatgaagctgaacagtaggcaatggggaactagatttgtaatgccttgccaggtcaggactgccgggcccaccattaacggacctgtatcgccccatgcttgggctgtctgacagcttctcattgacactatcatacctctgtccatttggcttagaagcctccacagtgacaatgctgctgtagagaggctgcttagattttttgtttttcttgtcctttttaggctttttagatttgtcatgctgttggggtgtaaaaaagtcttcgtgatcttttttgccggcttcatagccatttttatttttggacctgcagtaccttgccatcactacaattaagatgattagaatcaccgtcataatgccagcaaccacgccaatgacaa

SEQ ID NO: 466901 - DNA, 1000 bp, Homo Sapiens
ttttttttttttttttttttttttttttttttttttttttttttttttttttttttttttttttttttttttttttcttcaaacacatgacaaatcttttattactgtgcttataagtgacacggtttacggaaaaccaaatgtaattaaataacattgaacttgaaatctaccacagagtcaagatatacaagttatacttggcaaggcaaaatttctcaaacactaggttgtttcaggtgaaagataaatttcaattaagtaattccaacatgttttgttttttgtcttacagacagttcctttggcaataacttccactttagcttttattatataaaaatataacaaaatttcattatatacaaacattacattacacaatgtacaggttaaaaacactaagaaaatggcaagccgcaattgaaatcaaagtcaatagcataagaaaaattaaatactgcacacatttcataaaaattacattaactacatttttgtttgcaaataccaaacagtaccaatgtgattggaaatagcttccaacaacttcattgtaaggcacatcttgcatatttatatatacaacactgaaaccggtcaataacttaggggcttctcggagtgacctgtatatgtgtgaagacatgcagcatgggattacacattttcattggctcccttcttcggggacaggtacctgccaggaggggactggtagaggggtactccaatctcctgcaggtctgggagcctccctggacggggaggggagagcagagtgactgtcctgtcatagtctctgtgcagtactttctcatagacgctctgcagccccactgtcttgggcagctgggcctggtagtaattgtccctgcgcagaggatcccgaggcagtgacgtgctcttacagaaggttgacatctgggctggtgggtgaggcgatggatgtgcgttgggcccgctgcaggatgggctccagcagcggtcagagtggccc

SEQ ID NO: 466902 - DNA, 1000 bp, Homo Sapiens; identical to SEQ ID NO: 337009

SEQ ID NO: 466903 - DNA, 1000 bp, Homo Sapiens; identical to SEQ ID NO: 337010

SEQ ID NO: 466904 - DNA, 1000 bp, Homo Sapiens; identical to SEQ ID NO: 337011

SEQ ID NO: 466905 - DNA, 1000 bp, Homo Sapiens
tttttttttttttttttttggtagaaagaaatagatttattctcatgtacaaagcggtcagcccacgggaccatatacgacagttgcacagagtcctagaaaaacgcatctctctaaaggcaactcagaaaggtaaggcaggtggaccccctcccccaccccacaacgcacacagaatgaaacggagaaaaagagagaagccagtggcgggctgacccaagagtcccggcctatggggtctcccaagccccagggcacaggtggatatggccttgaagagagcgctgccaggctgaggccaggtctctcactggctgcaggaatgggtaaggggctcaggccaaggggaacactcagggggcctctgagacactcagggttggctctctgtgccttagggttgcagaaacattccatagcctctgctgggactccgcagagccatagagctattttagacattgatctaaaatggatcttagagcatggattgtcttacccgctccctgtttggcccagacaggggaagagactcgcccagcgtcacacaggcaggaggaagcatggctggctcattcatacctgggcctgtctcccagtgcggggatccctcctgcccatcaatcccatcctgcttctccccagggcccctctctgcagagcactgagctgcccctctggccagcttcttcctggggcccctgtatcccccaggtcccaatcccaccatcagtatagtagtggtcctcagggggccttcgccgcggctgtttctagtcctcccacagaactaaggactgtttccaagatgccacactctgctcactcagatgtctcaccttccccttccatgaggatcctggagacccaaagggtgggagtcctcaaagggaaaggagcaaagatctggtggggcagaaatggggcaaggagaaaccatcaagctgctcagacaaagaatggcttgggaaagacttgccaaggtgtggtcagaggtgca

SEQ ID NO: 466906 - DNA, 1000 bp, Homo Sapiens; identical to SEQ ID NO: 157995

SEQ ID NO: 466907 - DNA, 1000 bp, Homo Sapiens
acaactttaaatacggaatataaataaattttacatttaaaaaataaaaggaaagcccccaaaaatataatcaccgactttacaaactgaaggaagcaggttttggaaggcgggaagggggaaagtgcagtaggtgggaagggaggtgggagctcagatcccaccccagggggtcttggggatcttttcccttctctcccccattcccagcccacgagctggtttcctaggaggagccaccagaggtggagctcagaaggatcaaagatggggaagtgtgcaagcagggaggggtgcgggcaagagggctgcaccctcccttggagaccttctcccaggtgtcccacacccacctggaagggcagttgctggagcagaggactttgggaaatggaggtcatgtggacagcagtgttgcctccctgcccctaccacagtctccctcctatttggccactccagccacaggctgcatcaggggcacagccagtccacaaggagtctttgtgtgaattaggaaaaggatccttttcctctttacctacatctgccagaaattgtcataataaatatacaaatcagctttatctatgatgtgaacagtgctccctgcatacaatgtccttgtgcagtacacaccctgcacaaccttacatggcagtcgtggctgggttggaatatgatgagcaggtcccttgctgccctggcctctagtcttctgccctagagaggagtgactggggtcatctggggccttaataaggggttcaagagccccttggtggagcagactgaagggccaggacaagaggaaaatgcagggtggaggtagagagatgaaaggaaccagaggaagaggtgaatcagagtggagtatggggaggaaggggtggcaggaggcaggggatacccaggtcaccatctacaccacctcaacagcaaactccatctctaacccacctgagagggcacccagccacttggtgtgctggccacaccc

SEQ ID NO: 466908 - DNA, 1000 bp, Homo Sapiens; identical to SEQ ID NO: 337018

SEQ ID NO: 466909 - DNA, 1000 bp, Homo Sapiens; identical to SEQ ID NO: 337019

SEQ ID NO: 466910 - DNA, 1000 bp, Homo Sapiens; identical to SEQ ID NO: 337022

SEQ ID NO: 466911 - DNA, 1000 bp, Homo Sapiens; identical to SEQ ID NO: 337023

SEQ ID NO: 466912 - DNA, 1000 bp, Homo Sapiens
tttttttttttttttttagggatgcattttgaatatttattgtccttgtttttaacataatttgcaaatttacataattataatggctgtgtttgacaactggcttgcaacaaaattcttgaaaattgaataattggcccacctgggctgggatgagccagctggatcacaccgttgccccctcagcctctaggaggcctcaggattatggcgtccatcttatgatattggccaaaaggagacagtcttggaggtgctgcttactgttgaacttccttttggaatgtatgggagaaggcagggaaaggaatctttaggcagactgccatccagggactgctattctgttcactgagattcagctgtgaacatctgttctttcttcctcttctgtctactgcatgcaggcccggaagctgagcgttagtcaaaggtacaggaagggaaaagagaagagggcaaggcccatcccccaagaaaggaagggctctgatgcagagggagcaggagctgaggtggagacggccactgcctctctcaccctctgttccatccctctgctcaagaaaaccaggcttagcagagtgggacagacgctttttattggtctggctggcgtgcctagtggaaagctcaggcagagcttcctatcttgccctggctcccatcttccctctcctgggagttcatcacacatcccgagagggaagagtgtcctgggcagaggtggcaggcaaagccgggtaaaaactccagggctgggaagcaaatggggctcagggtgatgcagaaaatgtgatgttgccaggccatccaaataaagcatccatcggggcagaggagaagctgtttccctgcagacactcctctgcccccaccaggaatgggaggggcaggaggaagagcttcccagagaggctccctactgggcccttcgtgccatcagcatctcccggatgttgtcctcagcttccttaacgcttcgctccaggtaggactt

SEQ ID NO: 466913 - DNA, 661 bp, Homo Sapiens
ttttttttttttttttttttttttttttttttttttttttttttttttttttttttttctgcccagctggcacatttattggcattaaaacacaagacccttcccatcaccaggaagccacgcccaaagggtgtccctctgccccatttctgcaaaaactctcaggccttagcagtagcctgagctgcccccagggctgtgagctgctgaatcttctgactcatcatttccatgacggcctgtttcatggcgtgcttctcctgaagagctggttggattttctccatctgcttggttagaaaatctatcttcctcttgaagaagtccttggcatcctcagctgtcttctctacatagtacccagttcccacatcgatgagcacgtgttccacatcatgcagcttcccagggacatacatagaactcgtcagtgggacgagtaattctttcccctcgttgctcttgttcagcacgttcagacagtccttggcttccacatacttggtctgtaccactttgagctgagcaatggacgtggacaagaactccacttcctggtccagctggttcttgagcatttctagctgcggcagattcagctccgtgatgttaatagactgcgccatgttgggaaggccgacttaacgaagaggaagtctct

SEQ ID NO: 466914 - DNA, 1000 bp, Homo Sapiens
tttttttttttttttttttttttttttttttttttttttttttattgcacatcactcctttattatactgatatggaaaaaggatttagtacagttatgctcagatgaacactggacccatgtggcagggtcaagcaactagaacatgattcagaaatcagtgaaagatacacttggacaggaccaagaggcatttcactgccatgaaacaaggcaggaagggattctaatacacacaccaggaagcactcctgcccctcagaggtcaaggagctgatcctatattggtatgaggaatggcttattttctgatgaccacatgtgggactatttcaaccgccacaagaaaccccagaagggttattgttttgtattatatatactatacttttttaataaaagtaaattaacacataacgaaattcaggattgatcccaacctagagccagatcctctggggtcagggaggaaacagttgtcacatcaccacgcaggttacattcgtcttccactggaatgactagagcccccaggcagtaggcagtgacctgactgcagaagagcagaggacagactccgctcatggggacagacaggctctgttgcttctcctcactggtcatggcttagcatggttcctccccaaagtccttagtaaacaaagcactcgcaaaaacccaagtcactacttttaaactctgttggataaggggagcttttccatagcttagactgagaacctgtgctctagaactgctattctgactagattgtatgaagggagtgggtgcaggcgacaaaatggctaaaatgaaaatgggagccactggtccccgtctgcagctacaactcaagatgtctacagatgtggtcagtgtgacatgtgcaggtgggaggggcagagggacaagacgggcagggagggtgctcctggggacagtatcctccccgccggccttcacttcttggccttgccctgggcagccacagcttccatgg

SEQ ID NO: 466915 - DNA, 1000 bp, Homo Sapiens; identical to SEQ ID NO: 157998

SEQ ID NO: 466916 - DNA, 1000 bp, Homo Sapiens
tcagtgtgatgtagcttttattgagtaaaggaaaaagggaattcagccgcatgatacagaggttccagttgatcagagtgcgcaaacacccttcctgtctgcgtgatgggaaccgcaccagcacacggggcacgcggaagccactgccgcaaggagatggttcccactctcacgcacatgagcagctcctggtcagtcccaagaggcaagggcagagggcatggtggctctcacagagctactttacaaataaactgtgtgtcttcctcaggagtctcttacaacacttttaaaaaactgaacagaaaatagggcaaagggccaggtggcagtgccatgaggcacatggaatgtcctggtctgtggaatcgtggagggtgacaggagcagcatgatcaggcattgtatgacgaggatgacacggtgccaccatggcctgtccagttggtgtggataaactgccctggtttggccaagagttcataggtgtgagccccgaagtaatcccgctgagcctggatgaggctggctggaagcatctcatgtctgtacccgtcatagaaggagagggcagtggtaaaacagggcatgggaatgccagcctggaccccagtgctgactgcccgccgccaggagtcctggcagttttcaacagctgacttaaagaagtcgtccagtaggaggttctgaagttccgggtttcgatcaaatgcatcctttatctttcctaggaatacacttctaatgatgcagccccctctccacatcagggcgatgccaccataattgagagtccagccaaactcggtggctgcctgccttagcagcataaagccttgagcgtaagagatgatcttggaagcgtagagtgccttccgaatgtcctccaggaatgatttcttatcaccatcaaactggaacttctggggacccttcagctttttgctagcttgaattctctcatccttcagagatgataagcaccgagcaaagacagctt

SEQ ID NO: 466917 - DNA, 1000 bp, Homo Sapiens
ttttttttttttttttttttttttttttttccacactagaatactttattcaagagaatctggcttggcagtcagatggccctgcagggacagcttgtgggggtgccagggcccttggggaacctgctcccctgccactgccttcagctgggacgcacaggctcctcccctggtgacctcatccccactggctgagctgtttctcatccaggcagctctttctccagcccggggcccactctgtatgtgtctcttagggggggcagggtggtggcaccttggccggaaagaacaatgtcccagtacaagcaaatggcaaagtgtgaggggagatcacgggggacaaggagtggcaaaagcccccaggcaaccactgttctccagagctgaatgttctgatcttcagaagaagagggggaagtggctggatcccctccgcccgctgccggccttcccaccagccaggccgtggcggccccagcaggatccgcatccctactttggacaggagctccgaaagcaagggctgcttgtctgtgcagagcctgaggcccaagaacaggtagcagggcccccttctttccttctgcaggcccctggagacctccagggcctctggggcctagcttgcccctcacgaggccacgtgtcttgcttctttcaaagcggaagctcccaggggtctgtggctggcttctctctttctctcacgttgttgaaggcactgaattcctgagggtcctgtccttccctgcccctcgtcttgaagggagcgaggcattcagcagggaaacagttggctaataaatagagggcaggtaccagcaggagtcactgaagagtgtgacggtaataaatacacgagccgggtgcggggtctctctcctccaaggggtgggttacctccggggaacagcatcgccgcacaggtggcagtctgtgggtctctgcttctctctcctcctcttccccctgcccttgggtctcctcctttccggct

SEQ ID NO: 466918 - DNA, 1000 bp, Homo Sapiens; identical to SEQ ID NO: 157999

SEQ ID NO: 466919 - DNA, 1000 bp, Homo Sapiens
ggaaggtctgggtgtcatttattgacagcagtttatacacatttgtttccttcccagtgcaggcatagagcccgtgagaagggcagtctctgaacgagggggccaggaacgtaggtcggacacgtctttggcaggcatgttcagccccagcaggatgcaatccttcaagttggaattccactgggtatctgagagggaccaaggtggggggtagagaggaagtcttcaacaggactcacatctcggtccaggcctcctctctcactatacaagtccatccaagttttaggaccctggggggcaacagtcaggcccacccacctcaacaggggcagattcttcaatctgtgcccagttcacacacacctgtttccgctggtcacacagttaaagagaatcagacttatggtaacagacagaccacttcctctctgcccctccccggcacctctcttcagcagcatctgcacaggaaccgctgggaagacggaggcctgccttctcagttcagccgcacatgccctcatccgcaaaccttccatcagtgacaggacggaggccacacgtggatctaggcagacacctgtgctccccagtccatcacatactgccccgcctgcgtgctgccaaatgctggtgcccaggccggaactccagcaggccccgaattgggacctaaagctggtttgcataggcacttggcaatttttggtagggaggtggataaaaaagtagatggatgtgagaagaatgaaagagtttcatttgatagactaattagagatctgaagtgattttacctttatttccttcactttaagccaatcatgaaatttcacagtgatttctggggtgggagcagaaggaaggctgtgttaagaatcatcggggctgtggcccagtcagcccgcggaggtgcaggcagggtgggccctcactggggcagctggaggagcacggactgccccgctggcaggtaggtgatgttccgagagcgtga

SEQ ID NO: 466920 - DNA, 1000 bp, Homo Sapiens; identical to SEQ ID NO: 337028

SEQ ID NO: 466921 - DNA, 623 bp, Homo Sapiens; identical to SEQ ID NO: 337029

SEQ ID NO: 466922 - DNA, 1000 bp, Homo Sapiens; identical to SEQ ID NO: 158000

SEQ ID NO: 466923 - DNA, 1000 bp, Homo Sapiens; identical to SEQ ID NO: 158002

SEQ ID NO: 466924 - DNA, 1000 bp, Homo Sapiens; identical to SEQ ID NO: 337034

SEQ ID NO: 466925 - DNA, 1000 bp, Homo Sapiens; identical to SEQ ID NO: 337035

SEQ ID NO: 466926 - DNA, 1000 bp, Homo Sapiens; identical to SEQ ID NO: 337036

SEQ ID NO: 466927 - DNA, 1000 bp, Homo Sapiens; identical to SEQ ID NO: 337037

SEQ ID NO: 466928 - DNA, 1000 bp, Homo Sapiens; identical to SEQ ID NO: 337038

SEQ ID NO: 466929 - DNA, 1000 bp, Homo Sapiens; identical to SEQ ID NO: 158003

SEQ ID NO: 466930 - DNA, 591 bp, Homo Sapiens; identical to SEQ ID NO: 158004

SEQ ID NO: 466931 - DNA, 1000 bp, Homo Sapiens; identical to SEQ ID NO: 337041

SEQ ID NO: 466932 - DNA, 1000 bp, Homo Sapiens
tttttttttttttttttttttggtgcttcagctgttgtttattgacatacaggtaggctctatagcaacaggcctggaggtgctgcagtagtgggggaaaatggaaggtggagggtggagtgtttgctgcaggacagctgagtggagggtggggacaggtgcaaactggagaggcctagagagctagagaagcaagtaagggccagggccagagtcggcttcaatggaacaacagcccagtgccctaaggcccctaactcttgctggctgtttcttgaccccaagccagggttgggagtcctctgggcatccattttttctaaaggaactggacagagtacacacaggaaaggaagctgtcaccctcttgccatctggctccaggggcctccagtccagcattcctccttcttcccttgattgggtggggccacatgatgggcagccaggctctgggctgtcccactagagcaggctgcaaacacagccatgtttcagtgaggcgttgatcttcttccctggtgtcccaacctaccagtgccacgttacagcccagagtgagttctacaagcgttgctggcctaatggatgggctgggggaagggggtgggacaggggctggaggaggggctctggggtccatcacggcacaggaacaacacgcatggtgttggtgaagccggagccagggcgccatccggtcagcacaatgaccacatctcccttcttgaagaagcctcgggccttgccaacattcatggcaaagttcacccggaggtccacgtcctcagcccaggcctcctggactgggtccttgcacagcacagggaagatgccacggtacaggtgggcctgacgagctgtctggggattccgggtcacagcaatgatgggggcacgtgggcggtatctggccacctggtgagcagacctgccagacttggtgaggacgattatggccccactgcagcacttgaaggaggcctccacggcacccacg

SEQ ID NO: 466933 - DNA, 1000 bp, Homo Sapiens; identical to SEQ ID NO: 337042

SEQ ID NO: 466934 - DNA, 1000 bp, Homo Sapiens; identical to SEQ ID NO: 158006

SEQ ID NO: 466935 - DNA, 1000 bp, Homo Sapiens; identical to SEQ ID NO: 158007

SEQ ID NO: 466936 - DNA, 1000 bp, Homo Sapiens
caaggttttcattgctttttattcaatgaggtttggaacatgagaggccaaaaatgaggagcacattttggggaatcctctataaagatataagttagaagttgtccaagatgaaaataataggaaattaccccaactcatgccagttgggtcttaagaaatgtccttgatggcaggcttgaagaaaagatgtcacagattagcgtcttcccagagtgtgaatagggcacgttctcctacatgcaaacacacatgcgcacacacacaatacccttacacacataccccagcttctatgagtaaaacttgctgttgctgactctcttctctcttaacctcttgttgcatttctcctggtacagctggagtggttctcattaacactgaactctttaaccagggcatcccggttggcattgcgcaagttctggtgtgtgtcatacagaaagagctggttgttcagttcttcttgccgcctcctcagctggcgacaggaggagtaaagttcctcttcgctctccaggactggccgcatctcacagaaaaccaggagggaagccagctctatgtcctcgctgtacccattcttcagaggaacggacctgaatcctgatttgactgctttaatggggtaagtggcatgagcaagaaagttgggatcgctgaacatatcttcttcataaaccacaaagcgcagaaatgccaggtttgggtcataaatttcaaatgtcaccttctcctgtgttggagcccagatagggctgaggccattatcattcacaaccgtcgtcttgaacttgttgttgccatactcggctccacagatctccacttctacaaagggacaggcaatacttcgtccaagtttggggagatggcgagcaccgagaaccttgactgtcagcgtcatcaggatcttcctctgggactcgggtggcatcgggtcatatttctctgtcctcatgctctcaggctgcagaacgtagcccgtgcgcccgtt

SEQ ID NO: 466937 - DNA, 1000 bp, Homo Sapiens; identical to SEQ ID NO: 337044

SEQ ID NO: 466938 - DNA, 1000 bp, Homo Sapiens; identical to SEQ ID NO: 337045

SEQ ID NO: 466939 - DNA, 1000 bp, Homo Sapiens; identical to SEQ ID NO: 158008

SEQ ID NO: 466940 - DNA, 1000 bp, Homo Sapiens; identical to SEQ ID NO: 337046

SEQ ID NO: 466941 - DNA, 1000 bp, Homo Sapiens; identical to SEQ ID NO: 337047

SEQ ID NO: 466942 - DNA, 1000 bp, Homo Sapiens; identical to SEQ ID NO: 337050

SEQ ID NO: 466943 - DNA, 1000 bp, Homo Sapiens; identical to SEQ ID NO: 158010

SEQ ID NO: 466944 - DNA, 1000 bp, Homo Sapiens
ggcacgagggaactttaatactgtgacaaagttctctaaaataggcaccttccccaccgtacctcatcgcccagggcaggcaggcagggcaggctagatctcgtaccgatacttgagcacgcctcctcctggtgcagaaagaaacctcttctgtaccgaaatacaagcagcagctgtggcctggggcaccaggtggagcatggggaacactctgggccctgggaggacgaagccagtgccactaggagcagactggctggggacggttgtccacacagactctggccccatctgggtgggcttgcagcaggcgtcctgggccagaggaggggccctggcatctatccaacaccaggacctctctttaggcctaggccaaactcttcagaagtcacgacacacagatgtgggccccggtcacgcctcatgagctgtctctgggaagaaaatctcccggcatcgctgcaccgtgtcctgaggagacaccacgctgtggccaacagtccgggggtcggcaaagatctcaaagtcgttcccaccagggctagtctcgttcccaaagaagtggatggtgtcgaagctgtcctggtccaggctatccaggcagtagcgcttgtcccagccctcggggaagacgtcaaagctgatcatgcctcctcgagagaacctcagccctttgccagcaaactctgttttcaggtcttccacgaacttctcccggatcttctctttcttgtccagttcggagaactcgatcctctcctccagggtgcagctccggccgatgggcgagatgttcagcatgccattccggaactcgatgaaggttccacgcttcttgggcagcctgagcagggccatgtagctgaggcagaagttgatcaagtcctgcagcagctcctcccccaggtggttctggatggtctgcttggagagcagtcgtccgtgcttatactgcaccgtcccgttctcggcaaacacataatcaaacttctcaatg

SEQ ID NO: 466945 - DNA, 1000 bp, Homo Sapiens; identical to SEQ ID NO: 337053

SEQ ID NO: 466946 - DNA, 1000 bp, Homo Sapiens
cttatcttgtccctctctgcaatctctacaaccacactggctcgccatcttggtgtttcctggcttggcttcactgctccttccaaatgccctccacttgactttgcatttgtgttttctgtctgggtgtcccgcacacatgtggttctgaagggaaggacccattccttgaagtcggttcaccccacagcctctgtgatgccttccctcgtcttccaacttctgcatgcccgtagctctccagttacagtcagttttgcaggctgtacaggaagcatggctggggagccctcaagaaactgacaatcacggcagaaggcgaaggggaagcaggcacgtttcttcttaatattcctttgaaattccttatggcgcacaggtagcgtagaaaataactgcttcacgctgactgtggtccctctggggtgggggtagggggttttcttgatgattttcccatcgtgatcaaacaccagtcgagtcccaaccttcgccgatacgtggcaggtagaaatggtgacatcactcagtgcacaaagtgagctcagagctttcccctgaaagccaaaagtttcaacccgagttaggtcggcaaactctcgaatcttagatgtgtgatgtttcagagctgaaagagataagccttcgaagttttcttcttctaccccacatccattgcctgaaacttcaatgagatccattccatagtccttaagctttagatcaatattagtggcaccagcatccagactgtttcctactatcttcttcaccgcagtgcttagactcagtaccaccggcccagagcaaatctgatggactgacttccgatcaataggtttgatggccttagcaggttctgtaagttttgcaggctgtacaggaagcatggctggggagccctcaagaaactgacaatcacggcagaaggcgaaggggaagcaggcacgtttcttcttaatattcctttgaaattccttatggcgcacaggtagcgtag

SEQ ID NO: 466947 - DNA, 1000 bp, Homo Sapiens; identical to SEQ ID NO: 337054

SEQ ID NO: 466948 - DNA, 1000 bp, Homo Sapiens
caaaagcaatgtatgatacagaattagaagggaacagacttaaagatttgcctattaaaatatacagattcttactgaagagtataggatatttaaaaaagatgacaagggatgttaatctttttttattattatcatttttacatattttggaacctcacataattttgataaataactcttacaaaattatgcaaaaagtacaagaatgtctggtaaacaaacagtctgtattttccaaaaagattttttacaacatgcaattcttaaggcagcatcctctttacaaggaaaggtaatccttttttatcaagaaatcttctgctgcaaagaatggctaagaaagcctggcttcttccattaacgccttttgtctttcctgtctgattttcggtctctttcacttcttgaagatcttttgcctgatcgactactctctgatatagacctctttctgtcggaccgggaattcttatcctttgatccttttgtatctctactactaccaccttttgaagatttgtgacttctttctagtcctgaagtatcccttctcttccgatccacgctccttctgtgctttctatctctattatgtccccggcccctactccgacttctactctcactactactactagtgctactgctactatctctgctgctgctgccacttgtactggagctgctactggaactactgcgactgctactacttccactgctggaactacttccactgctgctactggttgaactgctactagaactgctactgctactgcttcgacttctactcttgcttgttttatttctagctcgacctctacttctgctcctagttttggttttgctcttgctctctggatgtactgtcaagactggctctactggtacctcagtgagttttacagactctacaggaaaatccttcctctcaggtagtaaatgcccttgctcctgagtaacttggggtgttggctgtaaaacagctaatgac

SEQ ID NO: 466949 - DNA, 1000 bp, Homo Sapiens; identical to SEQ ID NO: 337056

SEQ ID NO: 466950 - DNA, 1000 bp, Homo Sapiens
agcaaaagtccagaactttattaattctccctggtcccgcccccgccccatgggatgcttgcaaggtcaccaggcctcaggtccagggggtccgaagcgccgcaggagctgctcctggtcttccaggtccttccgcaccttcttgcgcatgtagaagatggggcagtcccggctggtgcagatgacgtcctcgtgcaggctgccctggcagcgctggcactgcgtccagaggcgcgagaagcgctcctccagggcattcagatgggatacctccttctgatacagctcagactcccggggctggcagaactcacacacggctccctggtggctgagcactgtgcggcagccaatgcagcagttgcggcgtttggcgaaggccaggaggccgcccaccttgcccgtgagcaccgtcttgcagcgcgtgtggtccccccgcagtagcacagcctcggcacggccctcgcccaggatgggctcgaagatgcgcaggaggggcttggccagctgctgctccaggtagtactgcgtgtcaatgggcaggctgtgctccagcacgaacagcgggtcctccgacttcatgtaggcggccacacccttggcggcactgatgatcacgtaggggacgcggtcgcccaggctgggcgcactcccggggtcccgcttcctcatcctctcggccagctccacgtgggcctgcttgccggcatagtcggaggccgcgcgggtcagctccttggtgatgaccagctgggagatatcgatgcggttgcacagcaggtccgagatgacgtcctgtgcgtgagccaccgcgccctcagggtctcggtcgatgagcaggcggcgcagtgaggcagtgaccaggttggccacgagggggcagttgtccctgcgcacggcctccaggcccttgcagtccatgcggtcgtgggcgtcgggccgggaggagaagagcaggcccgcgtagcgcttcttgctgataagcaggtatgggaagtag

SEQ ID NO: 466951 - DNA, 1000 bp, Homo Sapiens; identical to SEQ ID NO: 158011

SEQ ID NO: 466952 - DNA, 1000 bp, Homo Sapiens; identical to SEQ ID NO: 337059

SEQ ID NO: 466953 - DNA, 828 bp, Homo Sapiens; identical to SEQ ID NO: 337060

SEQ ID NO: 466954 - DNA, 1000 bp, Homo Sapiens; identical to SEQ ID NO: 337061

SEQ ID NO: 466955 - DNA, 1000 bp, Homo Sapiens; identical to SEQ ID NO: 337062

SEQ ID NO: 466956 - DNA, 1000 bp, Homo Sapiens
cctgggctccatcatttatttcaggatgttgtcctttcccccagggccttgctgtctggtttattgtttaatttgctccttttgagaaggccccagtattgggttgggaatgggtgtggggacaagagaaagaaagagaaagtcagcattcctttccttatttttctccagagttgcccgtttgcttgcatatccagtctgcaagttctcttaacccacgtttttttgtgggagggatggccattgacagagattaaattaaaatatgaaagaacagccttattttctaaattcccaaccttctgcagacccaggagaactccagaacaggtagagttcactgttgcttccttccaacatggattaagaaaaggttctgttttagtgcaattttccccgcaaaggaaccaggaagaggtggaagaggagatcccatgttccagccccaggggtttgggaaccttctgaccttgaggtcaaggcagacatggagtctgaccttctgagcagcacatcacacttttttgaattttatctcccaggtcctttcggtgcacctgcaggcaaagtgtggggggcggaagggcagtgtgaggctgtgtttccactggatgagttgtcatacctgccacactaacacagaggagcaaaggagaagacaaggtggaaagagaatgccatcaaaagcaagagctaatggccagtgatccttaggagctgctttagccctgccccaaagacagggagtttctggttccccaccagaattcacccttcagaaaccatgctagcaaggtgcttctctaagtgacgtcacaaatcctcttcttcggagtgaccagcccagagcctggagctctcgtgtggccccctctggcctccccatgatgtgagatgtgtgggagaaaagagggacattgatgcacatgcacacggtggagtctgatgacctggggtgagcacagctgcacgtggcaaaatgacaggtgctgtcatggca

SEQ ID NO: 466957 - DNA, 1000 bp, Homo Sapiens; identical to SEQ ID NO: 158012

SEQ ID NO: 466958 - DNA, 1000 bp, Homo Sapiens; identical to SEQ ID NO: 337065

SEQ ID NO: 466959 - DNA, 1000 bp, Homo Sapiens; identical to SEQ ID NO: 336291

SEQ ID NO: 466960 - DNA, 1000 bp, Homo Sapiens; identical to SEQ ID NO: 337067

SEQ ID NO: 466961 - DNA, 1000 bp, Homo Sapiens; identical to SEQ ID NO: 337069

SEQ ID NO: 466962 - DNA, 1000 bp, Homo Sapiens
tcgggtgaatgtacataagactaaatcatgatccaacaatagttttctatttggtttcactagtatcactcaaagaacttgacacaggctaatgctttaacactttcttatctgagacaaatttaactctaagaacatatgactcaacaatgtacaaagatttaagaatttgccaatctgtcaatcattttaaagagtccatataatatacacatagcaatataatattcataaccagaaactgcactaagtaaacacatcatttagtttaagctctacctgaaaacatgctgttttattaaaacaaaacccaaagacttaaatctcaagttatatggttttacaattaagtcttactgaagcagcacagatttcctttcttacaaacaagttaatatgcaggaagaacccacaaagtgcacaccaacaatgtgacaaattgtaatatgtgaaatacaaataaatcctgaagttaatctgaagaatgtcaaggagttaccagagaggttatgtagtgcccttgatttttattttacctacaagtctacaaattctaaaatttactcaattgatttaacttttttaataaacagcaccagtcttgcccattgatacaattaaaatttgaccttctcagttcttagttcacaagtttattatgaaaaacactgcagtgctcttgtgcagtcacatcgtcttacaggaaggggaaaaaacagttctgttcaaaacaactcaccaggttctgacaataacaaagaacaacatggggctgagatttgagtagggaataaactgagtgcagacaaatcatataattaaattaaacggtatccctgaaaataaaaagaacaatttcaaaactcacaagtagaagggaggccttggtaattatttttaaaaatgttcattaagctccaatgattgtttgctgctatccttatctacagtcatgctgagtaaagctatagctaaatggaagttaaattgtattcacgag

SEQ ID NO: 466963 - DNA, 1000 bp, Homo Sapiens; identical to SEQ ID NO: 158015

SEQ ID NO: 466964 - DNA, 1000 bp, Homo Sapiens; identical to SEQ ID NO: 158016

SEQ ID NO: 466965 - DNA, 944 bp, Homo Sapiens; identical to SEQ ID NO: 158019

SEQ ID NO: 466966 - DNA, 1000 bp, Homo Sapiens; identical to SEQ ID NO: 161231

SEQ ID NO: 466967 - DNA, 1000 bp, Homo Sapiens; identical to SEQ ID NO: 158020

SEQ ID NO: 466968 - DNA, 1000 bp, Homo Sapiens; identical to SEQ ID NO: 337079

SEQ ID NO: 466969 - DNA, 1000 bp, Homo Sapiens; identical to SEQ ID NO: 158021

SEQ ID NO: 466970 - DNA, 1000 bp, Homo Sapiens; identical to SEQ ID NO: 158022

SEQ ID NO: 466971 - DNA, 1000 bp, Homo Sapiens; identical to SEQ ID NO: 337081

SEQ ID NO: 466972 - DNA, 1000 bp, Homo Sapiens; identical to SEQ ID NO: 158023

SEQ ID NO: 466973 - DNA, 1000 bp, Homo Sapiens; identical to SEQ ID NO: 337085

SEQ ID NO: 466974 - DNA, 1000 bp, Homo Sapiens; identical to SEQ ID NO: 158024

SEQ ID NO: 466975 - DNA, 1000 bp, Homo Sapiens; identical to SEQ ID NO: 161307

SEQ ID NO: 466976 - DNA, 1000 bp, Homo Sapiens
tttttttttttttgacaagaatattttttattattgaaaaatacacaaaggtgaaaggttgctgagcagctgattttccatagtacaacagagtattataagaaagagggaaatgtatctgttatatatggcagtttacatttctaaggcatttaggcttaagagcactaggtcttgcacagctaggtgcattgtcttgagtttaaatatactgaggcacaccaggcaggcaaaggattcaaaactatacattaaaacttgttcatgcatttgtgtcttaggattttattccctaccctcctcattcatttttttcccacatgggttttggagttgttcatagaacactggaaataatcgactcttcaagagtttgtttacaatgacaacaccaatgggacacaccaaacagaactacttcacagatacattctgtctcttaccaaaatgaagctccagtaagaaaaacactgatttgcaaaggcacagtggagacaggtttaatgcattaaatataacatgaatcattcacaataacaagtttcgtgtttcagggaacttttgttaatacaacacagttggtcacacaaaatacaaatgcttctgttgatttgtcttggcaactcagatacatcaacagtgctaacagtttaacagctttgttctcatctgacagaaaataatggcagttctgcaaggcaaatgttaaacctgaccgtatgtatttattagttccacagtgttttgacagattataggagatggaactcagaggatgctgacacgctcaccgagggctttcatttctgtttcttcagtctcaggagtgtcactgtggctagcacttggattgatcaggtgtgtggggtactgcagccgctgctcgcctgcatacttctcccacctcaggtcatcactttcatgggtgatgtagcgctccccgattttgcattccagctctcgcaaatctaaccaggtctgatagtcctgtagccaaggg

SEQ ID NO: 466977 - DNA, 1000 bp, Homo Sapiens; identical to SEQ ID NO: 158025

SEQ ID NO: 466978 - DNA, 1000 bp, Homo Sapiens; identical to SEQ ID NO: 158026

SEQ ID NO: 466979 - DNA, 1000 bp, Homo Sapiens; identical to SEQ ID NO: 337091

SEQ ID NO: 466980 - DNA, 1000 bp, Homo Sapiens
tacattttttgaaaaatcacccaaaaataagaccactgaattgttttcaaagtagttctatcaatgactaaccgactccccatccctcccaccccccgatggcccaagtagtcatctacagcagcccagaggcccagctgctgcttctagactgctgtctgtatcagaggccaaagtcggatctgttgacattgaagacacatcattgacagacgacgatgatgatggatgctgagagccattgatcactgctgcacctgtgctaaaggagagggctgcccccgtataactccattcttggttctctcctccaagtccataacttccttatatatcaattctttccactcttctattgtgtgttccctttcatctaactgcttgtcagggatctttggtggtggagcttctgcttcagaaggatcataccagacattgatgtacgggtgttggagagcttcatctacagagatccttttagatgcatctattaccagcattttggataacaaatcccttgcctgactggctttaagtttgttgtgttctgagtcagctgggaaaaggacatcagggaagagtttctcaaagctatatccagcatatttaggtctgttttcaacgtaagtccttactgttggttgcagtttcttcatgaattcaggacatggtgttccaagctgttcaataactttattccactgatcaatatagtcccttcctggaaagaggattttgtggcaaaccatttctcccataatgcaccccacagaccataaatccacgttttccttgtagcccatgccaaggatgacctcgggtgctctgtagtagcgagtcactacataaggcgtcatcataaaactcgttcctgcagtcctggccagaccgaagtcaagaatcttcaaagtgcaatcagattttactactatattactgggctttaagtcccgatgaataattccagcagaatgaaggtgcttgattccacacagcatct

SEQ ID NO: 466981 - DNA, 1000 bp, Homo Sapiens; identical to SEQ ID NO: 158028

SEQ ID NO: 466982 - DNA, 1000 bp, Homo Sapiens; identical to SEQ ID NO: 337093

SEQ ID NO: 466983 - DNA, 1000 bp, Homo Sapiens; identical to SEQ ID NO: 337096

SEQ ID NO: 466984 - DNA, 683 bp, Homo Sapiens
gagtgtcttgtcaagctttattgggcaggtgacttttgctcgtttcactcagatcttgtgggcttctcggcggcaactcagggcttgagcatttgatgtaggggagttgctatggcctcactcggtgtttcttgggcaggtgactttctcttaacttccagctgggggcttgagcatttgatgtaggggaattgctatggcctcacttggtgtttcgggcgactttttcttaatttccagctgggggtgaggggcccaggaagcttagtgccttctgcatgttctcttcctggttctgcagcctctgcgatgcctcctccggtgcctgcaggagcgtcttttgcgccttctgcaggagcgatgctgccgcctgtggatccggtgcagcctccttcgagagcagtgtctgcgcctatagtgagactggccatgggtcctctcgtagacctcgacgtgctccgggctcagcccttgctcctcttggccgtggtgtccttgctcttgcccatgcaactgctgcctgtacacctcgtgcgagcgttcgctcaggctcctcacgcggtatcggaccatggtgttgggagatctggtggctcctgggctgaggctgcagtgggccctggagtaggggaggagggcggaggcctgcccacctgcccttggtgttactgttggtctggtct

SEQ ID NO: 466985 - DNA, 1000 bp, Homo Sapiens; identical to SEQ ID NO: 337097

SEQ ID NO: 466986 - DNA, 1000 bp, Homo Sapiens; identical to SEQ ID NO: 337098

SEQ ID NO: 466987 - DNA, 1000 bp, Homo Sapiens
tttttttttttttttgttttttttttttttttttttttttttttttttaacgcagtcagaatgattttattgaaatgttttagtacagtgttagaggatcttaaaatcttacattttaaaccaatacaagcactgcaaatgatatactcctgaatctagttgatgtagtatctaaaaagaaaagtgatcatatgagtatctataagttgactaatgtaatttaagttggaggctaaacaaacaactttggtatattcatatttctctggctcctgtttttggccagataaatgccaggtccacccccattcagtagaattggacaggaccaatgtatttggtggtctcacttaagtttccacgccaggagcagcaagaaatgtacaaattttgggattaagctgctcccaagacagtcttcatcacctttgtgaactggaaacaccaaatagtcaaggtctgaatttccattgtgtgtggctaagtccagtcgcattggttcataaatgtattctgaaggattttaaaatacaaaggtggggctaaataatgatagaaaccatcagttcttaattcagagaatgacaatgcaggttcctatatcctttttaaaaatctgagatcattattttaaaactagctctatacattcttaggctttaaatttaatcttagctgaaatgattacctttaagtcagttggctttaggccttggcgattgctcaatataattttggaattttaggatgcagcatttcaggtaagtgacagttatgttttagaagaggtcatttaaaaaatgatccagaaatacactgctctgatatgtctaatgtataccccccaaaatgtgtcagtgtccatattaagctaaataaaatttggtccaaattaagcacagtaaccaagatggtttatctgaaactgagttatccaaaaaaaaaaaaaaaaaaggaaaattcaaaatccatggtattataattataaattttccaaggt

SEQ ID NO: 466988 - DNA, 1000 bp, Homo Sapiens
tccagggatccatttgtttatttacaacagcattctaggagaaaggtgaatgggcccctctcctcagtgcccaaggggacaggactgaggcagccccacctggcccatggctctgcagagctctgcaccctccccaaggctgttacccacgatggacagaaggacgttctctcaacaccagggttgattttggggaggctggagggaaccacgtctaggacctaccaacactagcccctccctgggggctcccaagttctgaaaagaaaaccaaatgcagtgagcccacgtcagggtctccacgttcctgcacgtaacacccacgacaccactgcagcctcagcatgggctgcacggggtgggcaggactgaggaggggagggcaggactgaagaggggcggggacccgcactccctgccagccgcccaccacctgccttttctactttggcaaaaacaaaaacaaaacctggaagcctcaagacaatgaagtaaactttaggaaatggaaaagacagcaggctgtgcccaaagcctctctcagcctcccagcaagtccttcccaagagctgctggtgactctccagggccacaatggcaggttttcctcacagcagccccaaccccagcccagctgaagacggctctcctgagctcccttcatcagctgccttggcttccaagctgggaaggcattggggtgtggtcggggaaggcacccagttgtttacagatggtagagggtgacacaggcagcatcgtcatgaagcagggccccaaggaaaggtcctccgggagaaccagcctgcccaaggggaggagctgcagacgcacccgctgggaccgcagcctgctggtggacaggctccctgtcgaggagacaaacagcacagcacatgtggccaaaggcacctccagaggcagcagctgagtgaggatgaagactgcagggtgggcacacttgaatgtggatctgagtgacggttctgtccccatggac

SEQ ID NO: 466989 - DNA, 800 bp, Homo Sapiens
gagaacagggtcactttattggtatagagactgaagagatactgggggctttagctattggcagctatggtgttcttaatccatttcacatagttgtagaccttggtgtagactccaggcttgttcttctgggcacagccatcaccccaggagacaactccttggagctgtccattgcagaccacagggccaccagaatcaccctgacatgaatccttgcctccctcaaggaagcccacacagaacatgttgctggtaatctttccagggtaggaggcttcacacttagcctggctcagcacaggagcgtccaggcactgcagctcgtctgggtagtcggcgccagagctcgcagtgttgccccagccagagatgaggcacttcgtgccagtggctggaggggcggtgggcagagagatggtggacacgcgggcgttgattactgcacgtgaggagagcttgattaacatgatgtcattgttcagagtcttcctgtcgtattgggggtggcggatgatcttggctgcattgatgaactgctcattcccctccaggacttcgatgttgtgctctcccagtctcacctggatgcgggacttgtagcagtggcctgctgataccacccactgttcgttgatgagggagccaccacagaagtggtagccagaattcagggacacctggtaggggacagaattctcctcacagttgtagcccccaacgatcttgtcatcatcatcaaagggggcagcaagagcagctgccacaaaggtaaggatcaggagtggattcatggtggt

SEQ ID NO: 466990 - DNA, 1000 bp, Homo Sapiens; identical to SEQ ID NO: 337100

SEQ ID NO: 466991 - DNA, 1000 bp, Homo Sapiens; identical to SEQ ID NO: 158032

SEQ ID NO: 466992 - DNA, 1000 bp, Homo Sapiens; identical to SEQ ID NO: 158033

SEQ ID NO: 466993 - DNA, 1000 bp, Homo Sapiens; identical to SEQ ID NO: 158034

SEQ ID NO: 466994 - DNA, 1000 bp, Homo Sapiens; identical to SEQ ID NO: 158035

SEQ ID NO: 466995 - DNA, 1000 bp, Homo Sapiens; identical to SEQ ID NO: 337105

SEQ ID NO: 466996 - DNA, 1000 bp, Homo Sapiens
gcaagtccagagcagttttaatgggggtggaggctgtacaaagggcaaggcccactgaagcgggggaaagccaggccgtgctgcccccggcccaggtatggggccttggcatggacgcccttcctccacctccagcaagagaaagagtaagcccttggggaggaaggaggggaaaccagctcagccccaaatcctggtctctgtccaagccaggccccaggacagagggggactgatggtgtcagggtgggggtggtctcagcagaaagcagaaacggcatcaggcctctcccacacaaaaaaaaagcatcaaaagttcaggggcgctagcccctcccgcccccgcccaccctgtacgaaaaagtgcaaaacattatcacaaaaaggggctctcggaggtgcccctagcctaggctcctgaggcccaggccccagccctgccctgccccggacaccgcgtccggcgcggtcgggccctaggccgggaggccctcgtgggtggcccgaggccggcccgggctcaggcagggccatgtcatccttcaggtgcccagcaggcactccccaccctaaacctcatctcagggcttccgccgcccactgcctgcccctggccgaggctctgagctgtgacgctgagcccggggctggctggagggtttgggctgcagggagggactggagtgagaaggagggagtccatcctctgtgctcccggcctgggccagtgctgcctccactgcatccagctcctcactgcctgccttcagcttgacccgaagcagcgctgcataggtgctgtagcgggatttctcaaactccaggtaggcctccttctgccgctgctcttcagcctccttgccccggcccttcttgcccagctgggcggcccggtgctcccgcagctcacttgccatggccttcagcttggcctcgtgggtccgcacctgctcctcctgggagaggcgggtggcagcgctgggcaggagagggcggctga

SEQ ID NO: 466997 - DNA, 1000 bp, Homo Sapiens
ttttttttttttttttttttttttttttttgaacttgtgcagataactttattaccataaacatatgaatactcatgaatagtttcccaattctggggcactcagatagagagtaaaagcaaatgtttcaatttttgtttacaaaagtatactttaccaattgctcaagaaaaaaagttcataaatctggagaataaaacattcaaagaatcagcacattttcaaatagaaaattatgaaaacattatgcttttgattatttagtccaataacatggagtttttttcttctttgtctagaatttcatgaaggtatcagcctgttcattaaaattttgaaagttcttagtccagtggtatgatcttgaagttatcaggaacttgtattcaagagtccttgtcagagtcttttccataaatctccttgaagaaaaagcaattttggactgtaggtgattgtaagtagtttgaggaagaatcaaagcaactgtctgccagtcttcctgaaatacagaaatgacttcacggctgctatattggattaaggagaggaagacgtcctattcctgaaggagcagagacttcgactgtcatggatttggagctttccttgccagtggctgagttacgaacagagcaagtatagagccctctatgctttgtagtaatttgggggatagagagcttttgtcctgattgctgaaacttcccattaattgtccaaaaatactctgccggtgggttagattccgcgaagcaggacaagtagaggttttctcctgaacggtaataggtgaatgaagggtaaatgctggggaggtctggaccatagaggacattcagggtgactgggtcactgtgcatgccaccatctcggtcccgtatttcacattcatagggtcctgtttcatttctcgtgacactgggtagaatgaggatcctgttttcaatgggttgctttaccctgggactgaccgggaggctctgaccatttagccacc

SEQ ID NO: 466998 - DNA, 1000 bp, Homo Sapiens; identical to SEQ ID NO: 337107

SEQ ID NO: 466999 - DNA, 1000 bp, Homo Sapiens; identical to SEQ ID NO: 337108

SEQ ID NO: 467000 - DNA, 1000 bp, Homo Sapiens
aaacttgtgcaaataactttattaccataaacatatgaatattcatgaatagattcccaattctggggcactcagagagcaaaagcaaatgtttcaatttttgtttacaaaagtatactttaccaattgctgaagaaaaaaattcataaatctggaggataaaacattcaaaaaatcagcacattttccaataaaaaattatgaaaacattatccttttgttatttagtccaatgaaatggagttcttttcttctttgtcttgaatttcatgaaggtatcagcctgttcatcaaaattttgaaagttcttagtccagtggtatgatcttgaagttatcaggaacttgtattcaagagtccttttcatagtcttttccataaatctcctgccagtcttcctgaaatacaaaaatgacatcacggctgctacgttggattattgaaagcaaaagttcctaatcctggaggagcaatgactctgattgtcaaggatgtggagctttcctcgccagtggctgagttacgagcagagcaagcatagagcccattatgctttggagtaatctgagggataaagagcttttgtcctgatagctgaaacttcccattaattgtccaagaatactgtgctggtgggttagagtttgcgaagcaggacaagtcgaggttctctcctgaatagtaagaggtgactgaagggaaaattctggggaggtctggaccatggaggagattcagggtgactgggtcactgcggctggcactccctgagttccatatttcacattcatagggtcctgcagtatactttgtgacaccaaatagaaagagggtcctgttggtttcagacagctgcatcctatgagtcatagggaggctctgaccattcatccaccacaggtagcttgcgtccggagtctcaggattacaggttaagatcacagtctccatggcctccctggggtttaagttgctgctggagatggagggcttgggagtc

SEQ ID NO: 467001 - DNA, 949 bp, Homo Sapiens; identical to SEQ ID NO: 337110

SEQ ID NO: 467002 - DNA, 1000 bp, Homo Sapiens
tttttttttttttttttcatttccattttccaaattttattccaaaaaaaggggatgtgtgtggaagattaagacgtccatgaagggtaaccatcatcgttacaataaagtattcaattggacagaaatgacaaggacccaattcagtatgtaatgtcctattttcccactgcaccagttaaaaaaagtaaagccttcctagtgtggaagagtaggactgcttttacactgaaatggtgccccaaatgagtaataaaatctctgattctatttatccttttctttctgttctttttctttcttctcacgctcagctttggcttcttcttcctcatgttttttgatcaactgctccacttctttttgtttgagaactctgattactgtctttccattctctcttgttagtgttgcaatttccactttttcagcagagagtttactaacatccatggtcttatttagtactttgatagctaaagcaagtgctgacttcaaggtcatttctccttctttatagtcttgtttcaacattgacacagctgcagcgctattatttccaatgcatgtggccttccatcccccgtaatttccactagggtcactctgatagagctgaaagccatagtgcttatcccagccaatgtacagcaatgaaacaccaaagggacgttttcctccaaattgtgtataagcttgtttgatatcacacagcgctgtaaccaactgctcacaaggtattggctcctgatactgtaataaatacctttgagcaatgagccttagttcattagtcagaacattagcatcagaagttatgcctgccacactgcaagccatgtcctcattgagtttataaattttttcagaaaaaaagacttcatcaagaagcttgtggatgttgcgtctctctgctgcaagcaaaacaccatcatttgctaaaattcccaaacaggtgcctgcatgtccaatagcttccatggcatattcaacttggtat

SEQ ID NO: 467003 - DNA, 1000 bp, Homo Sapiens; identical to SEQ ID NO: 158037

SEQ ID NO: 467004 - DNA, 1000 bp, Homo Sapiens
tttttttttttttttttttattttccaaaagccttgtttttatttatatagagtcctaaccacttcggtggtaggaggagtgggagaggctcctttttcaatccagggacctccatgatgttggtttgttgttaccaaacacacaggtaagtggcatcacggatctggtaaactaacgacaatgtttagtctctctctgctagagcaacaaggtgagcatcaatctctgcttctgtaagaatcctgaatttaggattttcaactgtcactactccaacttctatttctgaaggtttgaaatcaattgatagaacagtagacaggcatgtaattgcagtttccactgtctgttcaaatgtccaatcaaatttcttcttcacttttttttcaaggaagctggttgactcagtttgtttaactcccgctgcagtggctttaaacccacagtagtaacctgcaggatcacacttatatacctgagggccttgctcttcatctataccaattaaaatcatacaacaaccaagaggcctcatttcagcattctgtgtgtagacctgagaaatatcggcaattcttttacacagcatgtccacaggaatctcatagccatacttgtatttccagttagctgcctcatagcgtgccctctgtacctgggatctgctgtcagctgtcattccggtcatcacacaaccaatgttttcagttatcttgaataagtgagtcactgtgctggaatccaataatttgtcaggtactttcttctgtgtgacaattactgcacagtctttccctctgacagctactgatgtaaggccaccctggttaatagccttaaaagcatattctacttggtagagccgaccctcgggtgaaaaaatggtaatgtggcggtcaaaaccggcgctggaaccacgggacatgttggtagaagcactactttaaacacaatccctgggccccgtagctcccgcaccaggcacacaagcacctcccg

SEQ ID NO: 467005 - DNA, 872 bp, Homo Sapiens; identical to SEQ ID NO: 337112

SEQ ID NO: 467006 - DNA, 850 bp, Homo Sapiens
ttttttcaattatatccatagtcacctttattctgaattaaccatttatcaagagtgcgcctgaaaagagtagaaaaaaataaaggagcccatcaaaaaaaagttccctggcaagtgggagggaggacatgatgttaggagccctgtttggggaaggaaatgttatccaggtcatggatgccatttttgtcaatgattcgaacactgaaggttggcagattcaggatgaagcgtttctggagctcctccagacatttcctaaggagttccactgccctctcacgtgagatagtcggtgtgtagtatcggtcgaggatactgagagtcaggaaggcaccatagccgtgggctgcaaaaggggccttggccaaggctgccaggtagtccatgtaatacagcgctggcccttcatgctcatcatagccagccaggaggaggttcacatgatatggggtccgactccgaagacagtcagccaggtttcggcgtgtgaagttagctgctgccgtgggagacaattcatatccatttcgcatcttataaagttgcacgtttttctgaatatattctgcaaactgtacagtgtctccagcctctccaacacacaggagtaatatcttttcactcatcttaaacatcttgtcatgatcgtccttcatctggacaatattgctggcggccacccggtcggaggcgacaagaacatagtcggggccttggataccgatgaggtactccatggtggcggaaggccaggggctgcaggtccgacacagcacgagactcgcccgcttccaggtctcaccggtgagacagcacctcagagcgaagattggcgcgacgcctgcag

SEQ ID NO: 467007 - DNA, 1000 bp, Homo Sapiens; identical to SEQ ID NO: 158040

SEQ ID NO: 467008 - DNA, 1000 bp, Homo Sapiens; identical to SEQ ID NO: 158042

SEQ ID NO: 467009 - DNA, 1000 bp, Homo Sapiens
ttttttttttttttttttttttttttttttttttttttggcagggaccctaaaccatcttttattgcgcacttcagccgtgagactggggctggcctgtgtgccctaggcgtagtattgtaggttggctttcttcttggcctgcacctccaggatgccttccatgtagtcctcgtgggtgagctccgtggcacccctgcgcagtgcgatcatgcccgcctccacacacacagccttgcactgggccccattgaagtcatctgtgcagcgggccagctcctcgtagttcacgtcaggactgacattcatctttcgggagtggatctgcatgattctggcccgggcctcctcattgggcatcgggaactctatcttgcggtcaaggcggcccgagcggaggagggcggggtccaggatgtccaccctgtttgtggctgcaattaccttaacttgggtgttgggctggaagccatccagctggttcagaagctccagcattgtcctctgcacctcccggtccccagccttctcactgtcaaagcgcttggtgccgatggcatccaactcatcaatgaagatgatagagggcgctttctccttggccagggcaaaggcatcccggactagcttggcaccatctccaatgaacatctgcaccagctgggggccagccagctttaggaaggtggccttagtctgtgcggcacaggcccgggccaggagggtcttccccgtccctgggggcccatacatcagcaccccttttggaggttggatccccaagttctcaaacttctccttgtggttcattggcaagacaatggcctccaccagctcctggatctgcttgtccaaacccccaatgtcactgtattgctccgtgggcctctcgtctacctccatggccttcacccgcgagtcatactctgtgggcagcgtctccaggatcagataggagtctttgttcacacccaccaggtctcctggctttagcttttcag

SEQ ID NO: 467010 - DNA, 1000 bp, Homo Sapiens
tttttttttttttcctagaggacttggcccacagagctttattggagagatacacacaaaggctgtccactcacttccataatttcttgatggacatgtttttctcactgtccttctgcatgaccttggctactgccatctcaaagtcctcctgagtgacatggactcgccgttctcgcagggcatacatgccagcttctgtgcacacgcccttcacttcagcccctgatgctcctggcatgagctcagcaatttttctcaggttgatcccccgggtcaggttcatcttccgagaatgaatcttcaaaatgtccagccgggcctcctcattggggggtgggaattcaatttttctgtcaatgcgccctgggcgaagcagtgccgagtccaggatatcaatcctattagtagccatgataaccttgatgttcttggtggcctcaaagccgtcgagctggttgagcaactccagcatcgtgcgctgcacttcactgtcccctccagaacccccctccagccgcgaggagccgatggagtcgatttcgtccatgaagatgatagatggagcatgttcccgtgccatgacaaacagctccctcaccattcttgccccttcccctatgaatttctgtaccagttcagagccagagacacgaataaaggtacagtccgtatgatgagccacagcccgggccaacagtgtcttcccagtgcctggaggtccatacagcagcactcccttgggctgagcaatgcccagtgcttcgaagagctcaggatgcttaacaggcagctcgatcacttctttgatctccttgatctgtttgtccagtccaccaatcatctcataagttgaatctggtactttctccaccatcatcagtgacactaatgggtctaccttgttgggcaggatcttgtgcagagtgtagctgtcattccttagagccacccggcaattgggtgtcacatcattgatgtcaatgtttttgtccacgtc

SEQ ID NO: 467011 - DNA, 1000 bp, Homo Sapiens; identical to SEQ ID NO: 337113

SEQ ID NO: 467012 - DNA, 1000 bp, Homo Sapiens
cttgtccatctggagatcttatatttatttgaaaaccaagttctgtgaaagagcacactcaacagtcatatatcttctcttcaaccaaagacttggagacagggttcttcaggtcagtgcagaggcaacgatacatgcattgaatagcaggtctcggcatgaatttcctcataagcattcccaatatgagcctggacaatcttcttcagataagcaagtgagatcctctggcccttaatcatcaatatactcaaatggttctgggggttctggctcttgttcctcctcctcgatttttgggccatgtgctgccacaggttccaccagctcctcaatgtcttcactggtatccttcagaatgatgatgcctccaatagagagtggtttgaaaggctggtatctacaggtctccggcatggttaggaccttaagctgggcaggcataactcgggctgggttatccaataactggaagtttggctcaggttcttttttcttctctttttcctcctttttctctgcctcatccacttccattttctcctcctcctttttttccttttctttttccttctttttagccttggcagttatagataatacagcagtagaaaccttttccttttctttttcttttggtacttccagaggggcaggatatgcaaatgtggatggtttacagttcgatttatactgaactttcggcatctttaagtccttgttaaggccaatgacacaggtaggggtataagccaatgacaggaagtgtgaaagaggaaaccagaaccaaaactgggtaaatacaaggacgccaaccacagaaggcatatgagtatgcccagtcctggactgcaaggagattgtgacattatgaccacctgcatccagtatgccctgggccagaatagcgccaaacttggccatgacatcatcatgcttatcattgatgactttggaatacagctgtctgaactgattcacctttggacaagtgatttca

SEQ ID NO: 467013 - DNA, 1000 bp, Homo Sapiens; identical to SEQ ID NO: 337116

SEQ ID NO: 467014 - DNA, 1000 bp, Homo Sapiens; identical to SEQ ID NO: 337117

SEQ ID NO: 467015 - DNA, 1000 bp, Homo Sapiens; identical to SEQ ID NO: 158043

SEQ ID NO: 467016 - DNA, 1000 bp, Homo Sapiens; identical to SEQ ID NO: 344359

SEQ ID NO: 467017 - DNA, 1000 bp, Homo Sapiens
ttttttttttttttttttttttaaagagaaaaaatttttattgtgatataaaatgcacttataaaatgtccaccagaaggcatgtaattcttcactgctatataaatttactgggaatatgttattcaccatctaggtatgatactgccaactaaaacatactgtaaacgatgagttatactctataacaaatgcatcactgattttcagcaatcattggtttaataataattagtttaagactataatcacatctatattctggaatgtccatttactttaatgtagtgtagtggaatttagagtataattgcacatagatggtacagaaaaacattcacttctaaattattttataccttcatgacaggtagtcttcctgactgaaaataacagcttcagctatggtctgctccaggattcttaatgcaataatttgggtgtatgtgtgtctgtctacgtgtacacccatggaacaacttatatctttagtaaacaagtgcaacattattgtcagttattttgcatgtttaaatattatagtctgattatttgtaaacaaacaaaaccccaaatactctaaattctattttaaaaatctgtcaacccacaattattctaatatgctttacttactcgaacacaaatttctgaaaggtgcatatattaccttagataataaggtttagaaatgagtgcttcacactatgaaatgtgcatttccgataagtgatttatgcagcataaagtttagatcaagaaattacaaatcctggatccccacagttcatttagaaaatgcctcaaagttatggctcttgcagcaggtttaacagattaaacattaagtgttctagctccctctatttcaagtatcaaagaaatatgaggctcaaaatctctctaggttgtaactgataatgcaaagcattagaaaacagttaaatgtgttttgaaatacagtattaactgagattattaaggtgtttatctacgttag

SEQ ID NO: 467018 - DNA, 1000 bp, Homo Sapiens; identical to SEQ ID NO: 337120

SEQ ID NO: 467019 - DNA, 1000 bp, Homo Sapiens; identical to SEQ ID NO: 337121

SEQ ID NO: 467020 - DNA, 1000 bp, Homo Sapiens; identical to SEQ ID NO: 158046

SEQ ID NO: 467021 - DNA, 1000 bp, Homo Sapiens
ttgccttaacaaaaataatttattccacacacctcccaaggcagggggtagcgtgggaatcaagcatgtgtaaggcactgcccccgccagacccttctaacttctgcacactggaaggtgaaacctggagagagaagacactcccctccctagcttctacctggcaccctccaaagatgagcattcatcttggagaccaaaataaaaaaggacaaaagaccaggctcagagggagcagagctcaatggggggaagtgaaagcagccatcttctcctgcagctaagccagggcaaggcactagagacccacatccttcccatgccaccaactcgtcaggtcccaccaagcaagccactcaccctacagcccagcaaccatggcttgcctcacctgggagaccagcacgacttccagaagcttccaaaccccaccctgaagccaaaccccacccaggaggtctgaggagctggaggctggccaggcatagagggcccggggtggtccttcctcccagggtgcaaaggcttcttcattgtccggaagggagcagggtgggcggagccccagcagctagtgaggagttccattccagcccacccagctgggggaccctcctctggcttcacttgccccagttgagggccaagaccaagcaggagagactgaggctccagtgagaatgaggcaggacttcaaataagctgaaaaacaggaatgtggtgctaagaggccagggactgagctgccctatgcccactgcccggggctgccctccctgcacagcaggggaacctggaccctgctcctgtcttttgtgtcaaaggagctctctgtcctagcaaccccaagaagcttcactggagcaactcgttttcctgaatttcccacacttctaggccagacaaggagcaaggggtgggaggggagggaatggggtcagggggcttgaggtgcctagagatggcagctccctctcccgcctcctccccaggtggttca

SEQ ID NO: 467022 - DNA, 1000 bp, Homo Sapiens
ttttgtaaaaatggtttattccatggccattgtaaaaaataatgacctgatgagtaaatattggcttaaggcatatagcagagcagctcgctacctctctaacataatgtgtaacaaggtggagagccagctgctctccaaggataggaggttaaaccagtacgtccattttgaaatgctactatatatacacacccaaactactacatacatatacaggacttaaaaacaacaagcccagctcagaatgcttacagcctggcacctaagccttatccacacctcaccatagctctgcagggtgacacctcgaatgttcccaccacagaatttctctgtactggcttctaccacgagaaaggcaaaatgtgaaaatgctggcaagagagtagctcgggagctacagctgccgtgtttttcatgttaaaaagccacttaatgtggaggtcttcagttccctttgcaggaagagtcgtgagcaccatcaggccccacagggtttgagggtggggcagacgcgcctctctcggcaaggtgaaccgggacagagacggcggcaggctgcctaaaggaccgtcacccaggctgtttcaagaagtgtggtttccagcaggtgcctctcttccaaatcacggtctgctcaagaagagtgttgacttggaatggcggaggctgatcccaaaggtggggggcggggggtgtccctgcttccctaaatcatgtccagagcgtgaggtgtgaatatggcttcccatacccttggaatgtctgagttacagcaagaccctgctgtaccaggacaggctgggcctcaccaggaagtcactagagtgtcatgccaggaattaggcaaatgcctattcctggaaaactgcaccctattgctgagcgacaatgacttcagcaacaggcttaggaaccacagccatgtaatgatcaggtcatgcacaggcaggttggacttggacatggggcacattagtaagcagagatcaaagtt

SEQ ID NO: 467023 - DNA, 1000 bp, Homo Sapiens; identical to SEQ ID NO: 158047

SEQ ID NO: 467024 - DNA, 1000 bp, Homo Sapiens; identical to SEQ ID NO: 337124

SEQ ID NO: 467025 - DNA, 1000 bp, Homo Sapiens; identical to SEQ ID NO: 158048

SEQ ID NO: 467026 - DNA, 1000 bp, Homo Sapiens; identical to SEQ ID NO: 158049

SEQ ID NO: 467027 - DNA, 1000 bp, Homo Sapiens; identical to SEQ ID NO: 158050

SEQ ID NO: 467028 - DNA, 1000 bp, Homo Sapiens; identical to SEQ ID NO: 158051

SEQ ID NO: 467029 - DNA, 1000 bp, Homo Sapiens
cactgtaaaactgtttgttttttttaatgacaggtcaaatatcctgaaacatacatgtattttgatagtcttctaatcccacttgagttcaaatattaaagaaacacacacaagctaagagaattcaatattgttccaaggcacttactgaatctctgactagatgaaaacaggaacaattaggatgaacaattagactgtatataatataaaaataactttttgcttacaatttacaaaattattattacaatctttgatctctgataacctgcaaagctggctgcatgaatccagcaagtttaaaattcagaaactattttctaaaactccagggcaaataatttacaaataaagtacacaaagatttagaccatgcagaaatttcttacatcttctgttaataatatttcaattgcaactttatcaaattatatacctacttgccctgtacatatacaaaataatgcatacatgataaaacagaaaaagagtagtccttaaactcaatatatcataaaggtattactatattaacatgtctacaagcagcgtgtaacagggttaagagacattaaggcaataatacttgaagtttcaaaataaaccatatgtaatactttttcctaagtgtagtataaggcaggtagatggtcccagcaaaaaatattaaggtaacaatctacactgctgttagtcccacatattaaagatggaatactataaatctggctttcagtggcacctgaattttccagtataacttaaagtgtcttctagctccctgaatcatgtccattctgaaggtggatctcttggtcctttgggttttccacatcgattaccaaaaccaatatctgtggcttctgttggattttctgatatttgttctctcttgtcactgaaagtaggtggacattctatgcacatttcatagtgaatacctcccgctggatgatcacatttctcattttcagaggttatcaagccttcagacttt

SEQ ID NO: 467030 - DNA, 1000 bp, Homo Sapiens; identical to SEQ ID NO: 337127

SEQ ID NO: 467031 - DNA, 1000 bp, Homo Sapiens; identical to SEQ ID NO: 337128

SEQ ID NO: 467032 - DNA, 1000 bp, Homo Sapiens; identical to SEQ ID NO: 158052

SEQ ID NO: 467033 - DNA, 1000 bp, Homo Sapiens
tttttttttttttttttactgggaaagctgtaatacagagttatcctttattttgacacatttttaaaaaactgtgaatataactttgtaactaataagggatgttcacatgaagcagttcttaagccttctaacttcttaagggatctcttaaccagcataaatggaactgtttcaaggccatgacattaacagacctttttaggtcccagtagcctgctagtctgtaaaagaaaacaatgctatccactccattaaaatacagaaggcatacagtattgaacagtgcctaaaataaaaaggagaggaggactgaagaaaagtacagcattgcctgctagtagaatgcaaccacttcagcaataataataataaaagcaatattcactgtcataacaaagaccttcactgtattgaactaaaaaaaagtagcatgtatgtcgtcatggaatgtcacatcagggtttgctgttgtataagattataggcagtaacactgatcatatagtgcaaactaggtaaaattgcgtttcactgtgtgaaatgaacagaggtgcaaatgctcagtaggataccattaagacataaaatggcaaaaaataaatatcaaaacttttatcagtgtaaaaaagtaactgggttattgtataacctagagtctggcaaaaaaggcctcaaaaaagttctcagtcttcagaagtttacaaattaagtgccctttcaggattccagtcacactagggactccatgctctcagcagggtctgattcatctgcaataagaacagcaccatttttgtctactgtcatgggaccatttccattttctttagtgctgaccaagctaagccttgctttatagatgaactggtattgttcaatgtctgtgaatactccaggcctcataagattgatcatttttgcaacctggaaaacatccacagcattttcattctccagttgctgggacagggtggtaagggcacataacattcctgct

SEQ ID NO: 467034 - DNA, 1000 bp, Homo Sapiens; identical to SEQ ID NO: 337130

SEQ ID NO: 467035 - DNA, 1000 bp, Homo Sapiens; identical to SEQ ID NO: 337131

SEQ ID NO: 467036 - DNA, 1000 bp, Homo Sapiens; identical to SEQ ID NO: 337132

SEQ ID NO: 467037 - DNA, 1000 bp, Homo Sapiens; identical to SEQ ID NO: 158053

SEQ ID NO: 467038 - DNA, 1000 bp, Homo Sapiens; identical to SEQ ID NO: 158054

SEQ ID NO: 467039 - DNA, 1000 bp, Homo Sapiens; identical to SEQ ID NO: 337134

SEQ ID NO: 467040 - DNA, 1000 bp, Homo Sapiens
agtattaagagtttattggcagtatgaaacaaagtcaacattgctgcattaaaaattcatatatgagcagaacagctagtgtttgctgagggtagttattttaattttttttggctcttgaagattgaaagctttcagaaatgtaaggacatacatggaaatgtccttataaggagcctcgaaaatgggacagattatatcattcctgaaggcatataccttttgttgagagagagattccaggtagatagcatattcaaaaatcccttcttagcaaaagagagacaagtagttaaaactcttgatacttcagagttgctacaaatttgtttttcccttttaaagtaaaatgactcacgatgtggaaatacagtggatagagttctggagcagaagccacctttatgcccaataatagagagtaaatacatatatacccaatgacaatcattgtgctctgtaattgtttgataggagggactataaatacacatttaataggtaatattatcaagacacatttccatataaaatagttactgtttttgatttttgtttttcaaaaacaaagacttctctgttaaaaatccattatcaatcacttgcaactttagcagcaagattctggtaactgagaaaggtaatagcacttcaaaacaggaacagtttaacagctgacagtccattcacaagacagattttgcaaacattaaagcatctaacacataatacgaatgtcttcagcagctcatccagtcatcacctgatgacatttattactgaatattacatacatacattctgtgtggcagatagagtcagtacagacaaaacaaaatctgccttaggctgtgtgataaacctatcatacctccatcatcaaaaaaccttcagaataatttgggggatgcttacaaatgcattcatatacacaaggagctggaaatcttaaatatgttgcccagtcttccacaatccatgccatacatgggcttcagag

SEQ ID NO: 467041 - DNA, 1000 bp, Homo Sapiens; identical to SEQ ID NO: 337135

SEQ ID NO: 467042 - DNA, 1000 bp, Homo Sapiens
ctacacgtaccactccttcttggaaatgaaagacccgtcgttctgagaaaccatgttctcagccaagtccagctgctcagggtcgtactggtagcccagagtccggtccccgtagccgtcctgacgggcctcggcctcatccacggtgaagtagggccgcttggcgtcctcgtcatatttggggtgggggccgcccaccttgcgctcgccccctccaccgccctcctcctcctcctcctcctcctcatagctgcttccacccagtgggccggccttcttctcgtcgtctgagtcgtcggggtactgcaggttctgtgccattggtgggtggtgctgggggatgcctgccttgctgtagccgttgccatacacgtgcttcttggtgctgtagtcacccttgaaggtgtgccggcgccgacgcagggcgaccacgatcccgccgaccacaatcaacaccagcaggatgctccccgccacgcccccaatgatggccgtgggcaccggcccggcgcgccgcccatgttcgggaggagacggggtgtaggggaattctgtgatattgacctccacctggcctgagcgtgtaccgatggggttggtggcctcacagatgtaggtccctgccaggctgtagttgatgggtcccttgaagaagagggttctgttctgggcctccacacccttggggagagagccatttagcgtggtccagtggtactcagtggctggggggttagcatcagctttgcaggtgagcttcacgtccatccgctgcaggtaccagttgccatcaaacccctcaatggttacctcaggctcatactgcacgttgagagtgaggctttccttgaagcggtccatgtggtagttgacgatgcaggccaaggactgctggtgggcttccctgctgggcaccaggcggtagcggctgatgaccgtcactgtgccattggggttccggatctcctggtactctgcctcaccttttaaccgagtttcc

SEQ ID NO: 467043 - DNA, 1000 bp, Homo Sapiens; identical to SEQ ID NO: 158055

SEQ ID NO: 467044 - DNA, 1000 bp, Homo Sapiens; identical to SEQ ID NO: 337138

SEQ ID NO: 467045 - DNA, 1000 bp, Homo Sapiens; identical to SEQ ID NO: 337139

SEQ ID NO: 467046 - DNA, 1000 bp, Homo Sapiens; identical to SEQ ID NO: 157578

SEQ ID NO: 467047 - DNA, 1000 bp, Homo Sapiens; identical to SEQ ID NO: 337141

SEQ ID NO: 467048 - DNA, 1000 bp, Homo Sapiens; identical to SEQ ID NO: 158058

SEQ ID NO: 467049 - DNA, 1000 bp, Homo Sapiens; identical to SEQ ID NO: 337143

SEQ ID NO: 467050 - DNA, 1000 bp, Homo Sapiens; identical to SEQ ID NO: 337144

SEQ ID NO: 467051 - DNA, 1000 bp, Homo Sapiens; identical to SEQ ID NO: 158059

SEQ ID NO: 467052 - DNA, 1000 bp, Homo Sapiens; identical to SEQ ID NO: 337146

SEQ ID NO: 467053 - DNA, 1000 bp, Homo Sapiens
ttttttttttttttttttttttttttttttttttttttttttttttttttttttttttttgtgcaaatggtggcctttaataccaagaaagaccatgacaagtgacagaacaggagcaaattccctagtgtagtgccgagctagccttttgcaggaccctaaaacctgatctagtaacagaataaatcagtgtatttacatttatgtttgccctgaaaacccaggtaaggtctgaagcctgaggcatctctccttcctttcctcctccctctcttcctacctccttgccttctttcacttcctcaattcattcctctcccttctcccttcctctctcttcctttttttcctttctgcttttcccttttctcctttttctcctcattctctttaccatctacctatgtgaccctccaagcccctctgctatttctcccctgctcactccctctgccgttgtctccctcaggttcagcttccggggtggggaggcaagaaagggtcctcagcccagggagcacttgttggtgttcttcttgtcacaagttttcaggtcagtactgggaggcttgttgccgtttcctgatctccggcctcctgacttgagcaagatgtcccgggccagggaactaaaagcctcatccacattcatactggatttagcactagtttcgaaaaatcggattccatgctctcgagccaacttatcggcctgctccttctgcaccttcctcttggcctccatgtcacatttgttccccagcaagaggcgctccaccccagccgaggcattctccttgatgcttttcatccagttctgaatattctcgaaagatttctcatccgtgatgtcgtatactaggataatgcccatggctccacggtagtaggcagtagttattgtcttgaaccgctcttggccagccgtgtcccagacttgtagtttgatcttcttcccctctatatccacagtgcggatcttgaaatcaattccgatggt

SEQ ID NO: 467054 - DNA, 1000 bp, Homo Sapiens; identical to SEQ ID NO: 158060

SEQ ID NO: 467055 - DNA, 1000 bp, Homo Sapiens; identical to SEQ ID NO: 337150

SEQ ID NO: 467056 - DNA, 884 bp, Homo Sapiens
gagttcagttctttatataacgtcccttgtaaaaatgaaagaataaaaacaaaccgaaaaagaggggcagggtaaaattttttaaaaaaaggaaaggaaagagaggaaaagaaaataaaataagacgatttattgcttctcctcagcatcctccttggtctcctccttcaccgagagagcttctagcttttccgccactttttcggcatgatcatttttgcctgatcctgctttcttttctctctcttcgatctctttcctgcattcttcaaactttgttttgaatttctgtgcattctcagcattcaggaagcggatggccagcagctctggcttggggcactcgtcggcgaagtcagcgtgggtgttccagacccaggcacggtcgctacctgcgttgggcttcagctccatcatcggcgtgatgtagtggttggcacagatcttcagggtcttgtccctccgcatgaggaggcggatggcccctttctccttgtgcttcaggagcttgacgtcaccagtgcctcgctccttccattctgggagatcgttctcagaggcaaatcggaacagttttgcccgcattttaaaaagttcctcttcatcttcttccagtgttttaatttcttgctcaggaagagaaactattggctcaaactgagggtcatggttggactcgtctgtattctcagtggaagtatcatggtcctcatgagtgtccttggcggccgccatgggggcgcggcggcggcggcggctcggctgggtcggtcgtcgctggctccgcggcctctcggcggctactcgtagctccttccctccgcgtctggcgccggcgcctcccgcccgcccgctcttccctccgccccacgacccgaacctcg

SEQ ID NO: 467057 - DNA, 1000 bp, Homo Sapiens; identical to SEQ ID NO: 158061

SEQ ID NO: 467058 - DNA, 1000 bp, Homo Sapiens; identical to SEQ ID NO: 337153

SEQ ID NO: 467059 - DNA, 1000 bp, Homo Sapiens; identical to SEQ ID NO: 158062

SEQ ID NO: 467060 - DNA, 1000 bp, Homo Sapiens; identical to SEQ ID NO: 158064

SEQ ID NO: 467061 - DNA, 1000 bp, Homo Sapiens
cgaggggagggatgggtgggcgaagtctgaaacggtgcagaaattcatattccggttctacaggaatctaagaacaaggacgatttgtattcttggagaagcacatactgaagaagaaaatccagtgaaaccaaacgaatatgtacagtatcatctagcacatgtccccgggagcagctgggtctgggctgggctcagcttcaggtggggagttttggttctattcggagagaagactcgtagaggctttcttcatccattacaaaagattggtccagtaaatattgcgttacctttgcttggtgctctattttgtaggcagtttgttgaaactggcgaatctctcggataatatgggatatcatcctcatcttggagaagttgaccaggccgtcttccgtgtaattgggcgtcccctcctcgatgaaggccaggtcggtgaggtacatccccaggtaagggacacagggtgggtcacaatttttcagagcttctctgagattcttaaatctgccctcagatgacacaagcttttggagcttatcaatcaaagctttagtctgcttagagactttgagccacgtctttttgagccggaagattgcactgcggttcatggacgaggtgatctccagtacggcattgtagttgtggaggcagcggcatatgtcagctacggccacccacttctcgatggcgctcaccctggcgttgatgtcctcattgcggatgatttctgaagcaatcaagttactgatgtcattgaagtgcttagtggttttcatgatataaggggtcctttcattcttttccagtttcatccatccttgtccgaagaactcctcataaggaatcttcttgaagacgaggtgatctagcagggtcagctgctccgcgatctccagggctgagtggttttcaaagggctcagccttcacgccttcagccatctgcgtgatctcctccagcgtgatctggttgtcacctgggtcctcctggg

SEQ ID NO: 467062 - DNA, 1000 bp, Homo Sapiens; identical to SEQ ID NO: 337155

SEQ ID NO: 467063 - DNA, 1000 bp, Homo Sapiens; identical to SEQ ID NO: 246430

SEQ ID NO: 467064 - DNA, 1000 bp, Homo Sapiens; identical to SEQ ID NO: 158066

SEQ ID NO: 467065 - DNA, 1000 bp, Homo Sapiens
tttttttttttttttaatggctcgggtatataatttattttatcttctttattttgtattttggaataatgatagctgcatctgaaaataatgatatatgcacattaatgagtatttaagaaaaagagcaaagtatgaagaaggaaggtaaaaataccaccccaagttctaccacttagaaggaacctttgttaaaatttaggtggttattggaaagccatatatatatacatatatatacatacacatatatatgtgtatatacatgtgtgtgtgtgtatatatacacacctccagctgtaacctaaccagagctcagcaggcccctttgctgctcctgggaacctcaggccgggccacctgcaggagtgcccttggtgtgtgtcccagaggttctgtctgccctggggctctgcctatggggcccttccctacaggtggtcctgcaggcctgggctccgcttcaccctcagctggttgtgctggagcatctccttggccctggcgagagcctcttctgcagggacaaccacatggggtgtcacccccaccccttcccaggagctgccatccgaggcccccacagaacgggccgtggggatagtgaggtagaggttggtgtcatccacgtggtaggtctgtggtggctggcagcccccactggtcacctccccaatgaccagggcccggcccagcctcttcatgatataggtgaactcctccgcggtgccggccgtcacactgctggtcagaatgaccatgctcttcttggagccatagcgttcacctacaacctgggcgtgtgtccagagttcactgacagagtcatcaggccggctgtagatcttgtccagcagaactggagggccttcatcaaagaagtaggagcacaagatgggaatggaggatgtggggccaccgatgttgaacctcatgtcgatgatcatggcatccgtgtgcatgatcttcttccagatgtgctccaccagcagcctggaga

SEQ ID NO: 467066 - DNA, 1000 bp, Homo Sapiens
ccttagggggatcctttatttcattcacttcctccttacaaggtgaaatttcaatctgtacaggttgtgtctgccagttcagtccacagctcagagtatcaccttgtcctcattccatggtataagctgttgcggggggggcaggtctgcgggtcggggattcactggactggatgggacatgatccagaaccccgctccgtttggcttcccaaggatcccaccaactcattctaatcagtgatcactgaggaaatgcattgtatcctagccactattcaaagatcaggcctacctcattggcattttaaggtaggttcaaggatatttaggtggtttatcatttttactatagttcttcacatgtctgacattcatcttttccctacctctaaattcctttctttttcacattatctttcttgattgcttcttaatagaaaaacaaacaaagacatggatttactgtgcatattagcagatccatactggaaaatgcatggaggtttcatatacaccacttacagtaagtaataactcagagtataaagtcgaaaagaaagaatctgatatattagacttgttctgaaataagcttacctaggatgataccactttcgcttaaacagaatttcccctttccaactatctaacagtggcaaatataaaaatctggtagttaaaatacacagcagtcacttcatattactgcctccctcaacccactcaccttctgaagaacagggctttttcaagttttgttcccctttaagttttaatagaaaaaaaaaagttttaagtcatgttgtaccaatatatccccagaaagaattgcaatttaccaaggttttcacgtgttttgagagaaatcttactgaaagactagtgatgtccattttccagtaaatactgagcgaaaaacaatttttataccccaatctgaggtataaacttgctttttgtgggatcacaactgctgtaattagacaattgtagcaaca

SEQ ID NO: 467067 - DNA, 1000 bp, Homo Sapiens; identical to SEQ ID NO: 158067

SEQ ID NO: 467068 - DNA, 1000 bp, Homo Sapiens
ttttttttttttttttttttttttttttttttttttttttttcccagctcagcttgcgtttattggaaactgcttacccagcactccacaaaggagcttacagcggggtgacacttaggactcctatggcctaatcctgggattagcacagggccatgggctggtggacagagggaggggtgggaccgggcatgatgggagggaatgctgaagacccaggaagaaggaaccagtgggtcactacagatgcttcagtttggcagggagctgtgctgtgggcttgtgtgcaggcctttctcttggccctggggtggatgtgtgtgtgtgtgtgtgcgcgcgcgtgtgtgtgcatgtgtgtgtgtgtgcacaggcgctcacgggtgtcatgtgagtggtaggtggagggaggacagctgaacagttggcatcaggcgttcttcatcttttccttcactttttgaggctcaaactggatcagtcgcagaatttccttattggccagtgtcccctcaatgaattctttctctgtaagtttatcatcatcattctttccaaagtacttccagatcttctcggctcgcttttccggcgtgttttcatcgtctggaaggagcttcacgtcctcgggagtgatcattttgaaaatagccatgacgatctccagcacttcattcttgctgatggtcccgttaccgtccacgtcgtagagggagaaggcccactccagcttctggttggtcttgcccgcggtggtcatgtgcagggcgatgacgtactccttgaagtccagggtgccgtcgaggttggaatcgaagctgcggaacacatgctgggcgtaggccttggggtcggtgtcggggaagaacttggcgtagatgctctggaactgctgctgggtgatgcggccggtgggacagtccttcaggaaggactggtaccaggagcacagctcctcctccgagaacttggtgttcagctgcagctcctccaggatctcctt

SEQ ID NO: 467069 - DNA, 1000 bp, Homo Sapiens; identical to SEQ ID NO: 158068

SEQ ID NO: 467070 - DNA, 1000 bp, Homo Sapiens; identical to SEQ ID NO: 158069

SEQ ID NO: 467071 - DNA, 1000 bp, Homo Sapiens
tgtgcacaattcgctggctcagggaagccaaaagattggacatcccttgatctacatatttaacttaaagtatcactcagtgagcctctgtcagtataatattgctttcaaaaagatagttatgtcaaaagaaaaaatatagctaagtatataaaggcataaaaaacttaagacgattgtatgaacttattctcaaatattttacatttaaagggttttacataaaaatttttcccttgttttatactggaaaattatataattcatgatctctaattttcaaacattctcaaaagtttagatcttcagagataagctctgaaaatatagatccatacatataaaatatctatgaaattcttttaaaaactattgtctaactacaaaaataatggcatatacatgcataaaccatctttaattagaaaatttagtaacattcatatcaggcatcatcgatttttcttttcttagctcctgtattcttagaaccagactgctgaagcatgtttgcagccttcttctggaagttgcctgaatttttttcctccatctttttatcaccttgttcagaatgacaagtttgagacgattcagccctgaaagagttctgcgtggactttgtcacttgcatagtaatagcatgtgcctcattgttcagaaggttagctttaggtcctattttcaaatacgaaatggtagcataagctgtaaaactgtagtcttctttaagatactgctgtattagaaagtgtgcaataatcttctccagatcttcacgaggaagtgtgggagccacaacacctgctactctcagttttgctgcaccctttcccatccaagaatcaatcagtttcaatggagtgagtttttcattcagttcctctgcctgcttcaggatcttgattagatctctgcagtactctgttatgttctttctttcaaatgcactgtctttacagcagttatcgcacattttgttacatgcttctgagttcca

SEQ ID NO: 467072 - DNA, 1000 bp, Homo Sapiens; identical to SEQ ID NO: 337161

SEQ ID NO: 467073 - DNA, 1000 bp, Homo Sapiens
ggagcggactcagcctttattccgcgcctcggcaggcgggggtgggggcgggggagggggcgggggcggggcggctcagcagggcgcccagcatctcctcgcacatggctaggcaccgcggcacgtggaagcagcctttgaaaggacctcccttgatggagagggccaccttgccctctcggctcaggtagccaaaccattccccgtactcgggatcgcgaaactggcggaaggtgtactcagccacttggtagaagaggcgcagcagcacagggtccccactgtcactgtaacccatgaggaaggcaatcatggcttcactgtgtggccaccagagcttcatggcccactccagctgggtggggcagaagttatcagcatcctggaagtaaaagaggcctccgtggtcagggtcccatccggagtggaagggcaacaataggaacttgtcaatcacgtgggctcgaagttcggggtcgcctttccgaatgcaatgacggagcagaaaccagccggcttccagcgtgtggcctgggttctgctgtctccccaggcagccaggaagttccttgccaccctctgacacattctccagcacagcttgtccatccctctgcacgtgctgcagaatcctccgggcgcaccagtcccccagctctgcgtatttgcccgccagctcctcatctgcctccccgagctgctccaccaggttcagtagcatcatgggcaccgccatgggctccgcagccggggccccctggagctggggccggcccagtcccgacgcgtcctcctgcacccagtggacgatctgatccatcatctccaccgcttccgtctggtaccgcacttcccctgtggctctccacagctcgttcatggccatggtgtagaaacactcactgaagatggttcgctgcaccttgaccgggcggccgtcccgagtcagcacaaaggcacacttcttgccaggaggtgccacccgggcataccgcagcaa

SEQ ID NO: 467074 - DNA, 1000 bp, Homo Sapiens; identical to SEQ ID NO: 337163

SEQ ID NO: 467075 - DNA, 1000 bp, Homo Sapiens; identical to SEQ ID NO: 158070

SEQ ID NO: 467076 - DNA, 1000 bp, Homo Sapiens; identical to SEQ ID NO: 337165

SEQ ID NO: 467077 - DNA, 1000 bp, Homo Sapiens; identical to SEQ ID NO: 337166

SEQ ID NO: 467078 - DNA, 1000 bp, Homo Sapiens; identical to SEQ ID NO: 158072

SEQ ID NO: 467079 - DNA, 1000 bp, Homo Sapiens; identical to SEQ ID NO: 337168

SEQ ID NO: 467080 - DNA, 1000 bp, Homo Sapiens; identical to SEQ ID NO: 158073

SEQ ID NO: 467081 - DNA, 1000 bp, Homo Sapiens
gaatcttaaatgaattatttatttatttttaaaatctgaggaataaatgcaagtttttaaaagtagcaaggacatgtaaacagaaattgcttctatatattttaatacaaaatccacatttattattagcaccaatgatttaacttacaaatatattctgactccctggttttaagagcaatagcttaagttaaatacacagttcatctcttccaaagtcaaaaacaataaaataaaataacaccgacaagcaatagtagcaatggcaatttgaaaacatatactttaagttaatgggacttcaatagctcagtacaaactatataataatatgtagcatagatgtcagttgactttgattcttacagtctgttgtaatcagtttcatagactttagtcacagtttctgtgtaactagagttacctggccttcccagttctgaggggctttctaatacagagctccactgttttttatgacagtaccacagtatcttcctccttctgcggtctctctgtttttgtcttgcttatgcttcttcaactctgcgcctggataactttcatgttaatccattctgagtcatttgttcttcttggcctgtcaagacacccaaaaaaggccaagctgttcacccagggagccatactggcacattccttctgcgcttgatactatctgttaattcccttcagccagggaccagtcactttaggctattagcctgcaggtcatttagaagatttaagtaaatatctgatttgaggaacctgggataagagtccttttccataagagtatatatgactttttgtgcttcatcaaaacacgtgggggttggtgctttaatcttcttggctgtagattctcgagtgcggaagtcaatattgatttgtttagcagcatctgaatgcacaaatgctttatatatctcttctgctttacagggcaaaagatcagactctgttttcttatagtcttcacaagccagccagaact

SEQ ID NO: 467082 - DNA, 1000 bp, Homo Sapiens; identical to SEQ ID NO: 337170

SEQ ID NO: 467083 - DNA, 1000 bp, Homo Sapiens; identical to SEQ ID NO: 337171

SEQ ID NO: 467084 - DNA, 859 bp, Homo Sapiens
tttttttggccttacatgaggtttaattaagctacaaaatgctcgacgtgtccagtgttgaaggaatctctgttttgtaaactaaaacttccaagttattattattctttttttatgttagcttagccatcatgcaaaatttactggtgaagcagttaataaaacacacatcccattgaagggttttgtacatttcagtccttacaaataacaaagcaatgataaacccggcacggtcctgagaggaaattcctttgcttcttaaagctgccagtcccggctttttgggggctcatgtgttataaattctggaagctcttttagctgcagtttgagcatcaggcaaatcttcttcctcttcctcggttcgcttgtgttttaaaaacaagtcagactttaagaagcggctgtagctgtcgtacttcatgagattaaagatctggtcctggagtttctggaacatcagagggtgcggttcttccaggatcttctcgttgagccgagactgcccctccacgttgacctgtgatgaggccttgctggacagaaaggtcatgtagatctcctttgccttttcctgcatctgcgtcttatcttgcattttcttaaaatcttcacatgctagccaaaacaaaacattttcttcactgaattccttttttaaaaattccctaaatcttttcacgccttctgggtcttccagcagattctccagggatgccgcccatttggctgtgctcttgaggctctggtggctgctgctggaactgccatcgctgtcgtggatgtgttccatgctctggtgtccacctgagaagttccacgcagaccaacaatccactgccttcccagagacgcc

SEQ ID NO: 467085 - DNA, 1000 bp, Homo Sapiens
tttagttgatatttgactttattgatttccaagatcacgatgagttcacattgtaaggaaaaaacatctcaaaatatagaaaccacattttatatccttatagcaatgtagatgcaagagcaaatgaagaaattcatatattttttgttaaaaaatcatcagaaatgttttacatgtagaagatacatgtgataaagaagtttgttaatgaacataatagtaggaaaattttatagataaaatgtctctgaagaacacctttttgattttctcatggtataatacaattgattgtactgtgagtagcatttgtctataaattcaagttatttagagtactctatagaacattcatgctagaaacacaattcatataacaacaatttttaaagaactaatttgtaaattatgacacaaaattttattaacaaggaaatatccattaattgactactacagtaaaaactttataatgcttgtatcatgaagaaagaccttccttttccttatatattaattgaactacataggcttgctgtacattttgttattcatgttataagaattctagattccattgcttttgaaatatgtttctttttaggaactaaaagtcaacttatagtttgatttctgttttatttgtactgtgtttctgattttgtgggtttctaaataaaaagatcaaacccaccactttcaatatactgttttctatttaaacttttgagttgtagtcagaaactgttgttggactgcatagttttcaaaagtttttggtacatttctgactttagaaatctggggtaggaatccctttccatatgcatatagactattttctgagcttcttcaaaacatgtttcagtgggttcctgaatgttcctgatgatagtctctcttgtcgaactgtcaatgttaatctctctaggggactgtggctggatgtaaatcttataaagcttctttgccctagaaattctgctccaccgtgaggcaa

SEQ ID NO: 467086 - DNA, 1000 bp, Homo Sapiens; identical to SEQ ID NO: 158074

SEQ ID NO: 467087 - DNA, 1000 bp, Homo Sapiens; identical to SEQ ID NO: 158075

SEQ ID NO: 467088 - DNA, 735 bp, Homo Sapiens; identical to SEQ ID NO: 337174

SEQ ID NO: 467089 - DNA, 716 bp, Homo Sapiens
tgaatttgcaaagcagtttattgcagggttcacaagggacttcagctcaggaaagctgaaggggtatggagactgatgaggacagttgctgatacccagagtacatggagggatgggatcttggctatgattgaggagcttggcagatgagtgatgatgaggactgctgatacaggagcttagatggtggtatccaggtgaactggaaccacaggataccgtggagaatcccgtggatctctgttgtcacatgcaactacatagaacctccttcctggtctgtctgcatacgtgcagtttgaaatattctgtgcacctggatttatgaggtcacagtggagtaaaggcacccggaatctactccgatgacaattgttgagagttctgttatgagggcagcgtatactttggttaccacaaacattaactacattagcaaaagttgtacgaagaaaagtattttggtttttgcaacgccatcgataattgttaattgcccgcattgcaatggtgcatcgaggggggttcagactgatgtgctggatggcaaaccactgagccctcgtaaactgtgggggtctggcatggagtgagccctccacacccataagccccaacagaagaagcagacaaatttgggaagtgaacagttttggaaccatgtttcccagtctctgagctgtggctcctgtgagaactgatccagctggttgttc

SEQ ID NO: 467090 - DNA, 1000 bp, Homo Sapiens
tttttttttttttttttttttttttttttttttttttttttggttcaaattaatggttttatttccatctgtaacactagcagaggagtccaaagcagactgatatccatggatatagtttaaatgtaacaaagaaagagttgaactatgtacattgaaaaaaggaaagacatttcttcataccaacctttccctagttcgcagtttctgaatagtagaaacaaaacacatttttaaatctttctatcaatttaatttaggacgaagtaacacaacttttataattaaccactgaagttgtctttaaggacaaaacttaaattttaaaatgggtgttaccatattttatgagtggactgactccaaggttgccttgctccaagtctgggcatcgtgacattgccgtgatgcccagaagaaagttaatggcaatgatgtccagtcagagggcagacatgctacacatcacaatgatgagagctgcggattctgccctcttcaactccaagtagaaaattattattttcattcaaactaactggaagtgagccaaacagttaaaaagtcagaatgaagaataaaacaattttcttttcacatagaggagggacactccttcagccccgtctaaagtgaattctgtgctgagtccctgctccttcagaagggtaaactgaaggtcagttattgctaacaaagccagaagtggcccctttcccgccctgaagatgtttcacacgaaaaggccgtttgtttggcgtgaggccctctgaggaaggacgacagtggaagaggaggcatgccggcactgtaaggcctctctcgttagccaccccccaggccctgtgctgtcaggggcagcttgggccactttgctgcccctgagagaacctgaggctcccgcgtacctgtggagcgaaggagaggttgtcatctgggcccctgtttcaccagtcaaaacctatggagcagtcagaagcccgaagcatccaagcccagt

SEQ ID NO: 467091 - DNA, 1000 bp, Homo Sapiens; identical to SEQ ID NO: 337176

SEQ ID NO: 467092 - DNA, 1000 bp, Homo Sapiens
ggaacgttgcattgtttatttggagttatagaccaccatgacatttatcattctagcagagttttctttcagtaactactgaatgagagtgtttatctcaactctctatttcccaaacaacgctattaatcagacccatctccatatccactgtgagtgagacaggcatagttcaggccttcaggcttgccagaagggcagtaagccacttgtttttcttggcagaaatctttgtctgcatgtggttccttctcttctttcctcagaccacaagattcagattcctgggagcctagaggaccctcagacttttcttcaccttggccacattctgtagcaagtaccatatagtttaacccttctcggttcttcgtttccattaaagcaactggcataatgtcatctgaattcaaacaaatcacatcgccatcttcaccttcaaagctttcatttatgactccactgttgtttgcttcatctctggacttataaatgctatttaagaaaaaatttctgaataactgaagttggtcctgaattctatgaaaagtaggtctttggtcgggttcttgagcccagcactgggtcattaaattccacagatcatcaggacaatttcttggtggctccagtctccctcctgtttgcacatagtttaacacatcaaggttggaatgagctggataaggctgatgaccaagagttaaaatctcccaaatcagaattccaaaagaccatacatcagattgagtagtgaagattccatccatcaaactttctggagccatccaccgaactgggagcaggccttcccctctctttctatagtaatcatttttatagatgtctctggcgagtccaaagtctccaatcttcactatccgtggactggtatagtctttcacggaaacaaggcaatttctagctgccagatccctgtgaatgaaatgcatccgttccaagtagacacagccttttgaaatatctacacacaggtcta

SEQ ID NO: 467093 - DNA, 1000 bp, Homo Sapiens; identical to SEQ ID NO: 158078

SEQ ID NO: 467094 - DNA, 1000 bp, Homo Sapiens; identical to SEQ ID NO: 337177

SEQ ID NO: 467095 - DNA, 1000 bp, Homo Sapiens; identical to SEQ ID NO: 158079

SEQ ID NO: 467096 - DNA, 1000 bp, Homo Sapiens; identical to SEQ ID NO: 158080

SEQ ID NO: 467097 - DNA, 1000 bp, Homo Sapiens; identical to SEQ ID NO: 158081

SEQ ID NO: 467098 - DNA, 962 bp, Homo Sapiens; identical to SEQ ID NO: 158082

SEQ ID NO: 467099 - DNA, 541 bp, Homo Sapiens; identical to SEQ ID NO: 337181

SEQ ID NO: 467100 - DNA, 1000 bp, Homo Sapiens; identical to SEQ ID NO: 345380

SEQ ID NO: 467101 - DNA, 1000 bp, Homo Sapiens; identical to SEQ ID NO: 158083

SEQ ID NO: 467102 - DNA, 1000 bp, Homo Sapiens; identical to SEQ ID NO: 158084

SEQ ID NO: 467103 - DNA, 738 bp, Homo Sapiens
atgccagttttttattaggagttaaataggccctttcccatcgtggtctcattggtgcacgctctgctgagcctcgagggcctcagagcagatcccgcctcctcccatccacaagggaggccacaggggtgcggcaggcaggctgggccccagagtggctctacccctcattcgctgggcatcctgaggaaggagccctcacatctctgggcctcctaggtaaaatgggttaactgatcgcagaagacctgggcaagtccagattgaaaggggtacaggagagagggtaggagggggtgtgggagacatgcccagcccccgacagccagcgcaccccctggagcagaggctactgggagcaggggggctctgaggggcagtccttgaagtactcgtggcagtagagacagaggcaggcaagtgagcgcacatactccacaaagtccacctcgcagtccttgttggtgtccagaacactcatgaatttgttgtagtcacattcccgaaactcagtcggggtccaggtggccagctccttctgcagcagctccttgagctccgcctggcagagcttgtatttgtccccacagcgccctgcgtattcctggaaggtgcacacgatggcagctaccgcctgctccagaggcctggccatcctcactcgctggcccagtcaggaacctgaaccagatggtctcttgagagttgaccagttcgggtgtttaccaatctgagact

SEQ ID NO: 467104 - DNA, 710 bp, Homo Sapiens
tcccagcacctgcgatggaaactttatttcctcccatggaagggtccatctgggagggagaggagggcagggggccaaagagggtctgtgagaggagcagccgaggtcagcagcaaagggtggagggtgagggtggagggcagccctggtcacttgttgtcctctagaaagaagtcgttgtaggccatgcacagcatggtcaggaacaccgagtactccttgaagtcgatctcctggtcgctgttcttgtccaggctcttcatcaagtcatcgatgctgctctccttcatctccccaagacacagctctttcttgatcagctccttgagttccttcctactcagggtcagtttgctaccctctctccccgaatatttgtgaaacgtggtcaccatagtggtcagggccttctccagaggagtctccatcacagtgtgcagctcactgtgggagtgagcccagagaatccaagcagcaggcatagcctccctctcactgccttctgcctttatttccctgatctctgtcccttccttgtttacaaacaagggctggggacacactgagttcccatagcacacacgtccccaatcccagaaactttactcttctgaccaaaaatcagaactcaaaatctgaaatctgatggaacaataagccgaagaagggaaaccaggctgtcctggaaagaaaacctcagaagtgtggga

SEQ ID NO: 467105 - DNA, 437 bp, Homo Sapiens
ctggtgggagaagacattttattgttcctgggtctctggaggcccattggtggggctgggtcactggctgcccccggaacagggcgctgctccatggctctgcttgtggtagtctgtggctatgtctcccagcaaggacagaaactcagaaaaatcaatcttcttatcctcattcttgtcctttttctcaaagacgtcggcgaggtaatttgtgccctttttgtcacaggcactaaggaagttggggaagttctccttcatcatcgtcagcaggcttggcttgtcaatcttgtcatcacgtctggtgtatttgtgaaacatgtcgatcatgcctattatggacctctcagcttgagtgttgctcatctttgctttcaaaaagccagagctgggaagcgtcacgagtagaaggatgagtgagatgtgtgtgtttggac

SEQ ID NO: 467106 - DNA, 428 bp, Homo Sapiens
tttttttttttttttttttttgaggtattgatgactttattattctgcaggtacatgtccaggggcccagcctctgggcccagtaactcagctactctttgtggctttcttcatggctttttttgtgggctgccacgcccatctttatcaccagaatgaggaactcctggaagttaactgcaccatcagtgttgatatccaactctttgaaccagacgtctgcaccctttttcctgatatactgaggacactcggtctctagcaatttcttcaggtcatccctgtagacggcatggaaattcccctttatcagggagtacttgtggtagacgtcgatgatagagttcaaggctttctccagctcggtcaacatgatgcccacggacttgccccaccaggtcttctgaaagacagctgacaagagacat

SEQ ID NO: 467107 - DNA, 649 bp, Homo Sapiens; identical to SEQ ID NO: 337186

SEQ ID NO: 467108 - DNA, 1000 bp, Homo Sapiens; identical to SEQ ID NO: 158086

SEQ ID NO: 467109 - DNA, 1000 bp, Homo Sapiens
gaattctgcgtgcttattactgtacagaaacttattaacattgaagacgactcaagtaaaaagcacaatacaaatagcagttcaaaatggaaatggttaaatcgacaaaaaaaaggttgaattttagaataaaaattaaaaaaccaaacctttcaaagaaccacactgttcagtctgtactttcagtcctttccttaaatctgttttgaaagattagacaatgtgtttgctgataaaattttccagcaggatcaaagtgtacatgtatatacagactttattagagatctaatgcatcactgaggcattgcatcaacaccagattcatattaaactggatatagaaaataagttaatgccagattacaactgcctagcagggcaacttgcaattgccataaatgttacagcaagtttacagcactctagtcaattagtatttagtccaaaatacagaagaccaaagttaacgcttgcattctgtttgcaaagcaaggttatatcgctaataaataagctttcttagaactctaaagttgaacaaggtacaaaagaatgtcttcataatgttgtagttcatagatctggggaacagaaggaaggggcggggcggggtggggggcaaggagtaggaggccaccataggtcgcattctgaacaggaatgaatgctatgtctccagcccgagctgctttaactcgtgacgatctccttgctgtcctccacgaagcgggtgaagcggaagttggttccgttctcactgcttgccattttctccaggccggccaggggagcattgggctctgagttctggagcctctccaggtttcccgtcagcccactaataggtgagctgttcccactgccgaggcttccaggaattggagggatgccaccgttctgaatgacggagatctcgttggccttcatcgccagcccgttggagagcgctgctgcatactgattccagaagctggaaggatccccacttcctgatctt

SEQ ID NO: 467110 - DNA, 1000 bp, Homo Sapiens; identical to SEQ ID NO: 158087

SEQ ID NO: 467111 - DNA, 1000 bp, Homo Sapiens; identical to SEQ ID NO: 158088

SEQ ID NO: 467112 - DNA, 1000 bp, Homo Sapiens
tcagtttttaaaactttttttattttttaaattttttttaagtttttattttatattatctacaaagtaaaagtttttcccttaacttaaaagttgaaccactgtagacagtgatcacctcatcaaacttgatttataaataataatccgtcagtttgacggtaagaatttactgaaactttgtcaagtttagtaaaagggcgttccaagtcttgatttttttttttttttttttttagcagtaatagcagcaagaatcactcttgttacttcttttgctagctgatgtgttcatgactttcaagggttattaaaaaataaataacttccagtttcggcaagcagagctggggtacctgcgggactctgaaacagcatatggaattatggaatagcccccaagttcctaaatgcctctactcggtccaagtatcttccactgcaagtgaactgttagcattcctattggatgttacaagaaatcaacatatatattttaaaaacaaaataaatgaaattctagttttctgtgcttccagttggtagaagcagtagaagggaggagggaatttggcctttcggttcctccagggcagccttacaactgctgttggtggtgggcttgtactgaagggtgcgtcatataggggaaatgcgctgttgtcgagactggaatgggctgtagtgcactttgagcgagggcggcctggggaccgccgggtggctgtgtcgtcattagcatcattggcgcatgggcagttggatgagaaggaaccattcctgactgtacatgagcctgaggtacgtgggccatgtggggtgggttggtatacgccggctgaacgtgagaaggatggatcgtaaagacagtctgttgtgctgctgggaaactattctgtggcgactgcgtgttggaggcaggtgtcatggagggtggagttggcgcaagccccgcgtggtaaatggctgactgctgctgtggactggccagatggagagc

SEQ ID NO: 467113 - DNA, 1000 bp, Homo Sapiens; identical to SEQ ID NO: 158089

SEQ ID NO: 467114 - DNA, 1000 bp, Homo Sapiens; identical to SEQ ID NO: 337192

SEQ ID NO: 467115 - DNA, 1000 bp, Homo Sapiens; identical to SEQ ID NO: 337193

SEQ ID NO: 467116 - DNA, 1000 bp, Homo Sapiens
caggtggagtcaacagctttatttcagagcagcccaagtgtgtccgtggggcctgccttgccttctgcctccctgcagctgaggtggctaggcttgacacacgtacacaggtgcatcagacgtgtggacatgcagacacagacacacggagcatgggtacatcaccgcgtgtcggcacgtccagccgcactcgtgtgcacgcgggaacccccctccgccccgggcctccttgagacccaccccaggcagtgtaggtggtttgaccagaggcgccgacatgcccggtgcctgcctccccacggccgcgtgtgctgcttcctgggctgctggtctggcccaccctgggccgctggggagcctgctgctgccacagctgcaaggaccaggccaagagatcgcacagccctggcaggtctggttcaggtgtccagagtctcaaggggctggggcccagcccagctctcttcggctgagactcccgccagaacccctggaagcatcacccgtgggagatgaggcccgctgggctccgggtcatctgacgtgccgcctgcaggcgggggcatctgactggcctctggcttgatgctggacgcccctgaggcagggctggctctgggccaggagaaccacgccctgcggagccggcggccgcctagcaccagggtgagggcagaagcatcgagcagcagctccaggagctccaggagggagaggacggaggccccaaaccacaggctgcagaggctgcccatggccgagagcagctgcggcaccgagtacacgggcgcctcctccactgagcggtagttgagctcctggtagacgatgttgattttggccaggctgctcctctgtctgtggctctgatgcggcagcccctgttcacctagcgtggccagagtccatccagctgacttggcggaaggccacctggaggtcccagtggagagcttgaatgcagactccctgcagggcctggggcagcgggaggtacagg

SEQ ID NO: 467117 - DNA, 1000 bp, Homo Sapiens; identical to SEQ ID NO: 158090

SEQ ID NO: 467118 - DNA, 542 bp, Homo Sapiens
gttgggggttgatgattgtataatttaaatgtttaaagtgcaacaacatagcttatcaagaccaagcagatcctctgtgacctagcaaaagcagggcagaaggaatggtgtagggctggtagtttcggggacaggtgaagccatgtggtttccagagcccacaatggaaagaaatctgctcattttctttttgacgggcagtgcctcagcatttttctgtgcctctgaacccatccaactgtgtccaaggcgcaggcctctttgcctctcttcagcttgaatattaagccctcattggagcagatggagctggtatttctgtaacacaggattgccctcaggggaatctcttgctccgcaaatgagaagcaacatctggagaagggtacctgcatgctcttgctgtccacatcttccggccacatcccagctagcagcaagcacaccagggctgtggtgatgatctgcatgtcttctggtctggcttgggccttcctggagcagctttgatgagcctggtgaagctaagagctcaccactgt

SEQ ID NO: 467119 - DNA, 760 bp, Homo Sapiens; identical to SEQ ID NO: 158091

SEQ ID NO: 467120 - DNA, 793 bp, Homo Sapiens
ttttttttttttttttttttttttcacagtgagaatgctggtttaccttttatataataagtactgccaatatattaaaaggtggtgctgagcaaaaccattcaataaagatttgtcatttgatacatatggcacaatgtctgctgagaaagctaatcacactgattgatccatgcattgaatgtacgaagagttgaagggaaaggggaaaggatgataaagacaatgtcatgagatgtcagagaaaatactaatttcataatgcagctcaacaatagaaatcaatttcaaaatgaaatatgatgcataaactaagattaaagttagttaatgtggctgggcatagcagatgggactcttagaagaggtggcctccagggtggcagggccattgccctggctcaggctcctgttccctcctgggcccaccaagttcactgggccctcgcagcttccaggcccctcaggcattcagcttcaggtcgctgatgtatttctggacccacttcttattggggtcagcacagatctgccggcctctcttggttaggaggatgacacctggcttggggcactgggggctggtttcagaatagtcaactatgaacttttgtggaatctgccaggaggtatagacgaggcagcagagctctttgttggtaccaacttgtgcacaggagcagagggccatggtgcagacgaggacaaggagggcagctgcaaggcccttcatgatgctgggcaggcagagaagtggtcagagtgagctggggcttggaaactcacaactcct

SEQ ID NO: 467121 - DNA, 878 bp, Homo Sapiens; identical to SEQ ID NO: 158092

SEQ ID NO: 467122 - DNA, 1000 bp, Homo Sapiens; identical to SEQ ID NO: 337195

SEQ ID NO: 467123 - DNA, 1000 bp, Homo Sapiens; identical to SEQ ID NO: 158093

SEQ ID NO: 467124 - DNA, 1000 bp, Homo Sapiens; identical to SEQ ID NO: 158095

SEQ ID NO: 467125 - DNA, 1000 bp, Homo Sapiens; identical to SEQ ID NO: 158096

SEQ ID NO: 467126 - DNA, 1000 bp, Homo Sapiens
acagttgaagaaaactggatgtcagtctatacaatgatttacttttggcatgacagactttattttggcactttcacaaatattttgctttacagcagtgacaaaatatttgccagaaatttttcttttcctggcacggatattcccagcagttgttattctatgaattgaatttcactctgctttgcacagttagaggtatacccattcctaccctctgtaattgagggacacagcgtggctttagaaagctaggctatcgtttccttttagtcactctaaagtgaattggttctgtaagtgatggggcaggaatctgagaattaattaaggccattaaggatttaaagtaaacactgttccaagtgttgcttaaaaaaatgtttttaatgaattatgtggcaattccagggaatgttctcaaaatgaaatattcatactttattaaaagtaaattgtatgttggaaaagttgctttttttgctgtcttcttctgacttggacggctcacagtttaaaacaaaattagtggtaaaatagaaaaaggaaatgtttagtacagaaagtaccagccacagtaccctcataactccatctccttccccaggcatcactctttccagccacttcaatcctaaagcagtgagaccctcattttaacacacagagcctccctgcctaccctccttccctgtaacgtgagctactgtagtccatttattagttcttcggttaagcttcagtagacatttggagcacaattccaaaggtaaatcaatctataggcctaagccttagataccaacatcaggaaagccccattcagatctttggaatttacagtcttgtaagttatttgcaaaagcaggcgtctgtcttaatattgccatcagttatcctataaaggttgcaaacttcgaaatcccctggcagccttccaatatctctacctagacacacacaggataatacattcagatttcctctggccaattcagaa

SEQ ID NO: 467127 - DNA, 1000 bp, Homo Sapiens; identical to SEQ ID NO: 158097

SEQ ID NO: 467128 - DNA, 1000 bp, Homo Sapiens
tcttaaaatttttattatacatgctgtattcatggaaaaccaagatctttaaaggaactcaaattagatataaattatgttcagctctgagctggttataaatcatgtttagcatggaaacagttaaactgaagctttcttctccttataggttgccatcattttcttgatctctgcaatagctttccctggattcagacccttaggacaggtccttgtgcagttcatgatggtgtggcagcggtatagagagaatgggtcctgcagcttggccaggcgctcctctgtgaagtcatctctggagtcaatcatccagcgataggcctgcataagaactgcaggccccagatatttgtctccgttccaccagtagctggggcagctggtgctacagcaggcacagagaatgcactcgtagagcccgtccagtttctcacgctcttctatggactgcagatactgctgcttgccttcctgagattcatccttcttcttcaaataaggctcaatggatttgtactgtgcatagaagttgctcaaatcgggaacaagatcctttatcacatacatgtgtggaagagggtagatttttgagaccttattgaggttggtgtcaatccttcgggtgcaagctagagtgttgcctccattgatgttcattgcacaagagccacagatgccttctctgcatgatcttcggaaggtcaaagtagagtcaacttcattcttaatcttgattaaagcatccaataccatggggccacatttattaaggtcaaccttataagtctgcatatgaggtttgtctccagccttgtctgggtcccatcgatagatggcaaatttcttgatacggggagctgtggctgcagctgtctgggctcctcgggaggcctgcaggcaggctccgccaagggttgtggccggcaaccggcgcctcaaggagagtgcgaccaccgccgccatcttggctcctgacgtccagccccaccccttaacc

SEQ ID NO: 467129 - DNA, 1000 bp, Homo Sapiens; identical to SEQ ID NO: 158098

SEQ ID NO: 467130 - DNA, 1000 bp, Homo Sapiens; identical to SEQ ID NO: 337199

SEQ ID NO: 467131 - DNA, 1000 bp, Homo Sapiens; identical to SEQ ID NO: 158099

SEQ ID NO: 467132 - DNA, 1000 bp, Homo Sapiens
tctgacccagcacgcggacggaaccttattttaacccgagacacaaacgcgcccctcttggaccctggctccggcccgaccctcagggcggccggctgtgcgaggcctcggtcaccgggcgccgccgcgtcctgcggggtctccacctggctgggggctcccccccgtcttcatctcgaggacgccttagggacgttttggggcttaaagccactaaagacgtttctttcagatttttgttttccattttaaaaattgcatttggagctacttggaggtttgtgagtcggtttgttttcttcatttcagatattcgagtcatggaactttttcaaagaactgaagggggattcccggtgatttttccaccccatacagatgaagacatcaaagggccccgccgcagtgacgaagacaaaagcatgaacagatctgggtccaaagaggctcggcaggtgcggtgggcacgagggagcgacccccgggtggccgagggactgagggatgcgcgaccagccccggaggcagcgtccacctgaccccccagcccgagccgccgccgccgcctcccagcccggcctgcgcttgccccctggcggtggggccaggagccatcccagcctctaagcccccagaccctacctcggcccccggggctgccgcggaagggcccccaaagcctgctcatagccaagggacaggtatgtgccaaggcccccccagccctgaactccagtgtgtctgaggctccggcaggggccccctcacttgggcgcggagccctgggagtggagagagcggaccccacacctggggccggaccagcctggggtggcagaaagggagtccgggtctgtgggtttgatgagggcagagggaggggcatgcgtcctggtaagtcgggtgctgcggaggtgaggtggttccattttggaaactgaggaagcagagcttggaagacctggggggtggaggggaagggtctgcacgcacccaggag

SEQ ID NO: 467133 - DNA, 1000 bp, Homo Sapiens
ggggaaaattcttttaattacgcatttgaatattggtctttgggtcatttgagggacagtgactggtggcaggaaggtccacggtgacatgtggccttctagcttgattcttggccttctgcagcctctggtgccatccagaggactctctggaagcctcagagcagaggtccaagaggcctcatcaacagcaaccactggagactccagaagatgctacaggaatttcttccaattagagatgccacctgctttccaacaaagtggagaaaaccttccttcaatcaaaaaataaagaggtatttttatttctccacagtctggtcttcttgtgagtcagatgctccagtctctttggttcactggtatttcaagtaacaggtgagtcaaagcacagagactactgcagaaacatttgctcctggcttctgtggcttgtgttacaggaagagaagaggtgggacaggaaggggtggtaggttgagaatttgagattgtaccacaatcccaaactcaggaaacagggttggtccagagcgggtccaacaggctggtccagagctaatctaaggtaattccatgtctttgattcatgggtgtttatggaaaccttaaggactcgggtcaaatgcagcgtttgtaaaaactccatatgttcctaggtggctgtgaggattcaaggggcatttcccatcatctttttgtctgaaacgctttcttagcaaagccaggagcgtcccacccattatcagacctattgtagaagccaccgctccaccaaagtaagtcagggcttcctggatagtcaatggtcctgcttggcaggttggcacggtagttgaccagtggccattctcttggcatgctgtttgtgcagagccattaagtaactggccctctagacaatggaaagagcagattgatccataactgaagtttccccagaggttggagcagttcatcgctattggcttattaacatgtagttctgagcatttca

SEQ ID NO: 467134 - DNA, 893 bp, Homo Sapiens; identical to SEQ ID NO: 158100

SEQ ID NO: 467135 - DNA, 1000 bp, Homo Sapiens; identical to SEQ ID NO: 337201

SEQ ID NO: 467136 - DNA, 1000 bp, Homo Sapiens; identical to SEQ ID NO: 158101

SEQ ID NO: 467137 - DNA, 1000 bp, Homo Sapiens
tttttttttttcattgattaattgagtgattttagtcaagtgaatattgatacatggctgaaaaagcatgaaaataaaatgaacacgtacgggaattactattaacataagcgataacatcaaaacatctggtaaaatgcagttaaaaaaacaacacaaatgaaatggaatgtaaaacattttcacagtattcaaagcttttgtaagagacttaggatctaaaagaggagtactacaggaagaaactagaggaaacgggaatttcatccatgtcctgtgtatctgctggcaacaggtcagaacggccagtatgttattccctgcaggctgcctagggtgctctcctcaaacagatcacctgagcctcctgcatctatgaagttatgacacagcaaccagttactcagagtctgatgagaaaaacagattttaggtttgggaaatgggattactgtaatttacacatccaaatgcaaactggagctctgattgaattctaccctggggagaacttgatgctaacccacaggtaccaagagccaagtgttacacaggatattttaaaaataaaatgtttttggaatcctcacctcccatgctatcttctaagataactacaaatattcttcaaagatttaactgagttctgccaaggacctcccaggactctatccagaatgattattgtaaagctttacaaatcccaccttggccctagcgataattaggaaatcacaggcaaacctcctctctcggagaccaatgaccaggccaatcagtctgcacattggttttgttagatactttgtggagaaaaacaaaggctcgtgatagtgcagctctgtgcctacagagagcctcccttttggttctgaaattgctgatgtgacagagacaaagctgctatgggtctaaaaccttcaataaagtaactaatgacactcaaggtcctgggactctgagacagacggtggtaaaacccacagctgcgattcacatt

SEQ ID NO: 467138 - DNA, 1000 bp, Homo Sapiens; identical to SEQ ID NO: 158102

SEQ ID NO: 467139 - DNA, 1000 bp, Homo Sapiens; identical to SEQ ID NO: 337203

SEQ ID NO: 467140 - DNA, 1000 bp, Homo Sapiens
cgcggccgcgcgtcgacctttgatttaattaaaaagttaaaaaaattagaaaacccaaccctgcatgtattggttgtctagtacctatggcctcacagcagtagcaataacttattgggataaaagggagaagcagaggctgaggaatgaatcccgggaatcgagccacgggcggaccagaagggggtctatgccgaggctgggctgggcttgctctccagtctggggggagctctgggccttggggcagggaaatgggcaagctggggaaggcagggggtgtggctggaggcactgagaccctaactcctttcctaaggggggctaggatgacgcgtacaggggcggtggggagaactttcccaaatagcttagcctaatattgagacttccctcttcaaggtgaggccccaccaccgacagaggggagctggagctgacatcaccttctactctgaaacctccgcctcagggtgccctgagcccctccacctttcccttaccctctcctcccctgcctactttctgagaccctgaggtcttcacccagatgaagaagccctgctcctgagagaggaagcccaacatcccagggaccccaggacccctgggtcaaaaaggacagcctgggctccgtgcccatcccttaggccttgtgccagtaacaacattcgtgaaaacaccctccagtagggccgggtcagcctggaagttggggcggggccagagggcaagcaaggcacagctggcagggcaaggaggagtgcccttcagtggggctctgccgccccgtagaagaaagggtagtagagggagcaggggtaggagaacatgaatttgactgcaaacttcatctccttattcttcttgtcccagcggtagacggccatgagcagcagctgtccatccactttgcggcccatgaccaggaagctgcccgccaggctgtccagctgtgggcaggggcagcccgcgccattcttcatgtgcagcaccagcc

SEQ ID NO: 467141 - DNA, 1000 bp, Homo Sapiens; identical to SEQ ID NO: 158103

SEQ ID NO: 467142 - DNA, 1000 bp, Homo Sapiens; identical to SEQ ID NO: 158104

SEQ ID NO: 467143 - DNA, 1000 bp, Homo Sapiens; identical to SEQ ID NO: 158105

SEQ ID NO: 467144 - DNA, 1000 bp, Homo Sapiens
gccaatgcttgcattcatgtttattaagacgcagccaagtgaaatgtgtcagctcctcctcttgagtacagccttctttactggtgtataacaatgcccaagggctggatgaactacataatcaaaatcaaatgacagctttctacagacttggccaaaatagtacaacctcagacaccattttaaactgcaagaaatctgagcctttcatagtcttgctttttattgttgacattcacattttaatttttatgatcattgcagattcacattttaaaaacccaagaaacaaaaaagctcttattctaatttagcaaaaagcagaatcatcggtgtgaagacaatacactatctacatacagctgctttgtatccataattatctatgtaagaaacatgctgtcattcacagggactccatttacacgtgcacataagccatgctgaggcctaacaggtaatgtgggttttcgtctagcatcttctctttactctggatccttatcctcatctgaaaaatgggggacagacttctttgcaacaacattatccagtctctgtccttgtagatatggattgacactcctccgctttcgtctctctcctcccttcatcttctcgtaaaggagtttcttgttccacttgcccaagcctggatagtcatgttccggatcaaagagatgctggtgcaactggaactctcgactgaactctgcagtgtcaggggtgttttctagacatccatcatctgtttttccaacaggacagggatttggagggtctgggtacccctgatcctcactaaagtccttaggaatgttgtctccagtcaactctgccacgatgttggggatgttgccaaaaggacccaaatgctgaagtccttcatgagctccaccttcaatgctctgggggcccacaagattcatggcctggtgagctggatattccactcggggcctggcaatgcccaattgctccataacaccatgaagcagcc

SEQ ID NO: 467145 - DNA, 1000 bp, Homo Sapiens; identical to SEQ ID NO: 158106

SEQ ID NO: 467146 - DNA, 1000 bp, Homo Sapiens; identical to SEQ ID NO: 158107

SEQ ID NO: 467147 - DNA, 1000 bp, Homo Sapiens
tttttttttttttttttttttttttttttttttttttttttttttttttttttttttctgtcttcagcaatatttattggaaacagcgatgcttcctgtggtgagagtttatacattaagcagtaagatttgcctttcactccacatgatccactactgcaggtggcacatcggaagcagcacgttaaacctctgaaagagtctgtacagctagataaatagaactctggatacctaacaggactttcatgactgatacaaataaaaaaacacactgataagcttacacacagcactgtacacacaaaatgaagacgatggatagaaagggcagaagtaaaagtagcgactgaattgggaaagagttttgcatatgccagccatataccttaaactgctaagcacaaaaatcatctttatttggtcctcattgagggcagaatctgcacaaatgatgttcaaagaacacagggtaaaagtggaaaggaaaggtatttactgtttctcagtatatgaactagtggaaagttggttactagtgttttcttccttgtgtctctgtgccaaatggattcatgaaacatgtaattcacaaataaaactgaagtgaagatatttgttccccttccctgtgcccttcagaatagcctaaatacatacatagttctgtatagcaagaaatttaagcttggataccagatttcttcccaattcctcataatggagaatttcttttcagtccctctcacaataatgctgattaactgtcttactgaaaaataatttggaattacgactctggctttaatagcaaggagggaagaaaactggctatacgtcagaaatagccataagtgtgaggagctgagatgcctatttgcagagaatgctttgaacccacaattaacacttttctatggatgcattaagagacaaattcattcagatcaggagacaatttgctggtgagggaaggcttactttgacaattccatgactc

SEQ ID NO: 467148 - DNA, 1000 bp, Homo Sapiens; identical to SEQ ID NO: 337208

SEQ ID NO: 467149 - DNA, 1000 bp, Homo Sapiens; identical to SEQ ID NO: 337209

SEQ ID NO: 467150 - DNA, 1000 bp, Homo Sapiens; identical to SEQ ID NO: 337210

SEQ ID NO: 467151 - DNA, 1000 bp, Homo Sapiens; identical to SEQ ID NO: 337214

SEQ ID NO: 467152 - DNA, 1000 bp, Homo Sapiens; identical to SEQ ID NO: 337215

SEQ ID NO: 467153 - DNA, 1000 bp, Homo Sapiens; identical to SEQ ID NO: 337217

SEQ ID NO: 467154 - DNA, 1000 bp, Homo Sapiens; identical to SEQ ID NO: 337218

SEQ ID NO: 467155 - DNA, 1000 bp, Homo Sapiens
tacaggggaaaggcagctttatttttccttagggcaactgcagcgggtgggccaggccctcatgggaagtgactgccaatcagatgcagtgggccccaggcagaggaaggccgggagaaggggagccaggaccttctcaccccactgccccttccccttttctggggagcaccgcaggctcctcacccccacttcctgtgaggctgtggcttatggtgtccaacgcagttggtcttaggcatagaagccccagaggaacacggccactgccatcatgagcagggcattgaggttgaccacacgggcccagctcgggtcctcgctgatgtcctccagccgcctggctgctgccgctgcctcctcctgggtaaggggcggaggactgcccaccccacctctgctcattccacaaaaccagagcaggcactggcggaagaggcttggtgccggggcctggggctcattcatctccatggcactctctgggcacccattctgtacagggagtgaggagccttgctgctcatcagcatccaggtcctcccgttcctccttgctatgccggagactgaagaccaggcggtggaggtgctttctggggatgggcgcggtgcacagggagaccgtgagggtgaggaggccagagcagaagaacagcacaatggcgaagtagaggtagtgcacgccgcagaggaaagctgggcacgccgagggctgcacacagctgcccgagccgaaggagaactcgggaatcaggcgtgccaggcccatcagcaggcccccgatgagtccccagaaggcgccctgctcattaacgcgcggcacgaagagcgccagcacgaagacggcggacacgggcggtgccaggtagctagagactgcctggatgtaatcgaagagctgcccgccctgtgccgcctgcaccacgggaagccaggccaccgacactaccacgatgaacaccacccagagccgtcccaccagcagcagctcgcggtcg

SEQ ID NO: 467156 - DNA, 1000 bp, Homo Sapiens; identical to SEQ ID NO: 337219

SEQ ID NO: 467157 - DNA, 1000 bp, Homo Sapiens
ttttttttttttttttctcatggaaagtttcgtttatacggagacatgaaggttgagcattattacacaggtactcgcagagctatgctctgcacacagagccagggctggctgggcgagagggctctgattggagacaggtgccttggggagagttgaggaacgacttccttccaggcggggcctggggacttggtctgcctgtgtctttggtctagaatttggtctgagaatcttataagaagaggccttcctcaggccatgtccagaatgttgcaatttgcctaccaacccaaaatactgtggcctttcacccagggagcccccgctggggagatggaaactgaaatgaccacaaatgcccaggtagccactgcgtgccaagtcccctcttccccacgtgccacctgccctcaatcattgacagtggttagtttactaaagttatataagacaaaggaaaacaggtcacaatgctactccataaaatcagggaaaaaacagtaaaatcaaatcagacacaaacggcaaccataaatacatagaaaaacaggaacaagatagaatcgttgagagtttggaataggactgggtgttgtttggcagagtagatagctttggaaacagtgaaatatgtatgcctgccaaagatggggttcagaattgccccttgggagggggacaccaaaggcatactcctcctcccaaatttaagaagggggtttccagagttccaagagcccctgctgtgaaaattctgcggtctgcacccctcgaggcagtgactgcctttgtgcgtggtcacgtttcggtttcatttagactgagcttggaagtgactgttcaaatggcacagtttaggtccaaataggggctgggtgggggtgtgtctgccctggggatttgaaaggtatagtaccttctctcctggttcagagacaacctctgctccacataaggcccttgatcaagccagttctggggggccaggaccctgaca

SEQ ID NO: 467158 - DNA, 1000 bp, Homo Sapiens
tggcaatccatacacacttgttaactaaggcagggggttaatgggaagacactggcctgagcacaaggagataaggttttagtcatatctctggcccccaagaagggggtccccatgtgaacttgaaaaagtccctttgtctctttggtctccaggttcctcatccatgaagtcaggggtttgcgttagaagcaggatggcaaatggtgtcgcctggagcacattcggaggattgtgaggtgggaaagaatctgtgatcagttagcaatatcggccttgggcagaggaacggacagtgcagggaggcatgccgagtgtttgtgaagtctaggaatcatctcccaagccccttccattccaatgctccaggagttgatgaaacactgcaagaacagtgcggaactagggcaggagctggagatgccatgagagactcggaggaaactccagactgacggcatgcaaaggcttgcctctgtcgttaagcctaaggaaggatcccctaacggaacctccgatccaacacagtgtgttcagttgtcacttccaacagggtattgtcccatcaggctctccacattggacggcagtgtgcgttccaattatagctcctctccccgtgtacaaatgcagtacgctctaacaagaggcatccccacagtggaatcctcataactcgaggtgttgcaatcagatggcggcctccaaaaagacccccctttataaaaacgatggtgccttccacagggagtggcgtcccaacatggcacgtcccagtggtggtgttatcagcaaaggggaaggagctgctccagctagcacaagagaggagtctggcctccagctgggggtgcctgtggctctccagagttcccagcaggattgtggcaggagacagaggcagaggctgtccgctgagaatggagggtggccctgacctaggttcccggcttaggagccgcctcgctctggccacaccctacaaatgggtctccttctc

SEQ ID NO: 467159 - DNA, 1000 bp, Homo Sapiens; identical to SEQ ID NO: 337220

SEQ ID NO: 467160 - DNA, 1000 bp, Homo Sapiens; identical to SEQ ID NO: 337221

SEQ ID NO: 467161 - DNA, 1000 bp, Homo Sapiens; identical to SEQ ID NO: 158108

SEQ ID NO: 467162 - DNA, 1000 bp, Homo Sapiens
ttttttcaagcctcagcggataatgccaacagctgcttcatccggacaaagtgatctctttaatcacgtttttaagaagaaagtacagtgtgcactttgacaaaaatattgcagattatgaaacgtgacttttaacataaaaacaatttgggcagtacaataaatgcaaaacgtgctgagactcgtactgtgtttgtctacagtttttatgtaaatcaataccctcaccgcccagataaaacagtacaccccaccataaagctgagcaaaagctgaaagaaatctcttcacagacattttgtgagcatatacacaaaacacatgcttttaaaagtatcagactttgaagccaatttctagtttgctcattgacataactgttcccaacagtctcctctcagcattacatataaagtaataaaccccgacttttcatttataggtagttcaaatcaaattttgttacaaccaacaccaaagacctatcaaagatccacagtcacattggaactttggttggatcaagtgttgtttggacgaacgaaagcctttacaaagggctacggctctctgtactacagaaatttagattgtgacaatatttagattgtgaaaatatttagtcaatactctcataatgactagtgactagaatttaagaattacaaaaagaggaaagtatagaaaaaaagctaaagtcaaatttatttttattgcctttgtcattcaacaaacaaaaaaaatttaaactgataataattaagatttaagttttcctttatacatagtcatccaaattctgtatggatgaattactgaaagcggaatttggtctacctgcttaacaagaagcaatataaacattttcatgttttctccttcagttccagaaagttaaactctttataatagttataaacataggaaactgggaaaaattaggaaatttattctttaaggtcactttcaatttctgttgcttttcagatttcatactgta

SEQ ID NO: 467163 - DNA, 1000 bp, Homo Sapiens; identical to SEQ ID NO: 158109

SEQ ID NO: 467164 - DNA, 1000 bp, Homo Sapiens; identical to SEQ ID NO: 337226

SEQ ID NO: 467165 - DNA, 1000 bp, Homo Sapiens
ttttttttttttttttttttttttgttgtcacctaatatttgcgttaatacaatgatgttatttttatttggatagtatttgtatgattggaaatgagtgttaatctttatatgtattttaccagtccttgactaacatgttttcaagacatcttaccaatccatttcattgaattaatgagtaaggagactctctagaaatggttggtttgtaaagcaaggacattatctggaagaatcatccagagtttactgtatgacgagcatttcttgatagcaaggttcattttggtgtcaatcgttacagtcagtccatttcagtgggaacaacgaatttctccacagggtcttatttttctgtttttcacttcaccaaatggggtagatattttttcagaatgcagttattagaaccttgggattttcttctgtctccattgagtctcttgtttttttcccagatctgaaccatttcactttctgcatctgctctaaggtttctggaagagtcattcccaaactttcagggaaaaaaagggtgaggattccaatcaggacagtcagactacccatgacgatgtagggcagcattctgttgtaagcaccgaggtaaacaaagtagggggcaatgatgctgcccactctggaggccgtggatgtgacccccaccgccatgttcctgaccagggttgggtagagctcagcagtgaagacatacagcatggagaaagcagaggtgatcccaaattttcccagcatgaccagaccaatggataagaagtaataatccacaggtaccagttgaatgaagagaagcacacctcctccccagaacagtactgcagctatgatataacgcctgggcagggttcgcaatagcagccaggctgtaatgtaagctggaatttcaatcaaggcagagaggaaacagttcaggtaggcatctccatgtaaattaggagcatccagagacagagcaaagtaacccactgaggtcagc

SEQ ID NO: 467166 - DNA, 1000 bp, Homo Sapiens; identical to SEQ ID NO: 158110

SEQ ID NO: 467167 - DNA, 1000 bp, Homo Sapiens
ttattaagcgcctatttgtgcaaggacttccggagagggcagcccgcagctcaggcctcgcccacccccgctgcccccagctatggcgcaatttgcttttaaaaggctgctctggcaccaccccacccaggagggcccagctgcccaggagccgtcctgtgatgacctgcaccccagcccagctgctggcgactgtctccgctgctgcagcggctggggccccttgcccgccctcaccggcctgtccacgcccagcgctatgcgcagagggcacagccacacttggtgggcttttccacctcctcggcaaaagaggtcccatcgctgcactcaaaggtgaacttcctccgcttcagccgaaggccctggcagcagccctggcctgggcacgagccccggcactccacccatgacagggggcgcgtggtctggcagatggcatagcccctctggacctggtgaaagtcccggacagggtccccccggcactcggactcttgctcacacagctcgcccgaaaagccggggtcacacacacagtgtgcccccttggtgcctgaggcctggcagtggccatgcaggcactgcaggcctctgcagggctctgccagggccccggcctggttgcacagtgcccccgagtacccatcctggcactggcagctgtaggaaagagcgtcgaggggcacgcattgcccatggacacacttgtggccatggcaggggccgtcagcgggctggtcacagtgcaggcccacccagccagcctcgcagtggcacatgggccctggggtggcattgggctggcagatgccatgcaggcagtagagcttgcggcagggttcgcagcctggcaccacgcctggcttcatctgcgtcttggtgaagtcctgcagctcgttgttgatgtacaggtttcggatgcaaccgtggaagccggtgccgttgaggatctgccacaggcggaaggcagctgagttgacatccacgggcatccctc

SEQ ID NO: 467168 - DNA, 1000 bp, Homo Sapiens; identical to SEQ ID NO: 158111

SEQ ID NO: 467169 - DNA, 1000 bp, Homo Sapiens; identical to SEQ ID NO: 337228

SEQ ID NO: 467170 - DNA, 1000 bp, Homo Sapiens; identical to SEQ ID NO: 158112

SEQ ID NO: 467171 - DNA, 1000 bp, Homo Sapiens; identical to SEQ ID NO: 158113

SEQ ID NO: 467172 - DNA, 1000 bp, Homo Sapiens; identical to SEQ ID NO: 158114

SEQ ID NO: 467173 - DNA, 1000 bp, Homo Sapiens; identical to SEQ ID NO: 158115

SEQ ID NO: 467174 - DNA, 1000 bp, Homo Sapiens; identical to SEQ ID NO: 337231

SEQ ID NO: 467175 - DNA, 1000 bp, Homo Sapiens; identical to SEQ ID NO: 337234

SEQ ID NO: 467176 - DNA, 1000 bp, Homo Sapiens
ttttttttttttccacaattaaaaacagaactttattcctccaagtgttcaggtgtgcacttggggaacagccatgctccatgccacacagtcagtcggcaggcccgcctctgttcactgcggacctggtcagtcagcggccagcagatacctggcctctggctgcctctcttgcaggctgggggtgggctgtctctcgtcagcagggccacgggcttctgagaaagtgcttgtcctgctgctcacaccagccgcctccgcttccgggtgtgcctggcatgccgggttctgagcacgtccaggtcgtcagggtcattagaagtatccaggcaggaggaagcagagcatttaccagagtctggggctccctgaatggggcatgtggctgtcgtgcagcccggctgcccgtccctgtctgcaagttccagctcactcaggaggtcttcatcctcactctcagagcccaccctcgaaggtactgagagggtggtgcggacgccttggggggccagggtggccaggagcgcagggagggtgaaggctgccaggaaccgcgcccgcaacaggaggtaggccgggttgtcctggagctgcccccgcaccagccccagtgaggcttgcagtgctccggccggccgctcagcctcgccccccaccaccagggaggtggccttgtgctccagggccttcttgtggagtaggagaccggacagagctcgcaggctgcacagggctgggggctgatagggcagtctgctgcccagaagaggcacacgcaccccccgctggccccccagccactgctgtgtggctgcctcgccctcctgggacagcaggcccaggtccagggcccccttctcaggcccaggctggggtaggggcggcttctccaggtccagggcccccttctcaggcccaggctggcgcaggggcagcttctccaggcccagaggccccctgggctcctgtgtccctgagggggaccccggcgtcccccttg

SEQ ID NO: 467177 - DNA, 720 bp, Homo Sapiens; identical to SEQ ID NO: 158119

SEQ ID NO: 467178 - DNA, 1000 bp, Homo Sapiens; identical to SEQ ID NO: 337235

SEQ ID NO: 467179 - DNA, 1000 bp, Homo Sapiens; identical to SEQ ID NO: 158120

SEQ ID NO: 467180 - DNA, 462 bp, Homo Sapiens
ttttttttttttttttttcaagttgaaaaacaaacaaatctttattgtctagaaatatatataaaaaaaatcccccacaaaagatgctattctctcatttccccatcttcttcctcttcttccacacctctgatataaaggacattattacaccttattaaaacttcacccagatgtccagacaaagctccatctatgtattcttctgtatttgcaagctgcatgttcatgtagccatctacagataccagatagcccttgtactccattccccacttaagtttcaccatcactggctttcctgttagtccattgaggaaaggtttgggattgaggggtaaactcatgtaaaccacggccgaatgttgcaggctactctctgccgaccagccgccgcccgtccctcgtgactacagcaggtaccgcaggtcccgagccgcagtttcaagagaaatggccaga

SEQ ID NO: 467181 - DNA, 1000 bp, Homo Sapiens; identical to SEQ ID NO: 342034

SEQ ID NO: 467182 - DNA, 1000 bp, Homo Sapiens; identical to SEQ ID NO: 337237

SEQ ID NO: 467183 - DNA, 1000 bp, Homo Sapiens; identical to SEQ ID NO: 337238

SEQ ID NO: 467184 - DNA, 1000 bp, Homo Sapiens; identical to SEQ ID NO: 337239

SEQ ID NO: 467185 - DNA, 1000 bp, Homo Sapiens; identical to SEQ ID NO: 337240

SEQ ID NO: 467186 - DNA, 1000 bp, Homo Sapiens; identical to SEQ ID NO: 158122

SEQ ID NO: 467187 - DNA, 1000 bp, Homo Sapiens; identical to SEQ ID NO: 158123

SEQ ID NO: 467188 - DNA, 1000 bp, Homo Sapiens; identical to SEQ ID NO: 158124

SEQ ID NO: 467189 - DNA, 1000 bp, Homo Sapiens; identical to SEQ ID NO: 337242

SEQ ID NO: 467190 - DNA, 1000 bp, Homo Sapiens; identical to SEQ ID NO: 337243

SEQ ID NO: 467191 - DNA, 1000 bp, Homo Sapiens; identical to SEQ ID NO: 337245

SEQ ID NO: 467192 - DNA, 1000 bp, Homo Sapiens; identical to SEQ ID NO: 158126

SEQ ID NO: 467193 - DNA, 1000 bp, Homo Sapiens; identical to SEQ ID NO: 337247

SEQ ID NO: 467194 - DNA, 1000 bp, Homo Sapiens; identical to SEQ ID NO: 158127

SEQ ID NO: 467195 - DNA, 1000 bp, Homo Sapiens; identical to SEQ ID NO: 337249

SEQ ID NO: 467196 - DNA, 1000 bp, Homo Sapiens
ttttttttttttttttttttggaggagccctagatgtgattggggaactccagacacataaaaaggggcagcagaatagttccagagaattgggggatctcaaaaatgaggggacagatgtgacaacacagccatagatgggcgaagagatctgagatgataacagctcccagagggccccagacataactaggaaatctcagatctgacaagagggaaccttggacagggctcagggttgccagcagggcccccaccccagatgagattcagggtttacagacacacagcgatcttaaaaaggtcccaggcctcactggggaatcagatatcacaagaaaatcccagagaagctcttgggactctggaagcactgctaccctgcctccccgagtatagtggtccataggtcctgtcacccaaaacatgaggatcccagggagtctgtacatgacaaagaaatcccagagggaccccaggcacaagtggggaatcccagacaggcccgggctgggcttggggattatggcagggcagcactccccttaccccaaaaggtggggatgcgtaagtcctatcacctagagtgtggggacgccctttttcttccagggggatcctggctgggacgtgaggtcccccagcggctccgcaggtgggagcctcgggtgtgctcaggcccggcggactgcaggcagcagcgcgctgtcgaactggtaggtgagcttgcgcttgaccttgcggatctcgccggtcttggcgtagtttcggagggcgcgcgccagcttctggtaggtcatgcgcttgcggttccccttctgctggccccagcggcgcgccaggagttccttgtgcttggaggagaactggaagacgccggcgcctggctccacccaccacacgcactcacgcatgtccccgcgcgtcagtagccccagcaggaactggtacaggcgcagcttcttgcgagtccctgcctcggatcccttcccctcggggc

SEQ ID NO: 467197 - DNA, 1000 bp, Homo Sapiens; identical to SEQ ID NO: 337251

SEQ ID NO: 467198 - DNA, 619 bp, Homo Sapiens; identical to SEQ ID NO: 337252

SEQ ID NO: 467199 - DNA, 1000 bp, Homo Sapiens; identical to SEQ ID NO: 337253

SEQ ID NO: 467200 - DNA, 1000 bp, Homo Sapiens; identical to SEQ ID NO: 337254

SEQ ID NO: 467201 - DNA, 1000 bp, Homo Sapiens; identical to SEQ ID NO: 158129

SEQ ID NO: 467202 - DNA, 1000 bp, Homo Sapiens; identical to SEQ ID NO: 337256

SEQ ID NO: 467203 - DNA, 1000 bp, Homo Sapiens
gctataaatacacgtgtttggtgagtgaggggcaacagaaggcagagagatggcgctgtacacagctggtataggcttggaggtggaacgccagagagacagacacacagacagtccgcccagcagggcaggccgggcagcattctggggcttgtaacacttggttggtgggcgagagccagcaggaggtccggcccggggctggaggggccgaggcaccccgcaggctccaaggtccgaggtcctgggtggcatcagtggtggcgcctgggctcagctcacatcattcagggccttgcgggcaaactcgggcagcacaaaggcggcgcggtgcacgtcggagttgtagtacttcagctgcatctgcgccacctgctgctgtgtcagcggctgcaccggctcctggaagttcgtgctcgggttcttgctgcacagcatgaagccgatctggccgctggggtaggtggggatggtgcagtaggcataggccaccacggggaacagggactggcagaactgccgcatctccttgatgaggtccaggtgcagccactggcactcgccctggcagcagaggacaccatcttccttgagggctgtcttcatgagctggtaataggactccttgaagagactttcggcggggcccatggggtctgaggagtcagtgatgatcacgtcgaaggcatcctgattctgtttcatgaactcaaaaccgtcacccacatgtagggtcagcttcgagctagagtagccaatggccatgcctggcaggaacttcttggagacttggatgacatcctcgtcgatctcacactggaccacggactccacggaggggtgcttcaccacctcccgcaggacacctccatctccgcccccgatgatcagcacctttcgcgggttggggtggctgcagagaggcaggttggcgatcatctcctggtaggagaactcgtctctctccgtgcactggatgacaccgtccaacaccagcacg

SEQ ID NO: 467204 - DNA, 1000 bp, Homo Sapiens; identical to SEQ ID NO: 158130

SEQ ID NO: 467205 - DNA, 1000 bp, Homo Sapiens; identical to SEQ ID NO: 158131

SEQ ID NO: 467206 - DNA, 1000 bp, Homo Sapiens; identical to SEQ ID NO: 337260

SEQ ID NO: 467207 - DNA, 1000 bp, Homo Sapiens; identical to SEQ ID NO: 158133

SEQ ID NO: 467208 - DNA, 628 bp, Homo Sapiens
acgtaaaagagtattttaattcttgtccttggaagccataaagattatacatgacttggaaatgagactgtaccaaatgatggccaaagaagaatcatcctttctactccttctctttcgtctggtcactcagaaatataatattatcagctatgattgttgttgcttgtcgcctcacattatttttatccatgtattcaccatagtctattttcccttccaaataaattcgagacccctttttcacatattgatatgccacgtctctgaggcctggccggaatactgatattctgtgccatgttgtcttttgactgacatcacccagttggtaaacttcactatcccctgatcgccacatctcattagttgctagagaaaatattgtgactggattttttccttccacctgtctcaagacagggtcctgacccactcgcccaagtaagtgcacacgattcagggatctttcaagaaccaaactggtagttgtttcggactcatgtcttacaaactgacgaagtacctgtaatacaggtcttcgaaacatggcttctattttcttttcttacagtctaatctttaggcttttcctgacgatctaacccgagcagcccagccacgcagg

SEQ ID NO: 467209 - DNA, 1000 bp, Homo Sapiens; identical to SEQ ID NO: 158134

SEQ ID NO: 467210 - DNA, 1000 bp, Homo Sapiens
gcaattggcatttgtttttattagaaaaccccttagtaagcacttctctaacccagaatagacactgggtatcctccaagagtcccatagctttcatttcatcttccaccctcttctgagagggggaggcaggggataggggtggtgtcaggcagtctccaaaatgcccctcctagacccctgagagaattcacgttgccagcaataaaccaacagcacctcagtggggcatcagagggccctctaggctcaaggctattgccaaaggcattcctgtttatggcttcacgatggaaccaaggaggctctcgcagactcctagggctggtccttcactatggctgagagcagggcaggatccaggagaaagtggccaagggctaagagagaagagattgcatttaagataccctttggagtctggaaagcacctggatttcttgggagaggagcctggatttcttgggagaggagggctgtggaagccccaatcagttcttcttcgttttgggagtgtcatatttcctcttgctggagtaccacaatagcagggggatgccgatggagggaagggtcatgaccccaaaggctgcccagtccagaaaatgaggggagaatcgcctgtcaaactcccgctgagccaggattcctccctgtccaggtgcactggtagagccaatcacaacgggcccatcctcctgggccaggtaagtaattgttgccgaggtgaagttgaaataaccagccttgagagggcgcaggaccacagtgtgggagacattgctagcaggggcaatccggtcccatttgacattgagcattccagacacaatgccaaagtcttctggagggaaggaatcatcagatagttccacgtctaatgcagcacttgagccaacattgtagatgttgtactgcaaggtcaggtctcgtccctccacggcgtatctgttcagcagtgatttggaagccaaaagcctggctccttcctctgcttgag

SEQ ID NO: 467211 - DNA, 1000 bp, Homo Sapiens; identical to SEQ ID NO: 337264

SEQ ID NO: 467212 - DNA, 1000 bp, Homo Sapiens; identical to SEQ ID NO: 337265

SEQ ID NO: 467213 - DNA, 1000 bp, Homo Sapiens; identical to SEQ ID NO: 158135

SEQ ID NO: 467214 - DNA, 1000 bp, Homo Sapiens; identical to SEQ ID NO: 337267

SEQ ID NO: 467215 - DNA, 1000 bp, Homo Sapiens; identical to SEQ ID NO: 337268

SEQ ID NO: 467216 - DNA, 1000 bp, Homo Sapiens; identical to SEQ ID NO: 337269

SEQ ID NO: 467217 - DNA, 1000 bp, Homo Sapiens; identical to SEQ ID NO: 158136

SEQ ID NO: 467218 - DNA, 1000 bp, Homo Sapiens; identical to SEQ ID NO: 337271

SEQ ID NO: 467219 - DNA, 1000 bp, Homo Sapiens; identical to SEQ ID NO: 337272

SEQ ID NO: 467220 - DNA, 1000 bp, Homo Sapiens; identical to SEQ ID NO: 337273

SEQ ID NO: 467221 - DNA, 1000 bp, Homo Sapiens; identical to SEQ ID NO: 158137

SEQ ID NO: 467222 - DNA, 1000 bp, Homo Sapiens; identical to SEQ ID NO: 337275

SEQ ID NO: 467223 - DNA, 1000 bp, Homo Sapiens; identical to SEQ ID NO: 337277

SEQ ID NO: 467224 - DNA, 1000 bp, Homo Sapiens
taattttatttcttatttttattactaatttttgctctaaaatctgtcactgtagctatttcttatttttattaacaaacatttagacatccttttaggtagtacgtacattattcttgtagcattctgtaaacgggaaacattgcaaacatttaaaaaagtctgggatcccatgactcaactcactgcaacctttgcatccctgggctttgaaccctggttctctgaaccctagtcacttctttctttttgagacggtctcgctctgtcacccaggctggagtgcagtggcgcgatcttggctcattgcaacctctgcctcctgagttcaaacgattctcctacctcagcctcccgagtagctgggactataggcgtgcaccaccatgcccggctaatttttgtatttttagtagagatagggtttcatcatgttggccaggatggtctcgatctcctgaccccgtgatcctcccccacccccccgacctcccaaagtgctgggattacagacatgagccaatgcgcctggctaattttttttgttttttgtatttttagtagagatggggtttcaccgtgttagccaggatggtctcagtctcctgacctcgtgatccgcccgtctcggcctcccatagtgctgggattacaggcatgaaccaccgcgcctggccaaccgtggtaacttttaacaaggaagggatcagagatgcagaggtttgatatttaaggtttcaggataaaataataagtcttacacaatgaccccagtcaggtacatgtacaaggacaggagaatcaatgtcattctccatataagatccagagtgttttggacgttattcccatgggaacagctctcgaggaagatctgccatcttctcttggaacaatttatcaaagtcttcagcttgggccactgtgaagtgatttttccagtccccagatacaccttttctcagaagttgtgctttgtccactacataatcaacactca

SEQ ID NO: 467225 - DNA, 1000 bp, Homo Sapiens; identical to SEQ ID NO: 158138

SEQ ID NO: 467226 - DNA, 1000 bp, Homo Sapiens; identical to SEQ ID NO: 337279

SEQ ID NO: 467227 - DNA, 1000 bp, Homo Sapiens; identical to SEQ ID NO: 337280

SEQ ID NO: 467228 - DNA, 1000 bp, Homo Sapiens; identical to SEQ ID NO: 337281

SEQ ID NO: 467229 - DNA, 1000 bp, Homo Sapiens; identical to SEQ ID NO: 337282

SEQ ID NO: 467230 - DNA, 1000 bp, Homo Sapiens
tttttttttttttttgcatccaaaatattttaatagtaaagaataaagaatgaccctcaataatgcattcttagcattcaaaggctaactttacaaatttgaaaacttagtaaaaacagttttcatgaatacaagaaaaagtaacaacaatatataatcatctaattatctgaatacaatgacaggtttccagacaatatgtagttaacatttaggctaaaaatataaagaaacacaaatcattcatgcaagtattttttaagtctcaacttccagataaaatttggctctggcaaataagaacaaaatattaactataagtttcacgttattaggctccttaactacactgattctctgaaattaaacaaataacttttcagcttcttttagttttttttttctatccattttagcaattacagcccaacggtcctcccgcatttttcttatagctccaaacttcagtgtagatccaggggttgttagagatgaaggggccttttttggtgttttgacacaaagatgagaagctggtggattattgttcctatacagtgttttcaatgtctcttcttctgaaaccatgctcaaaagatcagtagtttctgaactatctgaattaatatcaaattcaaaggccatttttctcttttttttactttcttcaatgggtatattcaagttttctctttgctgtagttttggttttgttggtgtcttcactgtatatgcctttggcaatggtgtagataaagtatttttggcagatgtccacagatagtctcttttatctttggatatgccatgatcaactgatgtgaaatttcgagatacagtttgtgaaggaactgctttagaatccaatttccaataaatttcaggtgtttccaataaaaatgtttgtgttttcttgtcttttttttctttaagagtagctgtgttttcttttgcctctcttttgagtttttccttctcttctctttctatttcaagttgc

SEQ ID NO: 467231 - DNA, 1000 bp, Homo Sapiens
ttttttttttttttttttctttctttccttaactggctacatgcttagaaactgcactggtcaaacttgattttctttttaaagcctcaaaacatttttattgtcaggaaagcttttcagtggccagggatcagtctcatggccgtagaagcagccaaattcctctgcctttgccttcccttcaggagtcacatgctaaggcatccttgggcatttggaaaaggccgcttggggtgagagtgctctaggccactctgcaatgtccctgggcccgatgagtaacaaatgcaccccgggacccagagaagtggaaagacatgaaagggatttggaaacagatcgtaaaaataacctgtatgaaaatcacacagacaagaaaacaaacaaatccagctagccccttggatcctgccatccgtcttttctcccgggactgcctttgctttgtggagggtgagtcctgggacaggctttgggtgacaagttgtgggcatgttccatccaagcctggctctcccgactggcagagggaggtggctgacaatcaattcctctggatacattttcctgtgattgctcctgtgatcaaaggcagccaccgacaggtgcgggagcggttagttcaccacgtcatagtagtaattgcgcagccgcagttccactgctgcgaatccgggcctgttttccacatcgtatgtccagcacagattcatgagatcgtacatctctcttggacaccctgcagggcaccccatccgctctcctttctctaacatagcggtgacttcacttcctttcatccctcgatatggcttctgcccataggagaatgcttcccacatcaacactccaaagctccagacatcgcttttgctggagaacttgtagtagttgatgcattccggagcgtaccacttgacaggccactttccatgggtctgggccttgtagtagttttcatcagcacgcagtgctttggagagtccgaaatcactgatct

SEQ ID NO: 467232 - DNA, 1000 bp, Homo Sapiens
ttttttttttttttcagatataacttttcctttattgcacattaagctgtacaagagtcacaaaagagaggtacttcaatcatacttccagcattggctgaggttctcccagttggatcagtacaaaaaaaggggacaacgtcaggaaagaaataggtacaaaacacctgaatggcaatcctatactgtgacacagatgtcccccaggccacagagttgtccctaagcatgctgcctgagggcacataacagtcaggttatgctatctgcttgcatttggcagtgggagccctaaccaatttctcccccacctgaaagaccttgactgacaccaccctgtagcctgactgaattcaaatggcaactttgcatttgtggctcacaaatgacacatgaaaagcaccagatgtacacactgataacatgcagagaagcaataccaccgtcagcttatcgcttggacaaaaatatacgataaaataatgtattcctccattctgggaaatgttactttattctatcgtttcatcagattgggaggtatttaaggacctgattcttatgcaacccatctggaagtgcaaatatgcatatatgtatatatttacaacagatcaactaccattatcagctgagggagggattacagatgacaacattcacactcaatgcatttctctgtggcctcagaatttaccagcaatcaaaggagaaaccaaggcacaagcccctggatacgtaactcttgttacataccaccaacactagttccttctcagatctgggagttcagaacggtgacatgacagtatagaggtggaagggaatgtaaaaatagagccagcagcatttcttctcaaaggcaagctgctggcatgaacttccacggaccatggtgtttgttagaggcggctgcttggtgcccgttcccagcctggccgggagatggcaagatgaggcactgaagctgaggcctggtttaatgaactgcctcagcatc

SEQ ID NO: 467233 - DNA, 1000 bp, Homo Sapiens
gagctgctgaatatttatttggcctcaggagcagtgcagggatgggctgtgttggaagagagaggagagcagacgaggatggctgattgtcaaagcagggggcaggacccgggggcaggagaaaccaggctgccttcccttcccggggtccctggggcatctgggtgtgtccgcgagggtcgggggagtgtgctggaaagttgtcgtgattggcatcgttgggggtgagaagacaggaatggttcagatggttggggtggaaggtggggggagggtaaccgtcagaggaagcttaagggtggggctggcttggctttggccggtctcgggagtctggggtcaggggctagagtccaggcttggccgggggcttggggtgggagtcagggcgcaggcagcagcctcactcggtccgggggccgcagcgagtgccactgggcaatgggccgccgcgggttggccagcatgtccgcccagtgccgcaggccagccccgccggcggccgcccccacggccaccctcccgatggcctcgttcttgcccagcttgtcgtagtccagcacggtcagctccacctgcaccttctggacttggtcacagggcacctcgaagctgaaagcttcgttgtaataggggttcagagtgttcttcttgatggtggttttcttcttccgcacctttttgccgccctgcagcaggtggaccttgacgtatggatctgacagtcctcctacgtccatcttcttcaggtttttagcctccaggacgatgacggtgagcttcccggccgtggggacatagcggagggagaagcagatgtccccaagcttctcctgctcctcccgcggagccgcctgcagctcccgccaggcctgcactggccgccccaggtccacggagctcatagggacccgcacctccccgatggcgtcattgcgagagaagcggtcgaagtcgtacaccgccatgaccagcaccctgccccccagctccacgtagg

SEQ ID NO: 467234 - DNA, 1000 bp, Homo Sapiens; identical to SEQ ID NO: 158139

SEQ ID NO: 467235 - DNA, 1000 bp, Homo Sapiens; identical to SEQ ID NO: 246432

SEQ ID NO: 467236 - DNA, 1000 bp, Homo Sapiens; identical to SEQ ID NO: 337286

SEQ ID NO: 467237 - DNA, 1000 bp, Homo Sapiens; identical to SEQ ID NO: 337287

SEQ ID NO: 467238 - DNA, 1000 bp, Homo Sapiens; identical to SEQ ID NO: 158140

SEQ ID NO: 467239 - DNA, 1000 bp, Homo Sapiens; identical to SEQ ID NO: 337288

SEQ ID NO: 467240 - DNA, 1000 bp, Homo Sapiens; identical to SEQ ID NO: 337289

SEQ ID NO: 467241 - DNA, 1000 bp, Homo Sapiens
gcaccgtgatgtttcaagtatcacaaaccattacaaagcaatataatcaccctccttcccccttactgcttcaaactattgtggtaaaaataaataaataaagccctggcgtggtggctcacgcctgtaatgccagcactttgggaagctgaagcgggtggatcacctgaggtcaggagttcgagagcagcccggacaacatggcgaaaccccgtctctactaaaaatacgagttcgcgtggtggcgcgcgcctgtaatcccagcgcgccaccacgctgggggacggagtaagactcagtctcaaaggcatgacgaaaatagcaaaaatgctttagtgttatacctgttacgaatttaatggaaattacaagtaggagcccattacaatctctagccttaaaatgctgaaaacatacacagtgtgacaataagtaaacttcgagacccaataagggggaaagtccaacgtggaaagtatttggtaggagtgaagaacagagtgacaactgcttagtcccactggatatttcgctcctcttcaggaagaatactccagtttggggaggccatatcccgggccagccagttaaaatcgtcaacatcgttccagttatttttgctcctatctaaaccagagctctcgaagtccttgtcgatctccgggtagctccaggtgtaaggggcgaactggatcccactgcagtcctccacgatggccctgctggtcacctgcaggaagatgcgggtgtctttcgtactgtgtatgcggagctgttggcaggccactgccagcacgcagtcactgcagtcctccaggaaaacagaggtagacaccggaccgcagagcagcttgcagctgtgggccttggttagccgcagggtgttgggatttccatacagtctgaccgtgcagttgctcagttcggtcaaaagaacgtcgcgctggtgcaactcgctggctctcttctccaagacttgggactccaggttggagaaacc

SEQ ID NO: 467242 - DNA, 1000 bp, Homo Sapiens; identical to SEQ ID NO: 337290

SEQ ID NO: 467243 - DNA, 1000 bp, Homo Sapiens; identical to SEQ ID NO: 158141

SEQ ID NO: 467244 - DNA, 1000 bp, Homo Sapiens; identical to SEQ ID NO: 337291

SEQ ID NO: 467245 - DNA, 1000 bp, Homo Sapiens; identical to SEQ ID NO: 337294

SEQ ID NO: 467246 - DNA, 1000 bp, Homo Sapiens
tgtgtttcaacaaactttatttatgaacactaaatattcatgttaattttcaagtatcataaaagtctttaaaaaaaaacatttaaaattataaacacaattcctagctcacaggccataaaaagcaggcagcaggctggatttgatccacaggccatagttggctgtctcttaaacaggcttttatacgttatgcaaagtgtttcaaattccagagactttggagacttttcgttttttagatttctcattttaaaacacacataatacaagttttctttctggatcaatatactcacgagagaaaataattcagaaaaaaataaaattccttacttaaaaaaagggaaaagctatagaacaaatgtttcgtcttaaaatatatttaggaaatgtaaaattaaagattaaaaattttattctatgcaacataaaataatatgcataaatctggcacataatttctttgtttttactttagaaaaaagacagtaagaaaaaagtttataaatttctcagtcccttttatacaaagttgcaactaaaaccagcaatcacttatatgtacaaccatcaactctgaatacaatgtgaattatacctaggaactgtaatttacctagatgagttctgcctgctttatgaaaaacacacacttatatcacagaacaccgtggcttctacaatttgtaacaattttgaaaacgaaactcctgcctccataatataaggaaacaagagtactctttccatagtcatcatcctgtataaaaaaaacttcatagtctgatttacctttgtcaaaggtaaaatgattcacatttgcttggattactctgatcctcagtagttcctaaacacaaaataaagtttgcatgaacctttatctgggttttccaaagcaagtattatgctggcagaagtccatgagctgaataaaaagatactaaatataaaaggtttaccaactttatcctttcttaattttacgatagcttca

SEQ ID NO: 467247 - DNA, 1000 bp, Homo Sapiens; identical to SEQ ID NO: 337295

SEQ ID NO: 467248 - DNA, 1000 bp, Homo Sapiens; identical to SEQ ID NO: 337296

SEQ ID NO: 467249 - DNA, 1000 bp, Homo Sapiens; identical to SEQ ID NO: 158144

SEQ ID NO: 467250 - DNA, 1000 bp, Homo Sapiens; identical to SEQ ID NO: 337298

SEQ ID NO: 467251 - DNA, 1000 bp, Homo Sapiens; identical to SEQ ID NO: 337299

SEQ ID NO: 467252 - DNA, 1000 bp, Homo Sapiens
ttttttttttttttttttttttttttttttttttacatgactgacccacaaacaaataactttaatttttttttttttttttttttgagcaggagctgggcctttgagggcccctgctccaaccccaagctgcatttatgatataacccatcacagctggattttaaaaatacacaaaaaaatatataatatacattataaaacctaggtggggtttggaggtggcctgagcgatatgcaaacagtgaggaccttcaggaagctcgggcagggtcgggatgaggaagggaaggggcacagtacttcatatgaaactcataaatacccacaggtggctgctggacaggcccagctggctctgggggcctgggtgttaagaagggacagcaggtgaagggttaaccttcagtcccagaactgggtctgggagctgctactctaggcaggtagattgaggtggggaagaacctaagggagcagtgcccaccaagggtttgtcagattcaagcctcaggcaagagaaaaatcaaaagccttctgctactctctccctctgggcctctggtctgcccagaggctgggactccttcctctaccttgctctcaatctggagggtgctggggggtgccccatcttcctggggcccctggctggcttgtgggctaatgaggtgctaatggggtctagtagctgctgtgctcccttcttcatgcccagtctgaaacaggtgctcccctaacccagcgcccctcgatgaggctccactccacactgcagagcctctcccctaccctgcggccagcccccgccccagggaggtagtataaacctgggctctggggacaagcagccctggatgagaactccagctctgcccacctctcctgtgggtccctcaacttcctggagcctgggcacttcatctgaaacccagagacctacgctcgctgtgcggagtctgaggaccacacaagccatgcaaggagtctgggcaccagg

SEQ ID NO: 467253 - DNA, 1000 bp, Homo Sapiens; identical to SEQ ID NO: 337300

SEQ ID NO: 467254 - DNA, 1000 bp, Homo Sapiens; identical to SEQ ID NO: 337302

SEQ ID NO: 467255 - DNA, 1000 bp, Homo Sapiens; identical to SEQ ID NO: 337304

SEQ ID NO: 467256 - DNA, 1000 bp, Homo Sapiens
ttttttttttttttttttttttttttttttttcagattctaacaagaatacttttattatacacgtatcatacacacaacaattatttggggaacatttacaggcagagagttcaattccaaatctccatttcacccacacacactgtactgcacactcaccttagggttcagcccaacaggaacgagacaaagttattgctttctgaacagagagtttcaattaaatagaatcttccaagccaagaacagagcccagcatcctcttaattcttaataccctgtatatatatgaataaaaccttatgatgtgttatagattaccccatcaccattaaaagttaatattaaaattggatcccatgtctcaaaaaagtcgtaagaagtgcaccagtatttacagaccccattaaattacgcataaataaaatctgtacactcaacgcactgtttcttaaaatacagaacctccacggggacttgggggtgacaagcagcaacaaattgcttcgtgcctacccttttcaagtttactcgaaacatctgaaataaatatgcaaataaagcttcagtaccttaaaggaacatgtcatttcaaagagtctcccatttgaagagttaactttcaaagttaaaaaaaaaaaaaaaaaaaaaggagaaaaaaatcaatcagcaggcttcgtttctacaagtttcctaaaaccagaaggcccccgtttgaacacggggtttagagtgtgtcagataccacttattaactagttgctaagcagatagaacctttgcctcctaccagaggacttgatctctgaagaagctagatacacacttttctttttttcaaggtaaatatttagcggacacaaaaaccaaccattaccttaacactgaaaaaaaaggtattgttgatctgttgatctagggcacatcaatttgacatttcaatggctaagtgtgtgggtctgttggcccagggaatgtatttaaaagattctaaaact

SEQ ID NO: 467257 - DNA, 1000 bp, Homo Sapiens; identical to SEQ ID NO: 337305

SEQ ID NO: 467258 - DNA, 1000 bp, Homo Sapiens; identical to SEQ ID NO: 158146

SEQ ID NO: 467259 - DNA, 508 bp, Homo Sapiens
ttttttttttttttttttaatatcgatctcttttaatttttaggccaattttgagtagtcaaagtcagagcagtcaatctgtgttgtgagccgaggcacagctgcagaagcgtgtctgaggtgtccggtggaggtggcagccgagctctgggactaatcaccgtgctggggacggcaccgcgtcaggatgcaggcagatccctgcagaagtgtctaaaattcacactcctcttctggagggacgtcgatggtattaggatagaagcaccaggggaccccacgaacggtgtcgtcgaaacagcagcccttatttgcacactgggagggcgtgacaccaggaaaaccacaattctgtctttcacggggggccactgtacacgtctctgtctgggcctcggccagggtgccgagggccagcatggacaccaggaccagggcgcagatcaccttgttctccatggtggccattgcctcctctctgctccaaaggcgaccccgagtcagggat

SEQ ID NO: 467260 - DNA, 685 bp, Homo Sapiens
ttttttttttttttttttcaggcacgaagaactgtcctcgggtggagcatgggacctttattcgttaagacatcaggctccagatatgaactttcagcagaagcgcttgccgggagcaaagggacagaaaagctgagatgaacagtgcctggcagcaatcacagccgggcaagggtgctccgagcctcgcatcccccggccgggggcagctggaggtgcctcagaaggtgcattctgcttcctgcaggggcttgaaacaccaaggcactccagggatcctggagtcaaagcagcagccccggttgttgcactccttgggggtgacatgggggtagccgcagtccaccctgtccttggctggcacggcacactggtttgcagacaggcccacgtactcctcagcagagctggaggacagcaaggccaggaccagccccagcatgcagagcgctctggcagccatgaccaccgtgggctccgggacgcagctcaggactcgcttcatggtccaggaggcctcatttatgcaccgttgtttgcacagctgctctggattgtttgcttggggaaggctctccctcctggctgtggctgctcctgttctctcctgcatgcctttgtcaagctcccagacagtttttctctcccaaaggggagaggtcagttcagcccccactgttttggc

SEQ ID NO: 467261 - DNA, 1000 bp, Homo Sapiens; identical to SEQ ID NO: 337306

SEQ ID NO: 467262 - DNA, 1000 bp, Homo Sapiens; identical to SEQ ID NO: 158147

SEQ ID NO: 467263 - DNA, 1000 bp, Homo Sapiens; identical to SEQ ID NO: 337308

SEQ ID NO: 467264 - DNA, 1000 bp, Homo Sapiens
tttttttttttttttttttttttttttttttttaggaaaaaaaggttcattccttcatccttccaaataaggtacagtacaactcaataacaatgcacattactgaaaaacacaattgcgtcttatattgctcactactctttaagtataattcagatattaaggaaaataactgctaatcacattaacacattacagaaatcaaaattaacttaccacacaaaataaattaaaacattaaatattaaccttttcagtgcaacatatacagacatcagagtaaggagttctaaaaaaaagcatcaggtttattataataaagataatgaaaagttgaccattttagtaaattattaagactaagaagaggagttgctttttcagtactctctctctctctgtgtgaaccactagatctttcagaaagcctggtaaatcaatggctagagagaacaggtcttatgttagaacatttaaaaatatacatgtttgtcttacttctgcaatgtgttcttggttttgggcatttgagtcattcctccttctgtgactgggcaggttggaagagatcaaagcccagaaccaactagagggcaggggtctcctgagcagtgttagagcctcattagtccatcccggccaaattgactgaaaaagcaactggtgacccatgtgccctcgaaaacctggcttgaagataacaggcagttttctgtacctgcaaaacacaatcccttgagaagctccagaagcacaaattctcctcccttaccagtgtgggtgggtgagtggcaatcccatctttttctcctttctcagggaaaagaactctagggccattctgcccatctctcctgcggggacacaatggccagcccatccctggcttggttccacgtgtgtccagccggggccctgtcttccagatcagggttggctgctgtctatctttccatgtagaagaaaacatttcctgtcaggatgcttaaaaaaagtcaca

SEQ ID NO: 467265 - DNA, 1000 bp, Homo Sapiens
tttaaaaaaatttgcttcttgtctctctcacttacaaagtaggtgaaatgtagaataaggccttcaactttttttgtgtcagatgccagttttaacaaacagaacacaaacttccaaagtgtctgaactagtaccgccttttcaaaaattttttaacactgatgaaccaaggctctcttatgttttcttgttacaagcatcatcgttgtcgtcgtcatcatcattatcatcatcattgtcattttggtcttgccacttttccaagaattttagctgcatttgcaagactttacaatcatattagaaagctgttcaatcttgggtgttttgccaatgtagtagagaatggttagaggttctaaatcttgggacacgcagcaaggagaagcagatgcttctggatttatggtattatataagctcaggaccctgctgtgctgagtgtctgaactccataaatacgggcatgctccagcacagaagttggcattgtaccctttgggttcgtgtatccatttccaccctagatccctcttgaaatcaatgtaaagtggacgtaggcagcaattatcctgcacatttctaaagcaataggccgcatccaaagcacgcttcttccgccggttggtctgttgtgactcaagtctgtaggagggcaataacattagcaggagatgtggggtcttcccactgttttttttcctagtggactttatagttttctgatcaccactggtatatgtggaggtgccatcaatacctgcaaatcttgcttctagttcttcacttttatttgggatgatgtaattattagatggtacaaaagtgcagcagggacagtgtaagcttattttaaatcccaggttcctgtctttatggtgaagccattcatgaacagcatcagttacatcgaaggagagccattcgccttctgctcttgttttcacaactttgctgtcgatgtagcgctgggttggagatgttaaatctttggacttga

SEQ ID NO: 467266 - DNA, 1000 bp, Homo Sapiens
caccttagaataaggcttttactgttctagaaacaatattccagaagatgaaatcatccaggatgccccaaaaatatttatttatacaaagattttgagagtaatattcatacttgtctttatacctcagtctatgcgtctggggccaagtcactgtgtggcacatgtgcagcttccccgaatgcctcacatgttgtagcacctgcttccaggaacaccaaatgaacacagggtcttggaggggaagtgggggaagacccataatgccccaaggctgcatggaaccacaatccagaaatgtgcatcctgacctggaaggcgtctaaccaagtgtccaaggggaaatatgatcgagggagaggtgagaggagggacccagagggcagacaggagagggttgatttccaccctttcttctgcgttcagcatatccaaaaggcccaatacagttgatgggccaggaactgcatgacctggattttctccctgtagtgacccacgatgttaattgatgtagaggacagtttgcaaaagtaatagatttgcccttaatcccagacagtatgagatacaattctgggactttgtcttcgtaacctgtctttaaaaaaaaaaatgcttgccttgtataacataatccagattccctagagcagatgtggtacagcaatgagcaaatccaacctcagatctgaagtgtcttccagtctggccctgacccagccattctctgcccttccttctccctttagggtagcccaaatcccattgccacacaacatctcaacttaccatccctttcctctatccccatcccctctgtctgcgtcacagaaagtctgtgtgttctgaagagttcagccttcctctaaccaaacccacactttctttaccaccgtgattctcagagccagcaagaaagaaatgttccaaaaggaaacctccatctcagccatttgcccggagccgaaggttgtgggctccaggcctctcagtgagg

SEQ ID NO: 467267 - DNA, 1000 bp, Homo Sapiens; identical to SEQ ID NO: 246433

SEQ ID NO: 467268 - DNA, 1000 bp, Homo Sapiens
tttgtgtgatcgcacttatttaacatttattttgagttagggtgtgagtgctggggcaggtgactaaccatcccctgccctctgtggtggcctgagagagaagcaggaatgccccgtgcaggttggggatcagcaaacagtctagaccagcttctctcctgtatcccgtttggagagtccctgggtcaggggccagtccatcctgcagcattgaagggcgtgaggaatgagcagggctgtggggctcacagagcaggcagctctggggagaagcggccagggaatgtgcaaaagtgatcaagtcataggacagggtggacccagccccaacctgggggagaggagagggggatgtgctggagcccggagtccatgtctggcagccttgggagatggagagggtttcccaggccggacagcatgggcggggggttcattccatggtgagctctccctgctccgtgttgtccaagtttgtacgggaggccaccagcgcccttcattcggctacatcgatggacaacatggccttgattgcagggaacttgttgcaggagaagtcggcgagcagttgcttggtgccactccgggagggcaggatatcaaaacggacccgggaccgctccttgggccctagggtcggcacgtcgatcttcaggttacccaacagcaggccgcttccctccaccatcagcacgcagtccctcaccggctcatccagtggattggagaagagcatctgcacgttcacaggcttccgcacacgagcctcgttcagcacctccagggtcaaggtggggttgtccaggatgatgtcccgctccaccaccacctcagactcatctgggaccttgcacaccgctgtgatccggatcatgttgtctgacttcaggtacttctcatactgagcgtacgagatctttatgggatgttctgcctcttcctcagggtccagggacattgtggcagagtccttccacacttcatgtacaagcgtgcc

SEQ ID NO: 467269 - DNA, 1000 bp, Homo Sapiens; identical to SEQ ID NO: 158149

SEQ ID NO: 467270 - DNA, 1000 bp, Homo Sapiens; identical to SEQ ID NO: 337311

SEQ ID NO: 467271 - DNA, 1000 bp, Homo Sapiens
tttttttttttttttaaaaatgatctcttctcctttattgccacattcacataaaacgttttgatatatttgggttggtaaaagctaaagaaaattgaagttaaaatatatatggttttagtgttccgaaaagcagttacagattgcttccttggtttaattatcgaagcggtcgaaattctgggtttgaaactcttggaagtcctcagggatggtgtcattgcagcgatacttgaggttggaccagatgatgttttcttgagagaagcagaaaacgccaagtcggcctccacgcattgtggtgtctatggtgacgccagagtcagccaccaactcagagccttcataaaatcgtaccctgatgtagcccacctggggcctgtgctgtaggaaccagcggtaggacaccttgtccttccagcccacattcctggagtccttccacagcagcctgacctggtcactggtgtcccccgtgtgccacagggagttccggagatgctcccctggacctgtcttagacttcacagccttgagctgaatgccaggttctgcaactgctcggaatggggtggcttgccaatatgtctgctccgtctgcttccacatgaccacgtagaagctggagctatcttggtagccaaagataaagcctgcatagtcatcatctgtctgggtattcacatggaaggtcccttcgaagtcaactccattaaaagctgtgtaccccactgccaggccaggatcactgttcatggtctgtacaatctccatgccctggttcaggaccacccagttgggatcgatctgggcatccccttcaggatccaggaccacggtctggtaagccctgaagtcggtcagggtgacctctgcgttctctgggcagacgtcgatccgatcgatgacctggtcctggtcaaagtcagactcacagatgtctcccactccgtcgctgttgctatcctcctgggctgggttggggaccagccggcagttg

SEQ ID NO: 467272 - DNA, 1000 bp, Homo Sapiens; identical to SEQ ID NO: 158150

SEQ ID NO: 467273 - DNA, 1000 bp, Homo Sapiens; identical to SEQ ID NO: 337313

SEQ ID NO: 467274 - DNA, 1000 bp, Homo Sapiens; identical to SEQ ID NO: 337315

SEQ ID NO: 467275 - DNA, 1000 bp, Homo Sapiens; identical to SEQ ID NO: 337316

SEQ ID NO: 467276 - DNA, 1000 bp, Homo Sapiens
ttttttttttttttttttgcggatgtgatagatacattttatttccaccgaggtcccctgcccatcggcccccacatgcagcaggggaaggtgtgaagccgttggccagagagcagatgggatgtacggttcctaggcagggctgggaggcggctgctaggatgtctgtcctggctgctgattcccctgggagtctggacttcgggtacaggaaggggggtcatgtctcagtagaccacctcatacacggtggccttcttgtcccccgagcctgtcacgatgtatttgttatttctggagatgtcacaactcaggactgaggacgactccttggactggaaaatgctggccccgtacggcgtcctccaggcgttgagcaggttgtccttcccggtgctcacaaaccaccgtccgcaggaggcaaacttcagggacagcacgcagctctcgtggaggtgcagctggtatttctccggcttgcggacgtgcaggatctccacgttgctactctccattccgaccgccagccagtcctggttagggcagtggcccagggagaaaatctgggagctgaagtcatgctgctgcagctggcggccctcccgcaggtcccagcagcgcaccgtgttgtccaggccccctgtccagagccgagtgccgtaatcggaaatatcaatgcagctggcgccgtccgtgtggccctggaactgcctgaccatagtctgattctgcaggtcccagaccacaatgttgccatcgctgcagcaggagaagcaaaccttggcgtcggggctgacggccagggcgtagcaggctggggctgaggaagtcagctcggccttgatacggggggtgggcgccgccaggtcccaaatggacaaggtgctggcctcaccgcccacgatcagactccggccatccggcagcaacttgcaggaacgaatgtagttgtctcggttcaggcagtcgagctgggccacgggcgtcttggccccaggct

SEQ ID NO: 467277 - DNA, 1000 bp, Homo Sapiens; identical to SEQ ID NO: 158152

SEQ ID NO: 467278 - DNA, 1000 bp, Homo Sapiens
ttttttttttttttttttatgtgtcagaactgtttaaatcaaagttatatcatttcattaatttttaataccacatataaatggtgaactgcgacccgaaggtatatatttttacctacatcatacactcacaattgtgtttacatctatgctgatgcaaaataaagtcattgttggaacttccaaaagcagcaatatcaacaggaggaatatttttcacttgatgtgtaatctatttctttgcttgctctgtcagcttaatattaatggctgcccttaagttagcccaaaaaaggccacgtttgctcttttccttgggccattccaaataagtcctcctggccatgagacttttgagcttgtgataactgctaggaatggagtactgcggaatgggttccagcaagatcaggattaagctattagatccttcatgaaagagattgtgatgggcaaagtagagttcataatggcaccattcactctggacaaagttgggagacaaaacaaagatggacttgtaactcttctcaatgcaggtgatgatattttccacaatgctcttgccaggaacaaagtttctctcatgaaggcaaatctgcataccttctttctctaggtttggcaataattcattcttcacccagaaagaatcgtgcccactatatgaaataaatgcatgaaactggagatttctttggagttcttctaagggtatgttcctggccctgcgccgggtctgggtccactggcacaccatcctgagataccagggcagatccaagtagctgcagagggaggtcacagtcacagccaacaccagcatggtggcaacgatggtgacgatcagcagagttatgttgcaggataattcagacatgtgaaagtcctttagtagggttcctctataactttccgggtagtcacacttataagaatcaggccagccctctaacacttcacttgatacttggtctatatttttgacaaattctcctag

SEQ ID NO: 467279 - DNA, 1000 bp, Homo Sapiens; identical to SEQ ID NO: 337320

SEQ ID NO: 467280 - DNA, 1000 bp, Homo Sapiens; identical to SEQ ID NO: 337321

SEQ ID NO: 467281 - DNA, 1000 bp, Homo Sapiens; identical to SEQ ID NO: 337322

SEQ ID NO: 467282 - DNA, 1000 bp, Homo Sapiens
ttttttttttttttcatttaaattcaatatatttttattctttgtaaatacaatgagtacaaccttttaacttcacaaatcagttaattcactttgtacaagaaaagttttactcatcctatgatagtccaagtgctgaattttttttcctcagtgctagtacctaataaatcaaaatgtgaaaagtacagcagctatttaaaaatgtttgtttctacatttccataagtatagagtcataccaaaggagcagcttaaagtgtaggacggtgtgtgtgtgtgtgtgtgtgtgtgtgtgtgtgtgtgtgtgtgtgtgtgtgttcattcaaggctttactagaaaccagttttcggaaaggcattgaagagtctcaggctgttagcaatggatcagtcaagaacccttttagcattcattcatctccttgaagttccttctgcaattacgtccatattcgtttcctgtctggtgtgacttgctgcaccacgagtttggacccccactgcctttggtttcagcactatgttaacgggacagcaatctacctcactcaatcactcatctccactttatttggttttgctgtttttattcatcctcccttgacttatgttcttttagtaaagctcttctctttttgacatgttatccaacctgaagtcctggtgagaatctcattttgtccatcaattcctttgacaaggttgcctggcctatggtattaaaaaagaagaagaaagaacaaaagaaagagaaagaaaagaaaaaagaagatagagaaaaagcaaatcacatggcataagctacttttcacttattaactcagttctgaaggccacttaataatgtattacaatagaggggaaacttttgataacacttttaatttaaaacctaccattatttttaaaataaatgctccaacataacgtagttttgaaggccgcagtacgatgttatacacagagctatatttggttaccaaactttgtatgctaa

SEQ ID NO: 467283 - DNA, 1000 bp, Homo Sapiens; identical to SEQ ID NO: 337323

SEQ ID NO: 467284 - DNA, 1000 bp, Homo Sapiens; identical to SEQ ID NO: 158153

SEQ ID NO: 467285 - DNA, 1000 bp, Homo Sapiens; identical to SEQ ID NO: 158154

SEQ ID NO: 467286 - DNA, 1000 bp, Homo Sapiens; identical to SEQ ID NO: 337326

SEQ ID NO: 467287 - DNA, 686 bp, Homo Sapiens; identical to SEQ ID NO: 337328

SEQ ID NO: 467288 - DNA, 1000 bp, Homo Sapiens; identical to SEQ ID NO: 337329

SEQ ID NO: 467289 - DNA, 1000 bp, Homo Sapiens; identical to SEQ ID NO: 337330

SEQ ID NO: 467290 - DNA, 1000 bp, Homo Sapiens; identical to SEQ ID NO: 337331

SEQ ID NO: 467291 - DNA, 1000 bp, Homo Sapiens
tggagaccaagttcagaatttattaagcagcaaaggagggtggaaggggataggtaaaggatgaagccagtgccagagtgggtggtgggcatgatgggggctctccctaggctgctcccagcctggctgtgcaatgttggcaatttctgctcctcctgcctgctcccctccccatagagagaatggaaaggagaggagagaagagagctgaggtggccacgctggcgtggggctcagagggaggtgatgtcattgagtgcgttgtccagttcctcgctaatggccttgtacttcatcttctgggcatagacttcatcttctaggtcatcgatggttttctccaactttgccacagacctctcggcaaactctgctcgggtctcagcctccttcagcttctcctccaacagtttgatctcctcttcatatttatcttctttggtggaatacttgtccgcctgggcctccagggatttcaagttgttggtaacaattttcagctcctcctctaggtccccacatttactctcggccacctcagccctctcctccgagcgctccagctctccttccaggatcaccagcttcctggccacctcttcatatttgcggtctgaatcctcagcgatgtgcttggcctccttcagctgcatctcctgcagttccatcttctcctcatccttcatggcccggttttcgatgaccttcattcctctctcgctctcatcagccgccttctcggcctcctccagcttctgcagggctgtagccaggcgctcctgggcccggtccagctcctcctcaaccagctgaatgcggcggttcagggaggccacatctgcctcagcatcagtggccttcttctcggcctgctccagtttctcctgggcctccttcacggattcagaatacttttccacctcatcctctgtccccttcagcttcttctggagggcctgctgctcctcctccagctgcttgcagcggtcctcagcttgct

SEQ ID NO: 467292 - DNA, 1000 bp, Homo Sapiens
aagtcctagataagtaaatcctcaatttgctgttccctgaagtatggaaatgaagttgggccagtttttaatctctgctgccagagaggccctttctgctaatagataaaaactcttttgctcaacttagtaatgacttgtggtcttttggatatggctgacctgaattggactgaactccaccatattcctgctgagtgggtcattactggaatgagacatttgctcttcagagaacaactttatttttattttttcttgagatggagtctcactctgtcgaccaggctggagcgctgtggtgcgatatcggctcactgcagtctccacttcctgggttcaagcgatcctcctgcctcagcctcccgagtagctgggactacaggcaggcgtcaccataatttttgtatttttagtagagacatggtttcgccatgttggctgggctggtctcgaactcctgacctcaagtgatctgtcctggcctcccaaagtgttgggattacaggcgaaagcaaacgctcccggccagggaacaactttagaatgaaggaaatatgcaaaagaacatcacatcaaggatcaattaattaccatctattaattactatatgtgggtaattatgactatttcccaagcattctacgttgactgcttgagaagatgtttgtcctgcatggtggagagtggagaagggccaggattcttaggttgatctatctgtgggttatgacttcccacaatagccacccccggcccccaccagtccttttattggctctggatggaaaatccctacccatgtgatggtccctggtctctcctatagtttgaccaacagttgacccaaaaggttatggtcttcagcgttttaattatatccacgactagatactggggtctgtattcttcaaagtgtggggctgcctattctcccaggaaccaaatggcctccgtcttaagaaagtatgcttactaggaaataccctgcctacctta

SEQ ID NO: 467293 - DNA, 1000 bp, Homo Sapiens; identical to SEQ ID NO: 158155

SEQ ID NO: 467294 - DNA, 1000 bp, Homo Sapiens; identical to SEQ ID NO: 337333

SEQ ID NO: 467295 - DNA, 830 bp, Homo Sapiens
ctctcaaatgagtttaaatgcattttatttttagacaacctacatgacatgtttttcttaaaaacaatgcctccactccaaataaatcacagtcaaaataaatgaagagctcaagatgacatcagtcccatttgtcttaagtcctggtgttgtgtggatgacaagcagaagccagttatgatgacaggtgatagatccaaaataattgccacatttgttaacatttttccatttctaaaccatccttaaagaaaatcatatatggggtcacaccatcctcacggtagtccaatagagcaaccatgccatctggattcatgttttcaccaataaagaactggtagtttttgaaattagcaaggatgtgcttgatttgttctgcagcccctgtcataaaaggttttactctttctggtctctgttcttcaagtttccctttgattgatttcatgtaatctttgatgtacttcttgtaggcttcttttgtgaaacttgtttcctgcaggtgatggttcatgacaatatcgacaccagtgattactgtgctttcggtaccttcgccctcggggccttcagcggaggcatttccaccaatgagcgagtcatcaatgttaccttctgtcctactgaccatcttcccctccacctccaggcacaacccgtccgcgatctcccggatcttgtagatgtcggagaacatctcatcgtggctgatgaggtcccggtagataatcatgatggcgactgaagggagacgacgacggcgctagcttagcacgagcctgaaactcggagcgagcgcggtgcagccggagcggcgctcggggggg

SEQ ID NO: 467296 - DNA, 1000 bp, Homo Sapiens
ttttttttttttttttttcaggttctttcagttttctttaatactagtctctgacattataaaacctttttttttgttttttgccctttgagaatttctaaatacaaattgagttaaaagattgttccaaaatctgctgcttcatcaaaaggcattaaaacatttcttatgtcaggaaaggatcctactagtcttttaattgctattgtctgggattaacagataaggagaaaccagacaggaaatggctaacatatggaaatatttgcacataccaaaataccactacttttctttgtatgtgaacggtcctggaaggattctgttgctccttggcaggtgtgtggtttgcgctatagactggctccggtgatctggccattatactctgctgtctccatcttgaggatgtaggggattatgctgtctatcgaaacattgccaatgagaccagtaaaaaaaagttcttctgttatgttggagctcatcagcctgagtgccggcaggcgaacgaggatccgggccaatcggtaggtgtcttctgagtaggttttctgaacatagtcctgcaactccatctgtgccttttcttggaatttttcaatctggcttgtgctggtcaaacctggatgatcggggctaaagagaactatagctttaaggtatgcatactcatagccatctatatccagcttcgccatgctgttacagaactcctgcagcttccagatgtgctccatgacttgctttatccggtcaccagaaagtttatcttcctggatgctgttctgcaggtggttgacaatggcagccaggatggtggagagactcatgacctgggcacactgggccaggccgagggtgaagagctcattccagcaggcccgcacaaggctggtgttgcagtcctgcccaagtgcctgaaaggctgggattgaccgagcccagtgcattgagaggaaaagcagacgggatgcagactcacagatgtagtgcacgt

SEQ ID NO: 467297 - DNA, 1000 bp, Homo Sapiens; identical to SEQ ID NO: 158156

SEQ ID NO: 467298 - DNA, 1000 bp, Homo Sapiens
tttttttttttttttttttttttttttttttttttttttgttttgtaaactcgagggattattatttcttgattggagaaagagaagacagcatttggtgacaaagtcatacaggtggatgtcagggagagtgatcaatcaaaggatgggaactggaactgagaacccagcaggtacttctaggaagactcagcagtcagtggtgacggtggctgagagctcctggatgcgccaggcgctgcaggccttgcacaagatgtgcccatccagcgggtagcagccctgacactcgccctcagaggagagcagcagcccacactcctcgcacttgtaacagccaatgtgaaaacttcgatccagagcaacaattctcacagtctcctcctgacctggctcaggcattatggccccaccgcacactgagcatcttggggcaaacttcctgtgaaagtcctcaatgcagtggatctggctcgtagcatccactgtgaaggggatgccgtcgaggccgcggtgacacaccacgcaggtgaagcagccagggtggtaggccttccccatagcccgcaggatccggtccaggatgggctgggagcacgtggcacatttctccagggtggccacgtagcagccctcgcaatatgccctcctctccacggcgtagaaatgctggccgcgaagctgggcccggcatgtagaacatacaaagcagcccacgtgaaagacgcgatcaaaggccacaaccccagccccatccccaaccacatcttctccgcagccaccacactggccaaagtactccccgctgggcgggtggttcatgtcgtgaaccagcttcttcgtcagcctatccagctcatcctctggaggctggctcaggggcacctggggcccgtgctcgcctcctcttcctcttcctgcagggccagagaccccagcagcttcctctttggcccctggccctggctctctctggctcctatagccaggcccccagact

SEQ ID NO: 467299 - DNA, 1000 bp, Homo Sapiens; identical to SEQ ID NO: 337336

SEQ ID NO: 467300 - DNA, 1000 bp, Homo Sapiens; identical to SEQ ID NO: 158157

SEQ ID NO: 467301 - DNA, 1000 bp, Homo Sapiens; identical to SEQ ID NO: 337338

SEQ ID NO: 467302 - DNA, 1000 bp, Homo Sapiens; identical to SEQ ID NO: 337340

SEQ ID NO: 467303 - DNA, 1000 bp, Homo Sapiens; identical to SEQ ID NO: 158158

SEQ ID NO: 467304 - DNA, 937 bp, Homo Sapiens; identical to SEQ ID NO: 337341

SEQ ID NO: 467305 - DNA, 1000 bp, Homo Sapiens
ttttttttttttttttttttttttttttttttttttttttcagaaaaggcaaagtttattccagtgttgacagagagagggtgagccttgcacagcaattctaaaaacatgtcatctccttcacctaagaggtaagaaccggctgtaagtcatggggtcactaaaccggccgcagttacagtaagcagaagaggtcacggctcaggccttctcagactttccctgggacacacggctctctgggggggcccggcgaaaccactcggaccaggagccatcgtacacggccacatcaggcttgccgcagaggtaggcagccaaggccacgtggcaggcggtgactcccttgcggcacgtggcaatgagaggctgcgagagatccaccttcttggtctggaacagagcacggagctcttctgggcccttctcgaagccatcctcagtcaggaagtccatgaaaggcatgttgacggcaccacggatatggcccgagtccagtcctactgcatccggctccggctcggtgcccaggaaccgcccttgagaccttgaatccaccagctggaacctcttagattcaaggttctccagcacctgctcgtaggtcttgagcagggagcggtccagtgtggctttgaagacggccggttctgggcgtgagggctcggatgtcaccgggtggccctccttcagccagttccggaagccaccattgagcactgatacggtgcggtggccaaacacacggaacatccaccagacccggggagcatagaagctgcccaggtgttcaccatcatacaccaccacgtgcgtgtggttgctgatgcccaggcggcccacatactcggcgaagccagcctcgctgggcagcatcatctcgtagggcgacgccgtgtcccggcactcttctatgtcaaagaaagaggcgccgggtacgtggcgctcgaggtactccttgcgggcctctcgggtgcctggtgagtaccaggacgcgtcc

SEQ ID NO: 467306 - DNA, 1000 bp, Homo Sapiens; identical to SEQ ID NO: 337343

SEQ ID NO: 467307 - DNA, 1000 bp, Homo Sapiens; identical to SEQ ID NO: 158160

SEQ ID NO: 467308 - DNA, 1000 bp, Homo Sapiens; identical to SEQ ID NO: 157405

SEQ ID NO: 467309 - DNA, 1000 bp, Homo Sapiens; identical to SEQ ID NO: 158161

SEQ ID NO: 467310 - DNA, 1000 bp, Homo Sapiens; identical to SEQ ID NO: 337344

SEQ ID NO: 467311 - DNA, 1000 bp, Homo Sapiens
ttttttttttttttttcagaataccaaagtttattcaaaaagtcaataaaagcacagttttgcaaatttgtctaaaacgccagataatcttgaacaaaaataaaatgtctgaccactccaaaataggaaaagacaatcttgtgcaaatagacatacacagtctaggcattgtggaaactggctgtgttcccagcaagagatactgcaccctcctgaccgagcagtcaggcttccctttcctagccatcctaagttgcgttctaggaaactctggatctcagcctcatctccagctttgcctggaccttgctagggggagggagggacaggagcacagaggaggagaggagagggatgtgatgtctttcttaggaaagaaaaaaaggcacagtgatgagctataaaggtagtgatgagagctataaaggtagtgatgaaagcaaggaataattttcattcaccccaaatcctacggcaagctttgacaatgtaacatctttatcttgtggttaggaaaatggacctagagagattatgtggtttgctcaaaatcacatagctactaagtgcagtagtgctttctataagaccaacttgcctttccacttggttggaaaatttaaaaaccaaacctgtcgtaatctatctgttctgcccctcccgcctgtatcatgagatgactgaaaattccaggtggccataaactcaaacaagagcctagcccttggcttattaccggtggctactacaaacctacagaccagagcccagggtagtatagagtcccaactctgggccctgactgcaggtcattcaggtcccagtcacagtgaaagcagactcattcagctatctggagaagtgtaatctgagggccacttggcatcctgagttaacacagggatgccgcagctggggtaaggaattagagaagggaaggccagtgttactgcagtaagagaaaaccaggaagtccatctaggagatgaaatttgtgctt

SEQ ID NO: 467312 - DNA, 1000 bp, Homo Sapiens; identical to SEQ ID NO: 337345

SEQ ID NO: 467313 - DNA, 1000 bp, Homo Sapiens; identical to SEQ ID NO: 337346

SEQ ID NO: 467314 - DNA, 1000 bp, Homo Sapiens
tttttttttttttttttttttttttttttttgctggcaagggtatggtattttattgagttattcaacagccagcttctaattgaaactggacaagcagatgctgaaggcctggagcgggctaaatggaaagcagaagtccatggtgaatgtgtctgggcccactcggccgaactggagcaccagatgttcttggtgtttgggatccacgatttggaagttcttcaccgaagcccgagtgactcgaccatggaaattgagcgtgtagacaccgttctccttgtcccacgacggggttttgttgtgcaacaaaagcaacccttgtttgtccccacgttggtaacgactcagtagcgactcctgttcatttagtggctggacattgattcgctggttctggctgttggttcctgggagaatcacagtcattttccgaggccccaggtatcctaagacgttgggctcataacacacagcccccagctcctgtctgatccgggcagtattcctggttaaatgctcccggtcaggattcaccccattgtcaaagatggtgaacttggtgctgaagacattggatctgactttgcccacgaaattgtccccgtcccgagataggagtgtaggatccagggagatgaggtaattagaagttttgctccttcttctctttcgcccagccaggaggaagcgctgcaggctgtcagaggtctccaggtagaggtagtagagggggaacaagcccttgtccacgccgtgcttgtcacgggtgaggtagcactgcatcatggtgcccgggagcgctggccgcagcacgtaggcttccatgtcctcctccagcccagggcagggggagcggattgccaaggaggcttcgtgcctcatatggtcgctgtccgtgccaccctcgcctttcagggccttggacaactcttcgttgtgtgctgctgaggagttcgtccctgtagactcagaggcctctctcttcttttccaagtctt

SEQ ID NO: 467315 - DNA, 1000 bp, Homo Sapiens; identical to SEQ ID NO: 158162

SEQ ID NO: 467316 - DNA, 1000 bp, Homo Sapiens
ttttttttttttttttttagtgaattctgagatcttttatttgtttccatgtaaatagcaatattactattaactatattattaatatcaatattaatactctctgagagccaggaaagcactaaatacaaaattatgacttaaaataggggacctgcccagtatacttaagaacaaattatgatttggatcgggattggaatcccttaagcattctctaaatagaaaatatctaactaacaattgataactgctcttgaaggactcacaaagatggctgaggaagatgtaagcttgtccagaaaaaaatacattcaacatagtaaaggagaaggttacactccttgactcatagcaacaagaacatagacatttaatatgtgcattcacagataacactgtaagcataagattctaaactgttagatatttaacattcctctcatttaacagaaagaaaagcaagacccagaaatgggaaatgactttcccaaggttacatggctagttagtggctaagtcaaatttaaaattctgatctcctgacttttcattcaattcttttcccacaaaactctgccatgtatatcgaagggttaattctccctgtgaaggacatgacttacagggactgagacacacacacatatttttgatggaaggaaggtggagtgaggctggtgcatagcagaaatatccctgtgtggttgcagaggccaacatgggaagagcaggccaggtgcacccaaagcgagtgagcacctaagagaggggaccatgacatcaaagacaaacaacacacacaacatatacttaggcctgcatgtgcactgcacatctgtgagaaatatagataaaaattccaaacttaaaaatgaaccatgcattttcttaaatattacctatagtcataaacgtttactttttcggatatcactcactgagtaactgcaattttgcagaacatggtcaataacaaaaagtgaaatacacacacaca

SEQ ID NO: 467317 - DNA, 1000 bp, Homo Sapiens; identical to SEQ ID NO: 337349

SEQ ID NO: 467318 - DNA, 1000 bp, Homo Sapiens; identical to SEQ ID NO: 158163

SEQ ID NO: 467319 - DNA, 1000 bp, Homo Sapiens
gggagttattaattctttattaggattcaggtttcaaacaaggtagaaggcagtggcaagaggggttcaggtagggggatgatgagggaacaccagacttggctagttgggccactgccagaagccaaatgggaaccctgggctggaaggggtgtggagaggggtggacaaggggccagcctagaggagcagacggggtcagcggatggtgtatcggacatagggaacctcgacatcctcgccgctctcgtcgttacagcacagctcaagcaccagcgcccgcacgtggcggcccagctttcgcttcgacacacggctcacaatctctgtcatcggctgatccaaccgttccttgagcttggcagctggcatgaagaaggaatagagcatggacacgccctgggacagcatggtgatctctaatttgtgctctgtcttaaaatagtcgaggaactgtttgagggtcatctcctcaccattaggctgcagcccttgtacctcaaagcgatcccacaatgtccactcttggttatagtactggtgacgtggtgcggcaaggggttcagagaaaccaaagaaaggcagggccaagttgaggaaaccattcttgtaggagtcaagctgtcggtgcccctgcacaaccttgtacagctccagacacacaaggccaaccacggctgctgtggtcgtggcaatggctgggatgatcttccctgcaatcagcttgctcttgtgccggtctgcagaaggaatgtcatagttttctgcccggaggttggatgcagccacgatgaaatccatatgaaagttgctgtcatcatccttctcaaagtcaatggggtacatcttgaatccagggagcttgtctgggctgggcagagtggctttgagctcctctagacgactgtcatcaacagaggcattggcgctctgcagctcctggtcagaaacatggatcttgacgccagacttgggggtgaattcggggacctgcacagac

SEQ ID NO: 467320 - DNA, 1000 bp, Homo Sapiens; identical to SEQ ID NO: 158165

SEQ ID NO: 467321 - DNA, 1000 bp, Homo Sapiens
tttttaaggttatttttatttacaacttttgaaaaatgtacatttttttttacatgggttacttgtgcaaagttagatttggaagtgataaatgcataaaaggtgacaatagaacattagacaaaacatttacaagccttgtcccatactgctacttaaaggtactatatatctaaaagtataaatatccaaaaaaagatcgcagacattggctttaaggttctcagatgctgaaagggaagaaattaaagcatgcagcaataactcaggatttgagtggaaaatagtttgccacagatatgctatgctcccttccttgaattcattaaaactctaaaataaagatggacaattgagtttattcacttagggcagcactgatcctttaaaaagattaaaggagctccaactttccctagctcaaaaactcacgattgtttccattcctctgctcccacacctcttttaaaaagcaaaaacccagaagaccaataattctgaaacttggcatgagtgtgcccagtcagcagcttgcaaagagaggatgtgtcagttactacaattgctgtactcctttagctgagtccttcaactttctccttcttgccagtaaatactacgttgtaattcatatgactgagatcttagtatcacaggatttttagctcccatgcctccttcaaaattgtttacatggatttgtttctattctctgtaggccatattccaaacacattcacttctaaatccaacacaagtgaaggaccagccaggatgaaacacttcagcaatcattttgttaaaaataacatcctggtcatcaagctaagcataagcacctcttgtataacaattcatcttaaaagcttaaagtacaataataaaaataactgcctgaaaactggaaatgaaatacaacagaaaaactgaagcattagtaatttttgcaagtaacccaggtacagtacatttgatttcatagagggtgttttctgatgtt

SEQ ID NO: 467322 - DNA, 1000 bp, Homo Sapiens; identical to SEQ ID NO: 337354

SEQ ID NO: 467323 - DNA, 1000 bp, Homo Sapiens; identical to SEQ ID NO: 337355

SEQ ID NO: 467324 - DNA, 1000 bp, Homo Sapiens; identical to SEQ ID NO: 161087

SEQ ID NO: 467325 - DNA, 1000 bp, Homo Sapiens; identical to SEQ ID NO: 158167

SEQ ID NO: 467326 - DNA, 1000 bp, Homo Sapiens; identical to SEQ ID NO: 161110

SEQ ID NO: 467327 - DNA, 1000 bp, Homo Sapiens; identical to SEQ ID NO: 337358

SEQ ID NO: 467328 - DNA, 1000 bp, Homo Sapiens
ccaaggttgagcttgctttatggatgacaagtgggctaggctgggctgtcgggggcaggacgaagattctggctgaactttccaagggacgggacgcttgggatcctggctggtacgaggcctcccacactgtcaaatgtcaactccaccagcactgagacaatgagtagatgagaatgtagaaagagggaaggtggtaggtaaaggagcggaaggaagaggtggggaaagagggaaggagagaagggaaggagggaagagaaagaaggaagaaaaggaaagcatggcccggctagagacaaagccagaggtgatcaggtcagcagcaggagaggctcagaagggagcctctcgggaagtgcaggcagccatgagggctcgtttcagctgctcataggtgacgaacatcaccacgttccaggaacccaagcggagaaaggagggcatgaaccctttgtagaaggctcggggcccctccttctggagcatggtaagggcacagtggccagcgctactgtactggcccagggcagagttcatgtatctcgtcttgaccacgtctacaggggaggcgatgacagtggtgcagaagcctgccccaaaggcagaagtgaagtggcaagggaggtcatctgtcatgaggttggctttcaggagggcatccttgatgaggtcataggtcaccagctcagcacagttgacaatggcattacgagcaacattgggagaggtccctttccagaggccccggaacccttcctctcgggcaatggtcttgtaggcattgacggtgctttggtatctccgaccacctccagcccgggcctgagcttggaatcggacctttaccacatccgtgggctgggccacagccacagccagggcacctgtggtgctgcctgctaggaggcggctcccaatgctggcatgctcagagcccttggtgtagaactgtttgacagaatcatacaggccgatgcggacagaggcaaagctcatt

SEQ ID NO: 467329 - DNA, 1000 bp, Homo Sapiens
ccacacctaaggtgtgaattcttttattgagtcataataatttcccgagaattccgagtcctgctactttaggttcttgcccaggaatccacctcttttcccccaagcccaacaatcctttgaggtactcatgattgagcgcgtggtgggggggggtggggaagaggctgcatgggggtggggctcctgtggcttcacgtcatccactgtcacctctggtccccaagtctctggatcctttggtctcacctctagacaaccgtatctttcaaaccttcttccctggcaactcctctctgtcccgacaaaatctctcccaaggcattgtccttgtagttagatttacacagagcttttgcttttataaagtgcgttcatgcccagcttctcacttgcatgtcatagcacccctggtgaggtggacagggaagggatggctccctccattttgtaggaaagtgggggctgccctcttgattcttcagtgtcgtcagggaatatttacgagccccagcctcacatgggcccagcagggcttctttagcacaggctctagttttttctcttgttccttgggtttcctagaatcccaaaggactctctgtggcagacatattacaaataggctgatgatgcatgtgtgatggtgcagctgcagtcgccagctctgtgttgctgggtggcatccctccaggctccgtggctgatctcccactccattgtgggcccctcctgtcccgtgcttgccatccttcctgcttatcattcattatctaaccagatttcacggggatacacgtctccaaccttccattttgtccaaatggatctatcttggtttattttctcttgcctaaatattaggcatgcctaatgggtttcaaaaattaatataatttattttccatcttgtcagtgcaaaacaaaggtgttcttgaggcatggcagtgaagaccagaatccctcctcctcttctacttctgtttcttgaatcagcaac

SEQ ID NO: 467330 - DNA, 1000 bp, Homo Sapiens; identical to SEQ ID NO: 158171

SEQ ID NO: 467331 - DNA, 1000 bp, Homo Sapiens
tttttttttttttttttttagttgttgatggagaatgttttatttatgtaattttcatctgtagagatgcttctgtcctcatctttatatttgtctccctcttctcattgaactgcaaaattcctgaaggatgagacctgggatgtttaatgcaaactgtacattctcagcagagcacaagtatcaaagggacattggatatattttaataatgatctaacacaagcaaaaataaccactgaaaatataaaactcaacaagagacataagaaaaaagcagacagaaaacaaaaaaaattcttattttagaatgatgctatatgtaacttgtaaaatatttaagtttttatacatgagattatattggtttccttatttaaagaaaaaaattacaattaagaatggaaattaaaatgtaaaaccaagataaatatttttggcttttggactaaaaaaaaaaagattagtgaggaaaaccaataaataatggggagagaaagaaatgctactaattttctcttcatgattaaaaaaaaaatcttttaaccatatttggggtgactggaaattaacagtgatgattttgagctaaaaaatcagtgacacattttattaaaacaaaaggaacaaaggaactttaaccagaccatacatgtaaaggctgtttagcatagcaatttcatggattcaaaatatatctttaatgacaaacaaaccaataaccaggaggaatgaagactgtccttccctttataatgtgatattaaagtgtggcctatggacaatttataaagtaaagagtttgaagtttaatttttattttacaaaaattgacactattaaaaccaacatgattatctttcactcatccaataactgagctaacagtattataaaaatatgtaaaaaaattctagattcataattaccagatatgctaatatccatatagctagtataaatctgatgattaaaaaaatagttttgtttccttaaaaac

SEQ ID NO: 467332 - DNA, 1000 bp, Homo Sapiens; identical to SEQ ID NO: 337364

SEQ ID NO: 467333 - DNA, 1000 bp, Homo Sapiens; identical to SEQ ID NO: 337366

SEQ ID NO: 467334 - DNA, 1000 bp, Homo Sapiens; identical to SEQ ID NO: 337367

SEQ ID NO: 467335 - DNA, 1000 bp, Homo Sapiens; identical to SEQ ID NO: 158174

SEQ ID NO: 467336 - DNA, 1000 bp, Homo Sapiens; identical to SEQ ID NO: 158175

SEQ ID NO: 467337 - DNA, 1000 bp, Homo Sapiens
aaaatagtcacttttatttcttagcaaaactatttcctccgtgaggggtatttacaacagagaaaggaaagaaggggtcaattcacagcgacttggagaggctggaggggctcgtgggaggcccgaagggctggagacagacacacttcacacaattaactggaactgctttttccggtttccgacggggacgtccccagagggacttgatggggccggggccccgcgtggcaagggaactcgcacaaaccacccgccctcctgggctggcccccggtcacccgcgggtgagctctgggagttcgggctcaggacccgggaggggggtctggcaggtcccgacgcagcccggggacaggggcagggccaaggggcagggccggggcgcatgcaaacaccgagggggagcgggcaacacggaggggggcgccggcgcgcgcgcgcggcgggggcgcgcgggggcgggaccgggaagggcagtcacgggcgccggagcagcacgtgctcgatgtaattctccagctcctcctgctcctgcagccggcgctcctccgcctccgcctcctcctgcgcgcgccgcgcctgggcctcccggccgggatagtggcgcgaaggcggcaaggcgtggtggtagtggcggcggcgcaaggccgagggcggctgcagtgtccgcggccggatgtagttggggaaagggtggtacggccctggcgggtacacctcgtcctcctcccgatcccagggcgggagcacctcgttccagtccggcagctcgtctcgtgcgggagcgggggcggggggcgggggctgcggggagcggacgtgggtgggggcgggggcggcacgggggggcggcacgggctcgggaggggcgttcttcttccgcttccgcttctcctccacctcctcgatgatgctgaccacgtcgtccgctggcaggtggagtttggtggacagctcaatgaggctgtcgatcgtctgcggatccatctcctcgtcg

SEQ ID NO: 467338 - DNA, 1000 bp, Homo Sapiens; identical to SEQ ID NO: 337370

SEQ ID NO: 467339 - DNA, 1000 bp, Homo Sapiens; identical to SEQ ID NO: 337372

SEQ ID NO: 467340 - DNA, 1000 bp, Homo Sapiens
ttttttttttcatggttaagctgcttggtttaattttttagcacttgaaaaaaaatgtacagtagtttgaacactcagtctttgcaaacctccattgaggtcaaagatatcattcatacgtacaaaattagtttataaatttttttggcaatttcatcttagtaacccgttttgtcctattgccattgtcccaaccattgaaaaagtttacaataatttacatagaaatattttcaaagtgcttaagaatagtgattgttctctgggatatttacagatggcctatacaatgtatgtacaggtggtatacactatagcacaagtttcactgctggaatatggctttctagggaaagtgcatatttggccagaggtggcaatactgtctagaaattcaagggttacagatactcggtaaccacatccaaagctgaagtagaatgtggacaagaatatttacaaaagtaatataaaaacggtcaagtacacaagcttgatccacgcaaaggtatcttgatgttcttccagccgagaggaagaaaaagagacttcagctgctggctcggttaccattccgacgggggtattatttgtttagacctcaaaggtcaacatttgtcacagaagtcaagctagatcatcatctgtgcttacaactgatattgctgggtacgtgtgtccaacagaagcactgtgtctaccaatgtctatggagaggtcctcttcagtggttttcaagtacacaggattgtcaaagttcatgcttttcatgttcttgtgttgccaattccgccacatcaagtagccacctactgctgccatcactaagagcaagagaggaagaatggcccatgcggcagaagtcccttttgggggaacactgacctctgatactgctgtggtcacattgatccctccaggaactagtccactagttgctgaaatttctgttgtgttcgtatcttttgtctcactgtaagtcacagtagttgcagtactt

SEQ ID NO: 467341 - DNA, 1000 bp, Homo Sapiens; identical to SEQ ID NO: 337374

SEQ ID NO: 467342 - DNA, 1000 bp, Homo Sapiens; identical to SEQ ID NO: 337375

SEQ ID NO: 467343 - DNA, 1000 bp, Homo Sapiens; identical to SEQ ID NO: 337376

SEQ ID NO: 467344 - DNA, 1000 bp, Homo Sapiens; identical to SEQ ID NO: 337377

SEQ ID NO: 467345 - DNA, 1000 bp, Homo Sapiens; identical to SEQ ID NO: 158177

SEQ ID NO: 467346 - DNA, 1000 bp, Homo Sapiens; identical to SEQ ID NO: 337378

SEQ ID NO: 467347 - DNA, 1000 bp, Homo Sapiens; identical to SEQ ID NO: 337379

SEQ ID NO: 467348 - DNA, 1000 bp, Homo Sapiens
ccagaggcaagtgtctttgttaggctgttttaaacgtcttagcaggatgtggacccaggtggctaacggccaatttggccggagcaaattcttctcaccacagtgggttcagagaatgaggagagggctgggaggtgggctcagggactctgcatgttgctgaagggtgaaagagctggaatgctggctcatctggccccatcaactcccaaccaaatttgtgtgtccttaggcaaagcccaccccctgtctgaagctcagttttcctgtctgtaaaatggagaaaccagacactgtccacacaaggtgaaggggcatccaagaatgtgggaggatttaacagcattgtagctgtggctgcactttggaaagttcaaagggctcctcgaatgccagggaagtctagaatagtgacgggttccggctgcccaagtttgttctccaacctctggtagggtcatattccagagtgcctcaccgcattccctcttactccacagccaaattcctatggcttaactccctctgctgttacttggcatggagcctacccagggtttaggaatgatgggttcacatgtggggggttgatgtttcatgccctggctgggtgggaacagctctggctatgcccaacaggtggtgataggtttgggctctcccgggaccatggcacccttgggtggtaggggcattgctctcttggggttttgtttggcgggaggggagcagctgtagcagtctgtgctaggttataggttaggcctactgagatcacagaagagaagagactagctggctttcctatctcggggcctgggattaggggcccagggtgtggtatacaaccccggggtgcagggaggtgccatctggggccaagaagccctgtgttcctggggcctgggaccttctccataggtcttggagaaggaggatgaatgcaaaggtttctaggcaatgggccagcaggggctcttggggtatgttcagtgcaggg

SEQ ID NO: 467349 - DNA, 1000 bp, Homo Sapiens; identical to SEQ ID NO: 337380

SEQ ID NO: 467350 - DNA, 1000 bp, Homo Sapiens; identical to SEQ ID NO: 158179

SEQ ID NO: 467351 - DNA, 1000 bp, Homo Sapiens; identical to SEQ ID NO: 337382

SEQ ID NO: 467352 - DNA, 1000 bp, Homo Sapiens; identical to SEQ ID NO: 337385

SEQ ID NO: 467353 - DNA, 1000 bp, Homo Sapiens; identical to SEQ ID NO: 337386

SEQ ID NO: 467354 - DNA, 1000 bp, Homo Sapiens; identical to SEQ ID NO: 337387

SEQ ID NO: 467355 - DNA, 1000 bp, Homo Sapiens; identical to SEQ ID NO: 337388

SEQ ID NO: 467356 - DNA, 1000 bp, Homo Sapiens
ttttttttttttttttataacataaataagatgtgccaagactttatttcttcaaaaagaacaataaacaaaattctagaattgaaaatgatcatatataataccaaattgactgccaccaaaaacctagagcattgccccttaaaggaggtacttaagcctattcaatacattctaaatactttacaattccttatgtccacctttctgttattcatgcagagattgggctctcaataacaaacagcaccctaataaaaaaggtctcaatactctacccactccagccccccaaaatagcaatcaatttcttttccatataaccactgtaaaagaactgtttgtccaaatgagttgcttcactgaagattaaatggattgttaacattttatcacaaagcaaacaaccgtttttcattgttattgattttaatggaaacaatgctcttaacatctttgcctacaaatcatgaactttaaaaatacatattttgcaatttttttcccatagcatcatttcagaactgctgcagttattacaccgctatataaatgttatggataattgcgataattatgaattgaactatatacagcaaacaaatcagcctttgccttccaaaattgtaaatggactatggttcttttaagaagcactttaaccataagtaagcaatgctcaactggccttactcatcaccactgttttagacataagctatcttttgaaaatatatagatagctactagatagattgataggcagattagataagtcatagatacaaacatatataggtatatgggtgatctctagatagaacagacagacatgcatcctgccgcaattttcatttttatgtaaggtaataaagaactaagggacataaaattcagtaggttaccttatgtttatatatgtagggcagggatgattaaatccagcttctcagtctttgaagtacaagattgagatgtcatggccactaactgaattgat

SEQ ID NO: 467357 - DNA, 1000 bp, Homo Sapiens; identical to SEQ ID NO: 337389

SEQ ID NO: 467358 - DNA, 1000 bp, Homo Sapiens; identical to SEQ ID NO: 337392

SEQ ID NO: 467359 - DNA, 1000 bp, Homo Sapiens; identical to SEQ ID NO: 337393

SEQ ID NO: 467360 - DNA, 1000 bp, Homo Sapiens; identical to SEQ ID NO: 337395

SEQ ID NO: 467361 - DNA, 1000 bp, Homo Sapiens
tttttttttttttttgactggaaatgggcacaagaaaactttttggtttaatagacatattgtatacattgatcttggtgatgattacatttgtcaaaattcagaaagccatgaacttgagacttgtgcatgttactgcatgcagattacacctcaataaagtactgttaacatacaaaacttctagttgctagccagaaactgatttctgaacccactaacaagctgcaaccttcagtttgataaacacttgtccacgagatctgcaaaaatgggaaaatcaggccatatgactaacttatatatcctccaagccttgcagaattcttctgagtacaattttagagaaacttctagagataaataaaaatgtcaaatattactgaatttcaaatatgacagtaatttcaaatactactgaaaaattacaacgtattaggcactgaaaaggcagagtagatttggcagtcaacaaagtccctgccctcttggatcttatattctagtggaacagaattcagcatttctatcttagtacttctgatttactccagatcagactcatccttcctgatcctcttgtctgcatgtatcagctaatggtcaatgttctgaatgcagtccatatgtctccactcttgtgaggcttctctgctgtgtggtctcccaatcacttggctgaactactgactctataaaacaaatgttttgtctatgatagctctgattattaaaatatttcagcacccatctgagatagtaaaacatattttatcgagttttcctgtgtgaatcctctgatgaaggaaagtccttgtcaccctcatcatcagcatggactcgctgatgaatgataagacttgagctccaactgaagcccttcccacactcctcacatttgtatggtttttctccggtgtgaactctttgatgggcttgaaggtatgagctccagctgaagactttcccacattcctcacatttgtatggtctctctcct

SEQ ID NO: 467362 - DNA, 1000 bp, Homo Sapiens; identical to SEQ ID NO: 337396

SEQ ID NO: 467363 - DNA, 1000 bp, Homo Sapiens
ttttttttttttttttttgaaatttggaacttttattaaatactcattcatccatgtgccaccaccacccagagcaggaaaaaaattatcaaaatggaatttaaaaaaacaaaacaaatcaaacccaatccccagcagtctatgtacagggccactccctgcctctctgccatagagaggttggggggcagctgaggagtggtgggggctgggcaccttttctccagccacaggcccctgaggaattaattgactgtggtgtcaggaagtccctggtgccaagtagccaggcatctcagctggcctccagggaggtggttattgctgggagggcaggacagggcctgctccactgctactgggctgaagagctgtctgtggctcaaccctacagggccagtccccatagcagccccaatctctacctgagaaggggaacagactgagggccagaagggtgttctttaggaggagagtgggcgcccagctgattttgagaggcgggtgccctggtgtagcctggctgttgtcagctcccgaggatgatgcactcccctgattccagctgcctggcccccttcttgagcagggcccccattcccttcagttaggcagttttcttgctgtcttctcaccccagagacctatgtggccaccttctatgtgtcagccacagcctgggcccttgggggcaagagtggccatgcagatggcacttcctccagcatggtgtgggacccagccctcttggactcagcagccactctccgacactgttgtctccagggtcacagccccttgctgcatggccgcagtggccacattgatggcctcctctaaggtctgctgttcctccagctgcactgcaatgtgcgttccgttggctgtggccaacagtgccacctgttgatgacgaagagatgctacacttgagtcctcagccaccacagccccagaggtaatgattgtgacgggctgcgtctgggtgccatcggcgctg

SEQ ID NO: 467364 - DNA, 1000 bp, Homo Sapiens
caaaagaagtgaaaatctatattctagagactctcttcaaaaatgagcaaccaatatattcaatttatttatagctcctaaaacatctcattcacatagtgaattttcttgagaattgtactataattattttccataaggttttccataatatttacatttacaggatttatttccagtgggagttttcacatgacctttaaagtaattgttaaaattcagaattttctgtatttctaggatttcaatctggtgggcattcttttatttataaggtcaatctggagtatgtgttaccatgtgtctctgagtgagttataggataaatgaaggcattctcacattcgataccttcataaagtttttctctagaatgagttatgttataccatcaaataccactggaacaactgcaggccttaccacattttaaacattcatatggattttcttcagtgagtcctttcaagttttcaaaaagaaatggaaaaattgaatgctttaccttattgcttatagtcatagggtttatctccagtttgattcgtttcatgtatttgaggaaatctgggaaaattaagtactttcctacaccttacattcacagtttctctcaagtatgtgactgttcatgtttttgacaaaaactgtagtgattaaagcctttacatttttttacatttatagggcttttctccagtatgagtttttttatgcttccaaagggtactagcacgactaaaggctttgccacatttctgacattcatagggtttctctccagtatgagtcctttcatggtcacgaagggaactggaacatctgaagcctttaccacaattgttacatacatagggtttctgtgcaatatgagttttctcgtgtttctgaagggaactggcgtatctgaaggctttcccacattgcttacatggatagggttcttcaccagcatgagcctttatatgtccttgcaaggaactgagacaactgaaagctt

SEQ ID NO: 467365 - DNA, 1000 bp, Homo Sapiens; identical to SEQ ID NO: 337398

SEQ ID NO: 467366 - DNA, 1000 bp, Homo Sapiens; identical to SEQ ID NO: 337399

SEQ ID NO: 467367 - DNA, 1000 bp, Homo Sapiens
ttttttttttttttttgcagcagctttttaatatttaaaaatgggggtggagtacagacatcaattaagataaatggataaactgtggtatatccatacagaatatgactcagtaattttaaaatggactgttcatacataccatggacaaatttcaaattatgttgcatgaaagacagcatgcaaaattaacactttataggcagacttacataaaattctagaaaagacaaatttacctacagtgaaaactactcagtggttgcctagggattctgggggaaggcgagcactgagagaaaggttaagggcctcaggttaactttgggggtaacagatatgtccaataccactgatagggtgatagtttcaagtgtgtgtgtgtgtgtgtgtgtgtgtgtgtgtgtatcaagacttaactcgtacactttaaatatgtgcaatatattgcatgttgattacacctcagtgaacctataaaaagttatcccatttaaaaatctggatctcccacttctattggaaactggacaactggacatcactaagagtgactctacctcactatggtgactcttatcactccaaatatcttgggaagacaatctcttcctcagtagtaagaaaaactggcaaacaatgaggaccattgccaaaagagtcaccagaaactccagctggtcacaaaagctacttccttggaccacacctctttactcccagggttaccgcctgtgccgcaaagacattaggtaaagagcccagggagggagaggaatctagaaaaactacattcgttgctgcaccagtgaccttgacctaacagtaacatggccctggagatcctgagatttctggataccctgatcccattcagccttagtgcctggactgtctgtggatgtgtttttacaatgggcacttcccctctagtttgccacaatctccccaatcccaattactcacactcaatatttatcaattttgtttccctactgga

SEQ ID NO: 467368 - DNA, 1000 bp, Homo Sapiens; identical to SEQ ID NO: 337400

SEQ ID NO: 467369 - DNA, 1000 bp, Homo Sapiens; identical to SEQ ID NO: 246435

SEQ ID NO: 467370 - DNA, 1000 bp, Homo Sapiens; identical to SEQ ID NO: 158182

SEQ ID NO: 467371 - DNA, 1000 bp, Homo Sapiens
ctaaagtgtattgttgtcttaagaatactcttcttcactttaaaggcctatattttctgaagtctttcaacagaaattacatttataatgtttttattaagtatgaacattgctagttagtaaaatgtgaggagatatgacttttctatattttttatatttctataacttttctcgaatataaaggatatcatgtgcaaaaagatgagcattggtaaaaatcctgccacattttttgcatttccaggggatttcttcagtaggaattatatatatacagtaagatgtgacaagcatttgaaggctttgcacatttttcaatatttttggtggcttctcaccaatatactttctcttatatttagaatagattgagtgtggttgcaagctttgtcacacttctccacgtttgcagtttctcttcagtgtgaattatcttcatgatttagaaaagactgaggaagatttaaagactgccacattcttcacatttgtaagactttcctccagtatgagttctcattatgtttaagaagcctggagtatggcttaaaggttttgtcacatcttttacatttctatggttttatatctaggatgaattcttatattcatctttcatatcttctcaatgtaagtttgtggaatgattcttctactctcaaatatgaattttcataaaggtttgtggatggtctgaaggctctgccacgtttttcacatttgtagcatttttttccccagaatgaattatcttgtgcacagtaagggttgagaacctattgaaggctttgcacacttctttacatgtgtagggtttctctctggtataaattctcttatgtttaacaaagtttgaggatgtggtaaagactgtgccacattcttcgcatgtgaagcatttttgctccagcatgaattcacttacgttcattaagggttgaggaccatttaaaggctttgcacacggttcacatgtgaagtttctctccagcatgaa

SEQ ID NO: 467372 - DNA, 1000 bp, Homo Sapiens; identical to SEQ ID NO: 158183

SEQ ID NO: 467373 - DNA, 1000 bp, Homo Sapiens; identical to SEQ ID NO: 337406

SEQ ID NO: 467374 - DNA, 1000 bp, Homo Sapiens; identical to SEQ ID NO: 337407

SEQ ID NO: 467375 - DNA, 1000 bp, Homo Sapiens; identical to SEQ ID NO: 337408

SEQ ID NO: 467376 - DNA, 1000 bp, Homo Sapiens; identical to SEQ ID NO: 158184

SEQ ID NO: 467377 - DNA, 1000 bp, Homo Sapiens; identical to SEQ ID NO: 337412

SEQ ID NO: 467378 - DNA, 1000 bp, Homo Sapiens; identical to SEQ ID NO: 161139

SEQ ID NO: 467379 - DNA, 1000 bp, Homo Sapiens; identical to SEQ ID NO: 337414

SEQ ID NO: 467380 - DNA, 1000 bp, Homo Sapiens
ttttttttttttttttactgcattggtaactatgaattttattatgtggacatctactgtggcatgcatctgtacaaacctttcaggcagtggtccacagctgggttatgaataaaaaggcataaatttttctctcattttattacaatgaagtttaacagtacagaaaagtcacatgaccttggtgggtcagatttcttaaaccctgcaacatgaggaactctaaatacattaaatattgttacacattcagacttccaatgtacaagtacttggaaacagttacagccctcaccaagctaggttggggacatgaagtccaacagcatctgaaatgctgtgaaggcaaactttacaaatagcaatgtaagcttacagaacttgcctttactagggtggtatgttcatgtaattccagcgccttcacaatttaacgaaccaaatttactatacttcacttctaaaaacctagatgaaacatgaaaaagaagccatacagtataaattgcaacttcaggaaaagttcctgctttattattccaaataatttttcccatgtaaaataaatgtccaatagttcctggtatgtgggaagataatgtttgttaaagtcacaatgaagccttattgacggaagcttggctatataaacagcacaagttgagaaaaggtttaatctccaaacctattagactggatgaagtaagatcagtaacggccaccttgcgacattacaggaggtctcattcccatcggaggtcgaggaggcccaccctggtaagggggcaccattggcggtccctgcccatacgggggcatagcaccaggaaggtatcctggcatgccttgatgatgaccaccatactgaccatgaggtggcattgggggtctcattccttgttgctgtgggatgcctggctgtggtggcatcatacctccaattggtccaactggtggattaccgatgggggcctgtcctggccgaggaagattacgttga

SEQ ID NO: 467381 - DNA, 1000 bp, Homo Sapiens; identical to SEQ ID NO: 337415

SEQ ID NO: 467382 - DNA, 1000 bp, Homo Sapiens
ttttttttttttttttgcagtgagacacaagtttattggtggagctgcagcggagtcctccctctttcagggatagccaagggcacagcaccaacagagggatggagagatagacccccaaacagacacatggatggagcagactcatagaaaccatagcacagccacataggcacagagacacacaggccacagcaccaagaacacacacacacacacacacacacacacacacacacacacagacaaaaccacagggctaagacacacggacaaagtgcgggctttggggcccctgcatagacagagcgagggccatgtggggagggggcccctactgacctcccccaggcataggcacaccaacagcacatagacaggcagatgcccccagccagccagcctgccacacagacaaatggactgcagggaaaggatgttcgtggctccacatgaaccatggggagatggcaccacaggccttcaacacaccctgccacactgaggcctgggagtccccgcccctgaactagtcacatctattcccctgactcccaccccactccccgccacactttggtcttgcccactggggctggggctggggctgaggctggggaaactggcaggtggtaggagggagagaggaaggggtatggacctggctcggtcccgtctctgtgatcagggcagcagatgctgagagtctggggctgagcctcggcctggcagtggggtgagggcagggccatggctcaggcttgggggggttcctggcagcgcaggcactgggccatctccggctgatactgctcgacctgcagggtgcagctggagaatccaaaccgggagtagagccgggatgaggcttcagccaggacggcttcagggtcagcggtggagtcgatggccaggtgtgcagaggcaacatggtaagtgagcgtaagggcccacaggtgcagctcatgggttgcccggactcctggcaccgacaacagcg

SEQ ID NO: 467383 - DNA, 1000 bp, Homo Sapiens; identical to SEQ ID NO: 157530

SEQ ID NO: 467384 - DNA, 1000 bp, Homo Sapiens
tttttttttttttttaatgtttaaaaggtttttattaaattatacaaaaacaggcagttagaaattgtgttttcttcctgccccattgacatttctaaggccctaatgcatttgttctgaggtttgacagttgaagcccttcaccagtgctagggaaataaagcctcctcaaccttaaggatttcagtgataagagtctgaaagtctagcacttcaggtagactttggatgaactaagaggttccacagtcaccctgtcatataactgtctgacagaaataggggatgaggtctataaaatggaaagggtggtatttcgtttttattggtaatgaatgatttggaatagaagcatacagaactgcaaatttcaaggacgttagtgtacatggcctggcctttgaaatacaaggagaaagttgggtgcagaagaaataggagaaaactacaataatttctgcctcattgagtctgtgaagtagacccacttatggcacatacgttcctgtcttagaggcctggaactagcagatctcgtggaaagagttctttcccatggaaatgacaacacaggcaggtcatttgagtggaggcttaaaattcctcaggatactggatcagggtaaaagctgctccttagattccagatgagaatgtgtatggtgtgttcagcatagggaacacagcttttctggggaaatgacagtgcttccattgtgagccttgaagctcactgaacccaagacggatggcaggtggaagctctgctaaggagaggcccttcttacgcctctttctggggaacctgagcatgttagtgccttttaggtaatgttacttgtgcagcctaactgaaggatgaagtcctccagcttaccaccctagcccaccctggcttgccccgaactaaagatttatgtcactcattcaatcttctgggtctacaaaaccaggagaatggaagagaaatactaaaatgcagttgtctagcagccgtact

SEQ ID NO: 467385 - DNA, 1000 bp, Homo Sapiens; identical to SEQ ID NO: 337416

SEQ ID NO: 467386 - DNA, 1000 bp, Homo Sapiens
tgaagaggggcacaaaccaaagatttattttgcaagtgaaaggggcagcccaggagacccagaaaaaaggaaggcaaggctgagagcagaaagcctggataaaggaagaccacagaaaggcctgcaggagccagattgcggcccccaggaaaacccaggaggcaggctgtagagtgatcctgggcccagcctcaaagctggactggaggggctttacgactcaattccaggtgcagcatttgcaggagttgctgaacaccaggcctgtcgggcagctttgctggaacagccgccccgctgcacagctgtagaagctggaccgttcccgaggattgggatagagcccatcagctttgccctggcagaacgtgtcttgtccagggctggggccatgctcaggttcagagggctgacctggttttggaacttcaagctctggggtgcctgaaggcaagtatggaagactcagttcctgccgtagcgtctggatgagggggtatcggccctggttgcaggagaagccggcaaagtcatctaagtccagtgcccagaccatggccccgcccagtcccttctgcttcagatagctgaccttggttttgaagctctccacatcatcaaagcccacccactggttgtcccggaagatgtagggcaccttctgatcctggattctctgtttggtggcccccttccaggagcagacttcatagtaggccagcatccctccttccttggtgaaggggcctggagtgccagaccctgtggctggggcccccactctggtgtctgatgaggaggccagtgtgaaggagcgtccgtaggtaggcatgccaaggatcagcttgctggcaggggtccccttctgcagccactgttgcacagcagcatccacgttgaggctggctgctgcaccactctcttcttgcctcttgtagagggggctgttatgtcccgtgaccttctcccaagagccatggaagtcgtaggccataaggtt

SEQ ID NO: 467387 - DNA, 1000 bp, Homo Sapiens; identical to SEQ ID NO: 335785

SEQ ID NO: 467388 - DNA, 1000 bp, Homo Sapiens; identical to SEQ ID NO: 337417

SEQ ID NO: 467389 - DNA, 1000 bp, Homo Sapiens
aagattgaatgcacaaaatgcttttattactctaagcaaataaatcaatcaaatcacatttcccattagacagcacctcagctcctctatacatacagcagttcgctggattgaatacacaatgaacaactgaaaatgatcaatttccatcattctgataacacgggcaaaaaattcaaactctctgttagaatacaggtactagtaatcaaaaagaaaatttcttgatatctcccactagcattttcagatttagaatttaaccatgaagtacatatctagaactaatgacagaaaaatcgcattttaaaataatattacagttcttctgtaaacctcagagtgatttctgtgtggggaacttgctgaccagaaaattaaatgagaattttgtacatcctcagatagccaaatagagttaaagggccactcccacaccacccccttcaaaaaaaaacaaaacatgttttctctctttttacagatattgacacagtatagtctcacaatttttctcaagtgggatattaatgagggtaagtagccaatagtggcagggctagatacacctcagatttcgagtgcaacaagggtaagccccattaatccatgcaaagaactttcatgcatatagtttagtgcatataatatgattatagaaccagaagttctttctttaacattttgcttttcactaggcaagtcaatttacccagcatattctgaatagtgacatagcatttttcacaaagccagtggttgactttcatgttaacaatgcctcaaaaataccaaacattatattataaaatcccagtgctaattaaacaatgaacatttgccttcctgggtattttacaggtttacttaaaaaactgagcatgtgtatgtttatttgtaaagctcaaatatttaaacttgcagaagttgtgcctacaagcagttgaaagtataaagcaggttttaataaaatgtagtaaaaaatgaacacctaattgca

SEQ ID NO: 467390 - DNA, 1000 bp, Homo Sapiens; identical to SEQ ID NO: 158187

SEQ ID NO: 467391 - DNA, 1000 bp, Homo Sapiens; identical to SEQ ID NO: 246437

SEQ ID NO: 467392 - DNA, 1000 bp, Homo Sapiens
gaaatataagtattgattttttttgttttgaggatataaaaaagaatactccaccccgtgcctcccccaaccacaaaacaccctggttattggttcctaagttatgttaaaatggaatttgctgctaaatatgcttcacttgataaatactgcatcttggaaggattaatactgtccatattgtaagggaatattagtttaaatatgttcttattcagaaataaaatgcatggctctataataacacattagtactgtagagataagaatgtgtcatcagccatggcccctaagtggccattgatgacatggcataagatcacagttttaacctcctttaatatcaaactctcctggctctctgaaatagaagcataggaattacagctaagaacaaacaacaaaagaaaaactcagttcatatcctcttataattggaggaagggctaacatgccagatctaaggatttgggcatctaaaaagacaatgcccacgtaatgcaccataaaattctgtaaacctttttaatagtatatatatgtttggctttagtacaattaccaagtgtaatcagttacagtaattctgtatgtatctcagcagtattattttccagcatggctttacattttaaagaacttaataactatagaataaacagatgcatgctatacgagttggaatgtattagagctgggttcccttttgtgtgtgtttgtgtcacgtgtttagtttatccatagtcatgaatactatgttgcctagatacagtggggaacaccgggaaagtgaaatgcagttttgttttctggaaggcaaaccaagattcttggtacatatttttctgtttcaaagcataggaaaactgttgacccccaaaagaaggctttctcataaaacactcagagtgaattatgtaactgttgtcaattgtcttctaatgtgaaaaccagtccagaagacagaggcatcatggcattttaccttatctgagtattt

SEQ ID NO: 467393 - DNA, 1000 bp, Homo Sapiens
gcttcgggcagtttattgaggttttcacgttggggtaggggaagtggcacacacatgctcttgctgtgtacacacagtgaaggacctctcccgcaggcaagcacatgcccacagcttgagcacactgtccatgcatctcctgtccccaacaggcagtcgtggcctttggggcctggcaagttccgagctggctacgccccatgcttctccagggtgctgggcgacctggcaaggactagggcagtcccccactgcacccccagctcctgaggccaaacccagggcttcccactgcctggcagaggagccctctgtgaccgccaactctccttctgtggtccgggcaggatggtcttgcagccctcactaggctgtcacagagcctggggctgggctgccagaggacaccactctggggcaggagctgctgctacctccaggagttctgcgtcatgggggccacctcggggcctaggctgggcaccagcatgggactcagagggagcgcccaggagggactcctctctggctggaggcagagggccctgagtgccaggagggcccctgtcaggccgtgggggcggtggcagcgcagccccggtctgctggatgaactgctgcaggttgcactgacggagctctcggttcagctcctccagctcctgagcctgagcctgcaaggctcgctctgctgcctccagggcccggctcaccagagccaggctgccctgcacctccgcactctgccgctcctgaacagccaggtcctggtgcaggcgctcagtggcagatgccataggtgaggggggcccaggggcctccgctgccagctgcagctcagcctccagggcacgggcctgagcgtccagggcctgcagccgggcggcatgctcagcagtggccgcacttagtgcctgcaggcgtgcctgtccctctcgctcccgggcctgctcccggcgcagctcttgctcccagaaggcctcatggcccagctcctcag

SEQ ID NO: 467394 - DNA, 1000 bp, Homo Sapiens; identical to SEQ ID NO: 337421

SEQ ID NO: 467395 - DNA, 1000 bp, Homo Sapiens; identical to SEQ ID NO: 337422

SEQ ID NO: 467396 - DNA, 1000 bp, Homo Sapiens; identical to SEQ ID NO: 337423

SEQ ID NO: 467397 - DNA, 1000 bp, Homo Sapiens; identical to SEQ ID NO: 158188

SEQ ID NO: 467398 - DNA, 1000 bp, Homo Sapiens; identical to SEQ ID NO: 337426

SEQ ID NO: 467399 - DNA, 1000 bp, Homo Sapiens
tttttttttttactttttaagcatctgttttatgaaatcaaaccacaccatagccacactgtgatttctgcaaaaaggtggatccctgtacgagagtaactggagttcagcccaccctctactctctaagctgtccccgcaggcatggctctgcatgtgcctagagtgagtacttttttcaaattcgtacaagggtgccatatggggtagcagtgaaactacatcttgggatgcagacttcagttggaaacataagaaagaataagccagtgttttgaaatgatctaaaagacacctgataggtttctatatcggagaaagccacacataaggctcatagatgtaatggacaattcctcaaggtgaaaataacatgaagagctatcctggactcctccaatgacaattcagtgactccttttggtactgtttcccagagatgttttcttcttggagctggttcttggtagtagattgtcccatttcctaggtctgcctcttggccgtttttctccagtggcttctgctttcttttgagctgctttagagggactcttgtttttgctgcctttgggtcttcccctgggtctcttaggagagggctcaccggttggttcttgctgctgcttcctggggcggccgcgtcctctcttctgaggcgctggggcggcaggttgtccctgggctgaagtggacggctgccccgcgccctcaccgcgtgcgctcatcctgcctcccgccgccgctaccgccgctgcagccgcttcgcctcgaccgccccggagctgcccagcacctttcgggagatgaggtgatagggctggggacgccggcggggcgagcgcgagctggcgggctgcgagggctgctgttgcttaggctgccgccgctgccaccatcaacaccggacgtccagcggctgccaaaaagagaagaggggaggaggaggaggagaggaggaggcgctgccggtggcggcggcggcggtgggtgggtgccg

SEQ ID NO: 467400 - DNA, 1000 bp, Homo Sapiens; identical to SEQ ID NO: 337427

SEQ ID NO: 467401 - DNA, 1000 bp, Homo Sapiens; identical to SEQ ID NO: 337428

SEQ ID NO: 467402 - DNA, 1000 bp, Homo Sapiens
ttttttttttttttttttttttccacaaaaacaagcagcctttattgcagtattacaaaacacttttcattttggcaatattttacaacgcatttagctccaagggttggggagaaggttggaaactaaagggggaaatctcaacagacatttctagaagaaaaactgtcccagccctcccacccaaataaaaatccaaatgtcacttaatttcactacccaagaagaggccacgaggaaagcagcaggcaaaactctggcaatttcactatggatcatgtcagagacaaaggaacattcaaaacagtcatcagtatggtcggttgcgctgatcatttctgtagtcgtttcttcctcccattttgcctccatagccacctcggtctcctccgtagcccccacctcggtctcctccatagccgccaccactcctgtctcctccatagcctccacttcggtctccaccgtagccactgccaccaccacggtctcctccatagcccccccggcttctgtctcctccatagcctcctcgatctcctccataacctcctcgatctcctccgtaacctcctcgatctcctccatagcctcctcggtctccaccatagcctccacctcggtctcctccatagccacctcgatctcctccatagccacctcctcggtctcctccatagccgcctcctctgtccccaccatagccgccgcctctgtccccaccatagccacccccacttctgtctccaccatagccgcccccacttctatctccgctgtagccaccaccgctgcttctgtctccaccatagccacccccacttctgtctccaccatagccgcctcggtctccacctctgcccccacgacctctgtagcccctctctccaccgtagcctctcccccggaaatctcctcctgagggacgagagtcctctggtctaggctcattgcactgattgcaggaattccttcgagcaaagttcatatttccgcatga

SEQ ID NO: 467403 - DNA, 1000 bp, Homo Sapiens; identical to SEQ ID NO: 158189

SEQ ID NO: 467404 - DNA, 1000 bp, Homo Sapiens; identical to SEQ ID NO: 337430

SEQ ID NO: 467405 - DNA, 1000 bp, Homo Sapiens
gtccaaccatgagcatgaggggcttcttggtgtcatttccactccccttgccaatatttatttggaaacatttcaaactacagaaaagttatgcaaattacatcaggaacacacacatcccctgtgcggagatctgtgctttatgtctttgaaagtaagttgtcgagatcacagcactccacccctccacaccgaagcccgcagcttctcaggaaagggcagtcttgtgtaatcagtgcatatcatcacacacaggatgtctgacactggcaccacgctgccatctcagagtccatttcaatgctgggggtcatcggttttcagcaggttcttccctgggttcaacgcgtcttcccgccagagggatggaatcttgggtgagtgttgaaatgcgtcagaaacaaaaacgcaaagtggaactggagcacgtcacagaccttggaccagaagtggcctgtgaggcactggaagagacgccaccgtgcgagctgatggtcacacagcttgaggaccacaaagcccaggcaagagagcacccccaaagctaagtaggtagccgaggtggtgctgccatagtgcctgtgggtgcgcagcgcctgccccacagcggccaccacgtgagcacccagtgcgacctcgaagccctggggatgcagcagagcgaggccataactggccagggagacgcactcaagagagaggaacagccagggccgccagccgcggtctaggtagaggcaccaggccacgggccatgcaaagatgggcagtgtgagccactggtccagcaccgcggcacggcgccactgcgtccacaggcgcagccactgcacggggccatagagcagggccatggctgcgaacacgtccttcaggtagcggggacccagccccatcgcgccgcccctgtgcagccacgacagccccagcagcgtgtaggccatgttcacgagtgagttgaacggcatggccaggaaggcagggaggccggccacgggcg

SEQ ID NO: 467406 - DNA, 1000 bp, Homo Sapiens; identical to SEQ ID NO: 337431

SEQ ID NO: 467407 - DNA, 370 bp, Homo Sapiens; identical to SEQ ID NO: 337432

SEQ ID NO: 467408 - DNA, 1000 bp, Homo Sapiens; identical to SEQ ID NO: 158190

SEQ ID NO: 467409 - DNA, 1000 bp, Homo Sapiens
tttttttttttttctttttttttttttttttttttgggaatatatttatgcaaattttattgaaatttattgtaaataaagattttctcagtggtctagaaaatcagcttgaatgtcattcagcatttattgaagaaggatgacatcccttccacttattgcacaaacttggtagctttgagacaaatacagtagcacagtccgtttgaagatttgtccaaaaaattagtccatattttagtggctcagtgtcaagagttccctccctgtgcccccactgttgcttctgcagtgatacgaaggatgaatgcttaatttcttattagtcagaaaacttgaatgcaacagttgggcattcaaaaataatccagagaggtcataacctacttagccatttgagtgtggctctggtgtctgctaaaaaaagtagctattgaaaaaacagtgagagctatgatgtggttcactcattctagaagcattttcattttcctcccgaaaacccccccagtgcctcaccgagccccggaccttcacccaacacggctgccacgctcaaatgggcctgattcaaactcccaggtacgtccctggcaccagggagtaggataagaaaacctccagaagtgaaactgatgaggaagtgacatttaatcacttcaaaaccgaaacttcactggcaaggtcaaaaccccaggccaaggctgacaatcgagcgctggtcagttccaggggtcaggctcggaacctgaaaatgcagatcctagctgttgctgcgtccctcaggtgtggaggaaggaaaaacagcctaggtgtatgtgctggctgtggtgagagtcgaggtagaaagcctggaagttctgaaacgtgaggggatggatcacacgccccagccttttctcactcaccaaagcaaacttttacccccttcttccagtcggcacctttggaacttgttctccctcctaggcctggtttcagtggcccccaccacgtgtcc

SEQ ID NO: 467410 - DNA, 1000 bp, Homo Sapiens; identical to SEQ ID NO: 337434

SEQ ID NO: 467411 - DNA, 1000 bp, Homo Sapiens; identical to SEQ ID NO: 337435

SEQ ID NO: 467412 - DNA, 1000 bp, Homo Sapiens
tttttttttttttttttttttttttttttgcaggttcaaaaacagttttatttcattattatccaagtacctttgaaaagataattaattgtacaagtgtcatcgcatgaaaaacagactcgggcagcccctgctggcctagcctgagaaatgtacatatttacacgggccctcagaaaggaggacccaggactgcacagccggcggctggaggcaggtgcagtgctccgtcgccgattcacacagtggcaggcaagagacaagctgtgttgaaggcactcggtggcgcgtacaattgacagaggccctgcaggcctctgcatccgggcctgggccccacccagacctgggtacgtgggcaaatcccagagggaaagtagatcccagcacacgtgcccaagggaggtgccgggggatgggggggggtcacctgaagctggcagcagggacctcggctgcctcacttgggctgggccctccaagtattgctatgaggagtggtccaggctgcctccttgggggcaggacagaagcttgtggaccacttggagggaccccctacctgcctctagacacgggtagaccacagggatgggtggtacacccaacactgttccccatcgggctcctgagtacgaggtcatctgcctggccgtgacacccgtgcccgccaagggcctcgcctggcacagcggccagcccaccagcctatcagtccaccttctccactttgccgatgatcttctcctcaaagacgggcaggacggcctcgtcctctcgaacctcctcaaacaccaccccacagtcaaactcgtcgctcactttcttgaagtagtatctgtagctgccctttttggtcagcagctccttgaactggcccagggtgacagcgcggcccctcaccagggtgcggtaggggatgggttccccgcagaagtagtacgccacaacgatgctgtcacacggctgggcactcccgccgcccaccttcctctgcgat

SEQ ID NO: 467413 - DNA, 1000 bp, Homo Sapiens; identical to SEQ ID NO: 337436

SEQ ID NO: 467414 - DNA, 1000 bp, Homo Sapiens; identical to SEQ ID NO: 158191

SEQ ID NO: 467415 - DNA, 1000 bp, Homo Sapiens; identical to SEQ ID NO: 337438

SEQ ID NO: 467416 - DNA, 1000 bp, Homo Sapiens
gtatttaaaaaaatttatttgtgatctgtacatgtgataaagtggggtagacctttaaagccaacaaaacaaaaatccaaagtaaaaatgtataaatacaatatatattttcttacaaaaatgggagatttacaaaatatacatactgtacttatctctattttacaaatttcacatgcacttaaaagatacagcacaaaagatgccaaaacctgtgttggagttttaaaaatctgacagatgagatagttttgaaggttgaagaaacacaagatcgattttaactttaatgtaaaaagcagttccactcaagtgaacattacatatataaagtaacttgtacactttacagtaccctctatgattggcatttaaaaactgttctgagaaacaggatagtgttgcaagattggagggtagtgtcaaaggtgggataaaggttagctcccatgattctctgctaagctttaccccatcatgcaaaagaatccgagttctattacagaaaaaaagtacatgatttaagattaataaatttaagtcttccagcacatttcaaagaactccagaatcactttgaagtttaccttcttttaatgactttctttaaagatggggcccatggttcaaaccttcctcttcgttcactatggtatctgctgatcgcctcccaacccaaccacacagagacagggtcagcatatggatgatgtttaataaacagattgatggaaccaagaaaacaggacaaaatggctctttgctttttttttttaattaactttcctttattatgaggctgaagacattatgtttttttacctcaaaggatccaaatgggagaaaaaaatagaaaagaaacctaaatataggcttatagcaagaaaaagtaaatgaagggagagatttccctgaatattttaacatagtctgttggatcatgtgttccgaattaaatttatttaaaacagacaacaaaacctcttacatttcctttagc

SEQ ID NO: 467417 - DNA, 1000 bp, Homo Sapiens; identical to SEQ ID NO: 158193

SEQ ID NO: 467418 - DNA, 396 bp, Homo Sapiens; identical to SEQ ID NO: 158194

SEQ ID NO: 467419 - DNA, 1000 bp, Homo Sapiens; identical to SEQ ID NO: 337441

SEQ ID NO: 467420 - DNA, 1000 bp, Homo Sapiens; identical to SEQ ID NO: 337442

SEQ ID NO: 467421 - DNA, 945 bp, Homo Sapiens
tcagagagagaagaaagttttcttctgatgaatgactctgctcagggctcccttcatgtctctgttcctcaggctgtagatgaaggggttcagcatgggggtcaccacagtgtacatcatagccatgacagtgtcctttagagtagaactattagctgatgagcataagtagagaccaataacggttccatagaacagtgacaccacagacaggtgggagccacaagtagagaaggccttgcagatacccttagaagaagggaccttgaggatggaggagacaattcttgcataggacccaaggatgagtaggaatgggatgacaagaatgagccctcccatgataaatatcacccattcattaactcgagtgtcagagaaggccagcttcagcagagcagacatatcacagaaaaagtgggggatcacattgtctgcacaaaaacacaacctggccatgagtaaagtgtgtaacatggcatggaaggtggtcagcacccaggacagcgccaccagggtgagacagagcatggggctcatgatggcggtgtagtgcagggggaagcagatggccacatagcggtcataggccatggccacaaggaggaagctctccaggtctccaaataacaggaagaagtacatttgggtcaggcagtccgcataggggatggatgggtcctggttctgcatgttctgtaacaacttgggaatggtcacggaagagaagcagaggtcagagaaggacaagttgctgagaaacaaatacataggcgtgtggagatgggaatccagtcgaatgaggacaatgatgaggaggttccccaggagggtggtaagatacatggccaagaacagggcatagcacaggttttgctgctctggttggatgggcaggcccaggagcaggaagtctgagatgctggtttgattttgtcccatcat

SEQ ID NO: 467422 - DNA, 1000 bp, Homo Sapiens; identical to SEQ ID NO: 337443

SEQ ID NO: 467423 - DNA, 1000 bp, Homo Sapiens
tgagaacaaaatattttatttctctcacaaaactatagtttacagtagtatttactaaataaattatataatttctcttttacaagcaataaactagatcacaaatatttcaaagacaatgtatgtacacgacataaggccttttataaatagctttgcttttctcatttcactagtaaacagtgaaaaaatctttatagaagctagttttctataaagtgaaggcagacctagtatattgatctttaatgaaccaatttaactttcaatgacatatgaactataattttgcaaaagaatttatacttaatttaccaatgtgtgtggatggatttttaaaaatatataagcagattacatatgttgcttatgtataatcactggatgcatgcacaatgaaataatgcaaaagtccataggaaaatagcacttccaactccaaaaaggtgattggcaatggtacagaaagcagcttaaatatagttcatgcagttcttcacagttcagcaagcaacagcaaatgatagaatagggagtatttttcacatcccatctgctgatcagccttaagtttgacatcttgaaaactcttaagtcaggttgatagtttctctgtatgtagtggggctcagcagttgctgtggataattctggtgcgagaacttctctgccataactgtgctcacgtctcatccatgtgcttaggtgatcaccattttcacttataaatagacgtcaagcacagaagcattgtcatcctgcacttccagagtgttgggctcagcggtcaagtagatggtcccctcttccaaggtaaatgttgaactggaaggtaaccctttgctgtttgaatagagtgtaggcctgtcgtgtggatagtgctcattgacgtataaggaagaagatgaaattgtggttgccaaggaagcagcttcaaacagtgatggagtgctagggaccaggtctggcctgtgtcgggatcccagggcttcttcatcaa

SEQ ID NO: 467424 - DNA, 1000 bp, Homo Sapiens
tcaatgttaaacaagttagatacctggtagtcgtctttaaccagtaagaatgtgttacactttccatacacattatggcaacatgatcagcagaccaaatgcagagaagccggtaggaacccgaggccacggaggctgctggaagacagctttccaagcttcagagatgctgcgcctgacgaggagcagatccaaacttccattcttcattatgacgtggggaaatcaagtccaaacattattcctacataatccctttcccaagtcaaatttgttttctccatgagccagttggtttcaagttccctaagtcatgtagtggtcttgcggcagttgttcagacctacctatggccccttcctggggccaaggcagtggtttgacccccatctgcctcttccagaaggtttcccatccaatccagcagccccagtgaagtccaagaatgccgtctccattctttcctgacctatatgctgtgagtcaggcacagagacagtgctggttcctgcttcggaagctgggcttggccaggtttggagggagccacaggaaaccaatctattcattcaaaatggtttcacaagcgatcttcacatctttggggttatctacaagtctgaccatatctcatcccaaatccccagttcctggttgagggggtgagaagatgcaggaatgtacctcccccaatgcagaacaacagagctgtttctctcctggccagagcagcctgtggctcagttctgagggcctgggtggcaggctccgaaggcaggtggaacacctgcaggaagccactccttccaaaaaagcctgtgggctgcagatctgctaaaagtctagagcggggcaacaaggaaaaacagccccaaggctgaggccaggtcaaaacccacatcaagcctccaaactggatttcctggatcacatcctcatgtaactaggaagccacctcacgtttggacaccacactctaagatgggggcaccttgctggc

SEQ ID NO: 467425 - DNA, 1000 bp, Homo Sapiens; identical to SEQ ID NO: 157438

SEQ ID NO: 467426 - DNA, 1000 bp, Homo Sapiens; identical to SEQ ID NO: 337444

SEQ ID NO: 467427 - DNA, 1000 bp, Homo Sapiens; identical to SEQ ID NO: 158196

SEQ ID NO: 467428 - DNA, 1000 bp, Homo Sapiens
caaaaatgacaaattctttatttaaatcaacaaactcatcttcctcaagccccagaccatggtaggcagccctccctctccatcccctcaccccaccccttagccacagtgaagggaatggaaaatgagaagccacgagggcccctgccagggaaggctgccccagatgtgtggtgagcacagtcagtgcagctgtggctggggcagcagctgccacaggctcctccctataaattaagttcctgcagccacagctgtgggagaagcatacttgtagaagcaaggccagtccagcatcagaaggcagaggcagcatcagtgactcccagccatggaatgaacggaggacacagagctcagagacagaacaggccagggggaagaaggagagacagaataggccagggcatggcggtgagggactgaggcccctaaattttggtcccaggggaaaggaagaggccagttggtccagttttgatggctatggggaagggaatgtattagtaagcatgggggagaggatgccagcaggcacctcagaggtgacaggacaggctgaaccccccaccctgacagaaaggagcttgagagctctggggctctctgggaatgtcactgctaaaatatatatctacatatatattaaccattcgtgggagggcaggggcaaggcctggggtgggatcagaggatctggcgtggcatcccgtagccagtcatgcctgcctgagacgccccgcggttggtgcccatctgtaacccgatcacgttcttgccctcttgcagctggttatctgagaagttccgaggattctccttggatttcttagggaaccagttgggatccccagagaagagcccatcatctcgggctactgccagcccacccagattcatcagcgtccgctgcacacaggccatgttctttccttcccagaggtccacagtttggaagatgtcagtggtgttaatgccatagcgctcagctgcttgcagg

SEQ ID NO: 467429 - DNA, 1000 bp, Homo Sapiens
tttttttttttttttttcaacaattccaaaggtttatttccttacgttggtattatacaatataacgcaaagggcaggaaatcacacaaaattcgctttaaaatagacaaagggtccagcactatcaagagaacattcaaccaggggcagcagttgaggcgcccaggacctgcttggacacacgcacatgcggccgcgacggaagcaagaggaccaggacaccgggcaagatccccgcagtgccagcttcccaggactcaggattccagtcggccatgaagcaataaattcaaacatgccccacaaggtgagaataaagccatcaaggtgatgaggaagaagtcacggggattttcttcttctaagtccaagcacagtggcaatatttcaagtattgcaaagaaaaacacacgtgtgtgtatttttgtctgttatgtggcgtgtgaccctggaaccccccgcatgggtccatggccccaccactgcctcccgcagactggggactcgttcaagtatctactgattcaggcagggctaaccgagggctgggcagaccaagggaggcccaggcggggtttgcagggcatgcccgcctggaatccggaaggcaggcctctctgcagacgccctccgtggccttgggcaaggcggaggcagggagggacagggctgtcatcaggcctaccctgccgaggagctgacatcaaaactgactgtcaaagctggacggggagcttttgcacatgttacttttttctttgcatgaagtattcccctcatctgcttccaggcccaggtagggagggtgctgggcacacacctgtcctgctgctgccacagggaggggcggcaggggacagccaccaacacaggtgtgcaaagcagcctcacccgcccgccacacgcccctgtgccatctgcctctaacctggcccagtcctcgccctcccaaaaccaattcttaaacacctacaagttttctcctttaaagaaaaaatga

SEQ ID NO: 467430 - DNA, 1000 bp, Homo Sapiens; identical to SEQ ID NO: 337447

SEQ ID NO: 467431 - DNA, 1000 bp, Homo Sapiens; identical to SEQ ID NO: 337448

SEQ ID NO: 467432 - DNA, 1000 bp, Homo Sapiens; identical to SEQ ID NO: 158197

SEQ ID NO: 467433 - DNA, 1000 bp, Homo Sapiens
ttttttttttttttttttaaactggacgctgcgcacaaagcatttatttgaaggaggacaagggagattgctcaagctacagactactcagattaaagcagaaggatcctctccacttccaggaagcttttcagctcaagctgaattaaccagggaatccagcagggactggagctcaggagaaagctcctcaagcaacttcttgggtcagctgttgaggaagggtgttttcttcatgaaaaagaggaagtttctccatcagccgctctcctccctgtccagcagggcgtggtaggacgccacgtccttctgcagctggcacttgcgggccagcagatgcgcgcgctcctgttgctgctgctccgcctccgctcggatttccctgagctccgcctccagccggccgaccacagcgcccaggttctggagctccatgtcatgccagtgcttggcatcgtgcaaggtgttctccaggcctcgtttcagggcacgtaaggattctgtctcagcctggaggctctggacttggcacgaagtgttgtgtaactccaccctgagggcagctgccagcttctcctcctgggtctgggacatgtgggccacctccgcctgttgcttagcttggagcagggctcctgcctccacccggttcttttcaacatctctctcccactgaattctgatcgtctcaaggatgtcgtccagaccagtgccaatgggagcatccatttgttccagctcacaccctgccaactgtttgtgcagcagcttcacatcctcttcatagtttcttgatagagagccaagttcttctttcagactttctatttgactctccaggtccattttagtcaaattagcctcatcaatgactttatacagagagttaatttcctcttctgctgcctttcgaaatggctgctcattttcatatctctctttaaagtcatctgctccggcctggatagtttctgtctgcagcatgagccgggcattttcc

SEQ ID NO: 467434 - DNA, 1000 bp, Homo Sapiens; identical to SEQ ID NO: 158198

SEQ ID NO: 467435 - DNA, 1000 bp, Homo Sapiens; identical to SEQ ID NO: 337451

SEQ ID NO: 467436 - DNA, 1000 bp, Homo Sapiens
ccagttcattgaggctttactgtaggcaagctggagaacccccagctctgtgaacatgcagtctgcaatctggataccttttatttaatgtcaagaattccctttgcacggcaaaaaggggtctgaggaaagcggagcagcgtagatgagggcgagggcggaagcaggacgctcgccaaagtggtgccgggtgccggctgcccactgtgatcccggctgggaggaacgccggacccacggcaagggcagggaaagtcatttttgacacaaacaagggtcctggggcataccaccccacccggtgccaggccatgcaagacgctgaaatggagactgtggcccctcgggacgcagcgcccggagctatggagcaggtgcaccaacgtgaaggggaatcctttgggcgcttcccgaggcgcctgcagggtgtggagcacagcagggtctgtatccatgtccgtgagcacgggcagtaacagatagcaccaattgggaggcccagggcaggagagcctgaggctcagactctagcacccacttgcccggcgctgctgggaagagacacgtgacggctactctcacagcaaaagcctctccctcgcccctctgccctgggagaactggaacaaatcatcatggtgaggtctgacctggggccctaactgcctgtgggggaccaggccactgttgtgcagtgacaagatgctgctgcaccagattgaggggctggggacaggctggggccgaggcggcaccaggagctcccatggagaaagagccctctgaatgtacaacctggggcgttccgtagccaatctgttcccggctcccaggaaccccaggagctggcctcctgtcgcttctggttttatccgtgggtgagagcaaggaaaggaagagagaccaggaaaggaagagagaccaggagggccaggccagcagcttcccgagcagcggaggtaggcggagagcgcggttgggcagcgcgcgccccttcccg

SEQ ID NO: 467437 - DNA, 1000 bp, Homo Sapiens; identical to SEQ ID NO: 158200

SEQ ID NO: 467438 - DNA, 1000 bp, Homo Sapiens; identical to SEQ ID NO: 158201

SEQ ID NO: 467439 - DNA, 1000 bp, Homo Sapiens; identical to SEQ ID NO: 338790

SEQ ID NO: 467440 - DNA, 1000 bp, Homo Sapiens; identical to SEQ ID NO: 337453

SEQ ID NO: 467441 - DNA, 1000 bp, Homo Sapiens; identical to SEQ ID NO: 337454

SEQ ID NO: 467442 - DNA, 1000 bp, Homo Sapiens; identical to SEQ ID NO: 158203

SEQ ID NO: 467443 - DNA, 1000 bp, Homo Sapiens; identical to SEQ ID NO: 337455

SEQ ID NO: 467444 - DNA, 1000 bp, Homo Sapiens; identical to SEQ ID NO: 337456

SEQ ID NO: 467445 - DNA, 1000 bp, Homo Sapiens
tttttttttttttttttttttttttttttttatttgacaagcagcagtatcatgtttgtcattttaatgtagatacaattattaggttatctgtcatattacaatatttaagtttttaaattttatgtcctttaagatacattaaaaaaaaaaaaaaagacacatcaactgcaaacgtgaaggggagaaaaagcatggtacccaaccgaatttccacttttcagcaatacttcactcattcttttaataaagttttaagaaatgtcataatgacatgagcttgaaatatctctaggcattttctttgacgctcatgacgtggcactggtgatgttgtaaacagcagaaaacaggggctgccaaatgaccaaattatggaggcacagtcctgctttttcccacaggaacacaccaaatggtgatggcaatgatcttctcacaccacgctggaggagagcgacatcacgcgacgtagctgtattcatctgccgacgcctggctgcgttctatgtattgtttgtctatcagaacttcaatacacttcttaatcatgctgatactgggattaaacctagctcttgactggctaatcacctcttgaataagggcattgtgccgaagcacttttcgtgctttcatgatacgaactatagcagcttggagatacattttccggtcctcatcaactgcacttctagtctgctccatttcttgtggtgtgtctttctgcattgatgtagtaattttaaattttgttcttttactgctaaagttcatatttaatgaaaacgaagattctgcatcaatatcttccttttctgaatcatggttaatcattttcacatcaagtaatgatttgattgtttttgtcagttccttttcattcatctgagtgctgtcctgaagctctttataactgacagtttcactgttgttaaaggcaagaagaactgccatttggtatgttgtaaccatggctacatatggtttgcccaaatag

SEQ ID NO: 467446 - DNA, 1000 bp, Homo Sapiens; identical to SEQ ID NO: 337457

SEQ ID NO: 467447 - DNA, 1000 bp, Homo Sapiens; identical to SEQ ID NO: 337458

SEQ ID NO: 467448 - DNA, 1000 bp, Homo Sapiens; identical to SEQ ID NO: 335786

SEQ ID NO: 467449 - DNA, 1000 bp, Homo Sapiens; identical to SEQ ID NO: 337460

SEQ ID NO: 467450 - DNA, 1000 bp, Homo Sapiens; identical to SEQ ID NO: 337461

SEQ ID NO: 467451 - DNA, 1000 bp, Homo Sapiens; identical to SEQ ID NO: 337462

SEQ ID NO: 467452 - DNA, 1000 bp, Homo Sapiens; identical to SEQ ID NO: 158205

SEQ ID NO: 467453 - DNA, 1000 bp, Homo Sapiens; identical to SEQ ID NO: 337464

SEQ ID NO: 467454 - DNA, 1000 bp, Homo Sapiens; identical to SEQ ID NO: 158207

SEQ ID NO: 467455 - DNA, 1000 bp, Homo Sapiens; identical to SEQ ID NO: 337466

SEQ ID NO: 467456 - DNA, 1000 bp, Homo Sapiens; identical to SEQ ID NO: 158208

SEQ ID NO: 467457 - DNA, 1000 bp, Homo Sapiens; identical to SEQ ID NO: 158209

SEQ ID NO: 467458 - DNA, 1000 bp, Homo Sapiens; identical to SEQ ID NO: 337470

SEQ ID NO: 467459 - DNA, 1000 bp, Homo Sapiens; identical to SEQ ID NO: 337471

SEQ ID NO: 467460 - DNA, 1000 bp, Homo Sapiens; identical to SEQ ID NO: 337472

SEQ ID NO: 467461 - DNA, 1000 bp, Homo Sapiens; identical to SEQ ID NO: 158210

SEQ ID NO: 467462 - DNA, 1000 bp, Homo Sapiens; identical to SEQ ID NO: 337474

SEQ ID NO: 467463 - DNA, 1000 bp, Homo Sapiens; identical to SEQ ID NO: 337475

SEQ ID NO: 467464 - DNA, 1000 bp, Homo Sapiens; identical to SEQ ID NO: 246438

SEQ ID NO: 467465 - DNA, 1000 bp, Homo Sapiens; identical to SEQ ID NO: 337477

SEQ ID NO: 467466 - DNA, 1000 bp, Homo Sapiens; identical to SEQ ID NO: 158211

SEQ ID NO: 467467 - DNA, 1000 bp, Homo Sapiens
gaattcagttttcacaaaggttttcactgctcgtcttcttagatggtagtgcactttaggtagagtagactgaaaagacgccatagcaggtcagtgctgcctcctttgagtggctggtcaacatgagtatgtgcgaacagtggagttgtctaacctctgcagtcttgatgaagcaacatctgttgtcatttttcttgactgcccagaggttgtggttaacctaaatccagctggtaatgtttctgaggacccaggcatcatgctgattccatgtacttcacgaggaggaaactgccttctccaggttgatccacgtctgaagttcttgtcatcactttcatccagtcgcctttcagttcccagggccaagaggttattgtattctctttcaagaatctgccttgcctgggtgttctgtgttggaatctgtaataataaagctaagctgctgtagtcaaagttttcatccagggctataagtgagccatgcacaccgctctcaagtatattatttgcatattctcgaagtccaattgcttgtatccagcgaataactcggtcattgctccacaccaacacgtcttttatttcatgttggcttgcttcccgtcttctttctagttcttttctgtcataattcaacctctttaagcacataattccatattgtaaacttgttcgatggaaactatccaccatttttaaatggacacggagatctttttttgttaggtgatctaacattcttgcatctaccaagcattccataaagtaacttctgtactgaggtaaccccaagctgggaagccattcatttccaatccactcatgattcatatctccataagccagggtctgtagaaaaaccggacactgggcccagcttccttcctcagattctttcgtttttgctggagctgcaagattttccatttcttcatgagtcacccaaacgttgcctgaaggagttcgagatgttggaggagctgaaggacttgtt

SEQ ID NO: 467468 - DNA, 1000 bp, Homo Sapiens; identical to SEQ ID NO: 337480

SEQ ID NO: 467469 - DNA, 1000 bp, Homo Sapiens; identical to SEQ ID NO: 335669

SEQ ID NO: 467470 - DNA, 1000 bp, Homo Sapiens; identical to SEQ ID NO: 158213

SEQ ID NO: 467471 - DNA, 1000 bp, Homo Sapiens; identical to SEQ ID NO: 337483

SEQ ID NO: 467472 - DNA, 1000 bp, Homo Sapiens; identical to SEQ ID NO: 337484

SEQ ID NO: 467473 - DNA, 1000 bp, Homo Sapiens; identical to SEQ ID NO: 158214

SEQ ID NO: 467474 - DNA, 1000 bp, Homo Sapiens
tttttttttttttttttttttttttttttaaacagaaaaataaggatgtttattaaggacatttctagcccacagctagggctcatactcggctctatgagccactgtccgacctcatccccattcaatgtgaatgacattagggaggccgggccacaggtagatcccactgcctggctaaaggggccatagcaaggggtccctcccatgcaaggggtctctcccatagccaggtatagaatagatacactgctgcggatgaagagggaaatctcattggactaatacattcccctacaccctgcctggaccctctcattcctccccacctcccaagatgatgggtcaaaggtacctagcactattatgtggggtaccaaaggaagcccctttatttgtcccagaactgtgggaaaaggatacccttcccttctcagccatctcaggcctgggggctactgaggtagagggggaggggccaggccactctaatcccccttgtgggccctgctctggacctgccccttagggaagcagggggcattttgctggtatgggaggctgggacatcagcccagactggaatgctgcagttcttcccgaagccacgagggcactggctgtccaagccggctcagcagcttcgacaactccaaattatggttccggaaaaaatccgtaaggaaaagacgggactcagtgtccatatctggatacctccggcctttgctccggcctagacagcgagtcttaccaccttcaagtccctggcaccaaaatcccttatcatcatcaaacctgagggtccgtgtgtagttcagaaagggtgtgatacccaggaacttctggatgctctccattgaggctgctgggttggtacgcagctcttgcccatccacaatcagcaactgtccagaggggtagtaagtcagccagcgttgtagatgggtagaatagtagccagggacaagacagcggttctgcagggagcgtagtgcca

SEQ ID NO: 467475 - DNA, 1000 bp, Homo Sapiens
ttttttttttttttttttttcatttgacactgaactttatttgttctgaccatctgatatactgtccaccccactgggaaacagagacaatgcccatgagggtgggcctctgcagaaggccagagacatgccaaaataaatactgtggtcaggcctcaggaacagcctgggaggacaggttctgtgactgctagtcaaccacccaatcaggtcttctctcttctcagctcttaatgagtgctgattcttcaaaaggctcccagagctgcactctggagaccaataactgacttcgatatctcaagtcttgattacaaagaaatataagttacccagttgtctatgagaatccaactgcctttactgtccatgacccaaatatggagtgggttggggagggatcagagatagaaattaacctggagatttccagtaagcatcaagcaagggctggcaaactgattccaccagagaaaccctgcaaaatatgaccagggttctagggttgccccagaaacattttcctaggagctatttgtgctacataaccagtgctgagcaagtaagggcttgctccccagagccccatgccacccatgtaggtttcttaatgcagactccacacttttagatcccatggggctgctgcttcccaaagctggtaaagtgaaagcatttcccatcatcaagtagcagtactctctctcctgtctgctttctaagcaggccccaaggagggctcaagagtgagtataagacttgagagaagtagagaaaatactgcctaggtacacccagtcctccctgctattccagctccagccacctgagggctcctggcttcagaaaatcaggcaccaggccctggctttgctcccagaaaaggcttggaatcaggaagcctatgcccagcgagcctgggggcagctctgtttcaccaacacctgagggcggtcgagtgcactacaggtctcaggtttcaggggggatggcagttgcc

SEQ ID NO: 467476 - DNA, 1000 bp, Homo Sapiens
cctcatgttctttctttttctttgaacaggaccagtgtttgaggtctttggtcttctttttttttcttgtcatgcctcaggggtcttgtcatttgtcagctgttccctgtcggtcatgtcctcctgaggaggtctggctctgtcaaagaatccacacttccataaagctaaggttaaaatggcgagaaccaacaatccaagaagtattgctagtattattacccataatgggattgagaaggaaacattcggagttgcccaaataactgatgtcttaattgctatgcttccttctgggagttttgctggctgatctgtataaggcatcttcttaacttcaaaggacaccagggatgcaagagcatagggatcattttttctctggaggaaggtgtgggcccataatcgtgacctgactttcaggactgcgctttctcctccttcgagtcgtcccactgcacaggagatttgtaaacactcgatatttgtacaattcagtatttttgcagggctctgtctgtggaattcgaccacatgtacatccctcttcctgacaagatgaggaatagtagagtttcgcaaaaaggcgctgagctcaggggtgtcctctggggaggcagcaggctttatatcctgtggattgatattaggatttggttggcactgcagaggtcccagagtttgaatatggaaaatatagagaagaaattcatcccgggcagagaaaggccagcccacctccaggatggtgtcactgatggtacttggtccaatattgtgcagctcataaatatgttccaccaatggtccaacctcctcctctttgtggggctcctcttctggttcccagttatgaatgggcagaacaatctgcggagggtgtgacactcctcttatttccacctgcgctacagcagtgatgttgatttgcaggctcacaaaattgctgtctggattgtccttgttggaacttctgatttggagatcgaagttaatgctc

SEQ ID NO: 467477 - DNA, 1000 bp, Homo Sapiens; identical to SEQ ID NO: 337487

SEQ ID NO: 467478 - DNA, 1000 bp, Homo Sapiens; identical to SEQ ID NO: 337488

SEQ ID NO: 467479 - DNA, 1000 bp, Homo Sapiens; identical to SEQ ID NO: 337489

SEQ ID NO: 467480 - DNA, 1000 bp, Homo Sapiens; identical to SEQ ID NO: 158216

SEQ ID NO: 467481 - DNA, 1000 bp, Homo Sapiens; identical to SEQ ID NO: 337491

SEQ ID NO: 467482 - DNA, 1000 bp, Homo Sapiens
tttttttttttttttttttcctctgaagggtaaaaattttatttttgaggaatttcttactgcacattttcaaagagagtcacataagaaagcaaaaatgttatcctcccctcatcctagaaataaataagaaggacataaattttttttttttttaaatcatgacacttggaggtttagcaccagcatccaaaatgaacaaaaacggaaaaaaaagcatttactatatatttcagatttctttggttggggttctccccatgtggtattaatatttcttgtttcaatatatatattaccaaaacagtaaaaaccaggaaaaaaaatagaaacctagcggttgctgaaactggagaggctactctcttgtcttccgtgcaggaattcccaggttctcagcttgctggaaaaatttgttgacattttctttttgtagatgtttcttaaagaataacagtaaacattccaatgtccaaatcttggttagtcttccactttattgcttggatgtttctttggtgttggttaaggttgtggcctgctttttgctttatttctgaatggtcattaattctttaggtcacctgccgatggtgaaggtgcctgaggagcctggtgttactcagcactgctctgctgggtgggtggagcagggttctcagttggtgcttcacctgccttggcctctttgccatcttgtgaaggagcgttaggaggacgcgggcgacgccggtaattgtagggacgccgatatccacggcgaacagacggctggtttggaccactggtggcttgctgattttctttatcttcagcctctccaactgctggggcaggtcgtgggcgaggaggtcccctgctacggtaccttgggcggtaagttggatttcgatgaaccggtccctgaagttgtgctccctctgggactccatccttcatctctccaatctcaccagcctgtattctgttgggatggggtaagacccgtgagcgacggtca

SEQ ID NO: 467483 - DNA, 1000 bp, Homo Sapiens; identical to SEQ ID NO: 158218

SEQ ID NO: 467484 - DNA, 1000 bp, Homo Sapiens; identical to SEQ ID NO: 337496

SEQ ID NO: 467485 - DNA, 1000 bp, Homo Sapiens; identical to SEQ ID NO: 337497

SEQ ID NO: 467486 - DNA, 1000 bp, Homo Sapiens
atgatatatttgattactagtataaccacagttgaaaacttaaaaaaaaaattgacatttttttgtaatggtactaatggatttataaaaggtttctgtttccaaagatgttattggggtccacatattccttgacagacttcagcatcccaaagccgacatcagagatactttcctttagccattgcttccgtaacttgcccactccatggtgatgtgacaggctccctccattagcaaggatttcttctctagcagctgcctcagtttgttcaaatacggtcagtgggtcactaattcccctgtagttaaaggcaaaatagaagtagatacaagcacctgcatcgtaagtctgcgtcaccctgcatgtagaaaaaggagcaaactgaacacccttctctttgcattcccttgttattctttcttttacatttctacagagatctaccaccctgtcccaaggagcagaagtctcaaaagattctcctaatacatagtattccaaagccaagtctcgaatgtatgcaataacataggtcagcaaataacctctctgtccattatcttctccagctgccaacccaccaaattttgcagcaatatcatacacttgtttttcatgttgaagaaccttctcacgatccccctcaaacagtaatgtggctacacttagctgatttgggtcaaatcctttaaactttgtaatataaaacttttttaatccgtccaaaaatgatgtaaagatagaggaaacctgaggtttaagagcatgaccaaactgaaactgcttgttgtccatgaggcgaatagatgccggagcacatctctgttttgcaatttctcttaaacaggctactccttgttcaaaattagggaaagctactgagccatacttttggtattcagggactggtctgatttttattgtagcttctgttattacaccaagagttccttcagatcccatgatgaagtgatggatatcagggcctgttgacat

SEQ ID NO: 467487 - DNA, 1000 bp, Homo Sapiens; identical to SEQ ID NO: 337498

SEQ ID NO: 467488 - DNA, 1000 bp, Homo Sapiens; identical to SEQ ID NO: 158219

SEQ ID NO: 467489 - DNA, 1000 bp, Homo Sapiens; identical to SEQ ID NO: 337500

SEQ ID NO: 467490 - DNA, 1000 bp, Homo Sapiens
tttttttttttttttttttttttccagagtccttgattcaactgtttactaatcagaaaggtcggtatagtcggtcctttttctactgctggcaagtgatttttgtatattttattacaaataaaacaatattgcttgacagcatcatctgtcatcttacaaatatacaactacacagtcctaaagtaatagtatgtctctagaactgagcttttcttaaaaacaaacaataactatactattattaagtcctgcaccctaaatctatacagcagctttaatcaatgtggaaatgaaattatgatttattaatttacataaaattactttatacattaaagaataatttttcaaattgttaaaaaaacaaagtctgaagctgtcattattgggattcgtgggacgtggtttgctcttctatcacctgcttcacaatttctgccagttttagtcgatctactttatctgtgaatccacgaccattccagctgaagctctgcagagtatctcttaggagtttgcattcccggttatacttccaagcctcctgcattacttcattcagtttctcatcttcattctctccagcctgggggagaatacactgagcaatcacatctcggagtttttccaaggcaacattggaatcctcggctccattctcatggtcgtggatatagacactgtcctttggcttggtgccaagtaacttcctcttccgcagaatggggttgttcactgagtgcaggggtttgaggctgactttcagatcctggattctcatgttggccaactgttccgcgtgagcctgctggattcctgcaaccactgccttgtccatcatcagctgagcagaaggcagcacattatccagggcctcggtggaattgagccaggggtggtccagcactccctcgatggtgagtctctcctccggtttgaccttcaggagcttcctcacaacatctttggccatctctgagatctgactccactcttc

SEQ ID NO: 467491 - DNA, 946 bp, Homo Sapiens; identical to SEQ ID NO: 337502

SEQ ID NO: 467492 - DNA, 1000 bp, Homo Sapiens; identical to SEQ ID NO: 158221

SEQ ID NO: 467493 - DNA, 1000 bp, Homo Sapiens; identical to SEQ ID NO: 337504

SEQ ID NO: 467494 - DNA, 1000 bp, Homo Sapiens; identical to SEQ ID NO: 158222

SEQ ID NO: 467495 - DNA, 1000 bp, Homo Sapiens; identical to SEQ ID NO: 337507

SEQ ID NO: 467496 - DNA, 1000 bp, Homo Sapiens; identical to SEQ ID NO: 158223

SEQ ID NO: 467497 - DNA, 1000 bp, Homo Sapiens; identical to SEQ ID NO: 337509

SEQ ID NO: 467498 - DNA, 1000 bp, Homo Sapiens; identical to SEQ ID NO: 158224

SEQ ID NO: 467499 - DNA, 1000 bp, Homo Sapiens; identical to SEQ ID NO: 158225

SEQ ID NO: 467500 - DNA, 1000 bp, Homo Sapiens; identical to SEQ ID NO: 337512

SEQ ID NO: 467501 - DNA, 1000 bp, Homo Sapiens; identical to SEQ ID NO: 337513

SEQ ID NO: 467502 - DNA, 1000 bp, Homo Sapiens
ttaaaacaaacgcatatgacattttacttaacagactggcaaaaatgaaaaaagaaacataatatcctgagctggcaggagcacaaggaaatgggtctcgtgctgatgatgaatgtgaattgataacagtttttttgtgatttgcgatagcacaaaattgaaaacagcacaaatgtacgttactctgggctcgctaaataggcactaaataaaacgagtcagtttcttctcccgagcaagtaaactagagggtagatccacgcgacccggagtctaggacacatcctcgggagtgaacagccacaattcacagacgatgtgtgcagccggggcatgaaaggcccaaggcaaacacaccacgaggtaaacgccgggactctgaggagaggggtggaagccgggacttcgaggaggggtggaattgacttagagacaggagggagcctcttggagggcaaagctgccctgggcaagtgttcttttctttctaaaccttccttctggtctctgtctggaaatttaagcgcgccccctggtgggagagaggaaggggaagaaaagggggtctcggaggagaataaagtgctcgtgggtggaagaaacctggaacagaaaatgccagaaaaacctggaacagaagtgcagacggcccgcggcggccccggtgatctccacactcaatcaccctctccaggggagcgatcgctcctgaggctgccagcaccccaccaccacccccaacccgctagtgccgatgacggccacagaggcctttctcgcccccagctcacctttgcacacacagttcccccgtgcagagtttgtgcctccctcatctcttagttctcagctaagactttccctgaccccacccaggtcatacctcctgtcgtcgcgccgcacgcagcatcccagacctcaccttcgtattactagagctggcccgttgtgattcaggtctgccttccacccaggctgtggccccttcagggcagcatgg

SEQ ID NO: 467503 - DNA, 1000 bp, Homo Sapiens; identical to SEQ ID NO: 337514

SEQ ID NO: 467504 - DNA, 1000 bp, Homo Sapiens; identical to SEQ ID NO: 337515

SEQ ID NO: 467505 - DNA, 1000 bp, Homo Sapiens
ttttttttttttttttttctacaccaacctgcttccactttattcttgtttacacattctcctgctcccagatttggagtcagaacactatgtgagctcaacagtcctgctcagagccatgttccatatcccaccagtttcccttttcccaacccccacccacccccactcagtaagtccccttgcccaggttttgctcttggagggaagaaagcagaagaaaagatgcaggactgagatgattgtcctgaccccgctacccccaagtgtaagagaagtcctggatggaatgggtggtgattccaatgagggatgggaacctctttccaaggcacaaggggccatcttctcaacatgctgctttttcagatttgggtagtatgttggccaggagctgggggctgcagcgcctccagctgactgaggaggagaggaatgtgaggacgctgatgcgggtccacggtcatcatcgagttcaggagctgccgcaatgctgaagaatgcctggggctttgtgggatgctgagttggttctgcacagcaagggccacactgtcacccttttggaacaccatgtcataagggccttccccaaacatcatggcatatagcacgcagcctagggaccagacatcagtccgctcatcgatgacacagtgactctgcacagagaagagctctggggctcggtaggagatggtgcaccgctgggctgcccagtcctgcagggtcagagcctggcgggagccctccacatggatgcatgcttgattcatggaacccaagtccattaaaactggctgcccctcatctccaagcaatatattggtgggcttcaagtctctgtgggcataacccttggcatgaatggcctcaaggcctctgcagatccccagcagcagccaaaggatttgatcctcggtcaggaagttgcctttgtccttcagcctttctatctcattccacagcgtacctctcttgaagaatggtagcagcagcc

SEQ ID NO: 467506 - DNA, 1000 bp, Homo Sapiens; identical to SEQ ID NO: 337518

SEQ ID NO: 467507 - DNA, 945 bp, Homo Sapiens
tcacagaaaggaagaggtccttttcctgctaattacattcgctaaagccttctttacttccttactcctgaggctgtagatcagaggattcaacatgggaatcaccactgtgtagaacacagaagccactttgtcctgattcagggagtagctggaactaggtctcaggtaagtatagatgcaggtggcatagaacagaattatggctgtcaggtgagaggcacacgtggagaaagctctgtgcctcccctcccccgaatgcatagaaaaaatggagaagagaacgtaggagtaggaggagaggatgacaagcagagtccccacaatattcacaccagccaaaatagaacttatgctttctttcaggattgtgtcagaacaagagagcttgaaaagtgggggactgtcacagaagaagtgatggatgacattggagtcacagaatgacaagctgctgacatggcttgtgttgaccatgaagttcagcaaccctgcagcaaaagccccggctgccatttttaggtagacggtcctggacatgatcaaggagtaaagcagcgggcgacatatggccgcatacctgtcataggccattaacccaaagaggatgcattcggttgtcgccagggagataaagaagtacatctgtaggaagcagccagcaaaagagatggttttcttctctgataataaatctgccagcatctttggggtgatggtagttgagttacaaacgtccacaaaggacaggttagccaggaagaaatacatgggtgtgtgaagctgggaatcgatcctgattaagaggatcatcccgagatttcccagtactgtaagtgtataaatcacaagaaaaaacaaaaagaggataatctgtagctccagcgtgtctgctaatcccaataggacgaactcagtcagtgaggtataattttttctggtcat

SEQ ID NO: 467508 - DNA, 1000 bp, Homo Sapiens; identical to SEQ ID NO: 158228

SEQ ID NO: 467509 - DNA, 1000 bp, Homo Sapiens; identical to SEQ ID NO: 337523

SEQ ID NO: 467510 - DNA, 1000 bp, Homo Sapiens; identical to SEQ ID NO: 337524

SEQ ID NO: 467511 - DNA, 1000 bp, Homo Sapiens; identical to SEQ ID NO: 337525

SEQ ID NO: 467512 - DNA, 1000 bp, Homo Sapiens; identical to SEQ ID NO: 337527

SEQ ID NO: 467513 - DNA, 1000 bp, Homo Sapiens; identical to SEQ ID NO: 337528

SEQ ID NO: 467514 - DNA, 1000 bp, Homo Sapiens; identical to SEQ ID NO: 337529

SEQ ID NO: 467515 - DNA, 1000 bp, Homo Sapiens; identical to SEQ ID NO: 337531

SEQ ID NO: 467516 - DNA, 1000 bp, Homo Sapiens
gaagagaaagaaaaatcaaatatttattaaaagtaccataatacagacccatttcaagtaaggacaaacacaccaacatatttcttagtagtttcctcacaatagattattaaagcatagaacaattattcatattcataaagaaatgacttcaaaataggttaaattgttttccatctactctgtttaataaggcaagaacaaatgattcactttagacaaatagtctcatcaaaaaagggctaaaatagtaaagattcatcacctaaagtggtaagctttggatatctgaaatataaacatgttagtactctgatgatgccagataaatgaatttaggcaagaaaacacattgttacaaaaagcctgggttctaaatcaggattactgagacactaacaatttcagatttttgccttcattccaagaagcaccaacccagttttctttagactgcctgggctggtttgggccaagatctagtcaaaatgtagtctgccagtgatgtaggtaaataagatagagggatgaagaaaaatttagcatcccagccagctgaatatcgagttcgcggatgcaccgatgtcagagcatgttccatgcagtcagtgaccaggttcaggtttgtgctacaattcaacagcccttccttcatgatattgtaaagggcatcaaaatactgctgtccataggtctccttaatatgcttgggggcttctttccaactttgcttcattcgctctaaggactgtgtcatgtttgtcattcccgttctgaagtagccaggttcaactatgctgattttcaccccaaaatgttgaatctcacgcctcagaatatctgaaaaggcttccactccatacttggagacacagtagcctcctacaaagaaagcaactcttcccagaatgctggagacattgacaattcttccccgtgctctcctcaccaaaggaagcatgctcaaggtcacctggatcacaccaatgaggttcacttt

SEQ ID NO: 467517 - DNA, 1000 bp, Homo Sapiens
ggcaaggaaccacatcccaagtttatttgtgcttttcaaaccagccagaacaaccagtaatgtcctcctcccaaggtttccttctctctcaccttctttgtgaaaagcttgtggaaaaggcagatgtggttgtgtggacacatttacacatggggatgagctatgactaggctggtttagtaacaggtttgatgaacgtgcctcttcccacttgtcttactggtagcttacagtcactctgaggtgtcaagagacttgggtctcttcagcaaagagaggagtccaaggcgttggtggggtggcagaagtagggagtgggaacttttgatgatcagtttcctcataaaggcaggagagagggaagaatatatttcctgggtttcatctttcttccacttcaaaggcagtggtgagatactcctttggaacaatcccaacgaggctgttcagttctcccacccaccagccatacatgttatactccttgctcagaatacggatgaggtcaccccgttggaaggacagttcatctggctggtcaccatggcaatcccataggccctggtagtaactggcatagtctactccttttcgtcgagtgccactctcatcctcttctagatcatgctcttcatctggcaagacttcataaatatcttcttcttctttctcctctgtaggctcttttatccccacactcccaggcaagatagtgggtctgcactgggaaccacaacttggggagtcaaaaccatcaatatcatcatatgtctcttctttttcttcttcctcctcatcctcttcatatggaatggttaaggagctcagatcctttaacaagaaacttatttgatccacccagtctctggcttctgctggactagtagctgtaaactcatagctgcgcctatcctgggaggtcagttcaaagcaggattctttcttggaatctcttcgcaggtggggggccatccgtacactgtagcccttaatgaggaag

SEQ ID NO: 467518 - DNA, 1000 bp, Homo Sapiens
ttttttttttgagtggctccactggctttaatctgccccacctcttccacaccaacctccaccctctggttccgatgtgcttggttacaaagcacctgattatttaagagaacgaaaaaccaccaccagttcctgtaaagaataagtcacaggtgcacaggtgaagggctgagttgtggtccagccccagggagtgtgggctgtgaggcaggagcgagctaaacctgtaggagcagcgccacggctgccaggatccacttcgctgccttctctttggtcttcaagttaaaggtccagacataggtggggccgcggatgcgtgttttgtacacgggacactcatagatgttcttggtctccatgcggtccacaggaatggccttgatgaagatgacaggcatggccggggtcagctctttcagccgcgcttcagcgatgactccagtctgggtgtcccagcgagccccttccatgaagagtccgtacacgtaggagccctctcgcggaggagcggtcatgtcctctcggtttttcttggtcacctcgacagacagacacatcttgtccaggggccactcgttcttcctggccatggactgcatgatggccgtgaggaacgactgggggttgaagaagccggccagccacacggtggtgggcagggcaaagtctgtcgtccaggcctcgagttccctgatgcggagcagcaggtctgcgtaccaggccgccaggcccatcatggaggggtaggcccgggccacccacgtatcaggcacggtgtcatagaagagagccgtggacagatcttccacgtcggtcgtgatggtcagttctcccttcagccccaggttcagctccttgagcgaacggcgcatttcgttggtcaggatgttcattctttcacattcttgaaaggcgactaccacgtagggggtcttttccgctgcctttgccatgatctcagccatgttgaaagtctccggaatcttctccaggatgt

SEQ ID NO: 467519 - DNA, 1000 bp, Homo Sapiens
gcagtgctacagctttattcccaaagggcaccagaagggtccctccaaggaataggagtcttagttatttcttttttacacttagattctccacttccctgatacaaacagtaacactggttctacaagttctagaaacagaacactgatgggaggattatctgagacacttgatgcacacgatttgtagcaaaagtctgtgatttctctgtaaattactaatctgaaatagacacaacaaaccgtccacagcttcaacttcaaatgatttgaacaaaaatagaacgagccatggacagtgtctgcatccctgtccaatttgatgtaaacaacatttgtagaaattgggtttgttaagaaagtttatccatatatctggatagcaataaaaagcgtttcctaggaaactgtaagatcctgtaccacacagcatacagcccaactaagaggaaaattaggttgatagctaaattcaaggtacaaatttacacaatttttcttaactcccgtgatgatctccgagtaaagtgggcatgtacatgggcagttgtatctgttttccttctggctcctgctgcattcttgcctgtgaagtgcattggtctcatctggatttcctcctcagctgtgattcacctggacggccacagactccctgtgcatttttgtccttcatttccccttccagcatggtggttaatactgcccttctgctgctaaggacaccaccgtttcatgtcttcccatttcttccaagacagctgccagcatgctcaggtttccatctgggaagttctgtgcttcccaaagatccaggattacgccagttgggctggatttggtggcaaagtaattcaagtacctgtccaggttcagcttatgggccagcatcctccagtcatggcctctcgtctggggggcatccaggctgctacagagcttctgccggatagggagagggatgctgaaagcactgggccccgtgaccgtggtgatggtg

SEQ ID NO: 467520 - DNA, 1000 bp, Homo Sapiens; identical to SEQ ID NO: 158233

SEQ ID NO: 467521 - DNA, 1000 bp, Homo Sapiens; identical to SEQ ID NO: 341248

SEQ ID NO: 467522 - DNA, 1000 bp, Homo Sapiens; identical to SEQ ID NO: 341248

SEQ ID NO: 467523 - DNA, 1000 bp, Homo Sapiens; identical to SEQ ID NO: 158234

SEQ ID NO: 467524 - DNA, 1000 bp, Homo Sapiens
ttttttttttttttttttttttttttgactgaaaaagaaatgttttaataaatacaaaactctccaataatgactctgctcagctcaggggcagcaggagtggagtgtcgggggcccttggtgctgagtgaagataaattaaaaatcccaacaagccagtgacattatgtacaggaggaaaggggtggggcttccaggacagaggccgagggtggcagggcaggacttggagtggctgtgacctcggtctggcccagctgcctctcccccttgtggagctgtggttcccagaggtagtgggggtgggagtagaggcaggacagaggagcaaaggcactgggcttcccacaggagaatgcaagaaggtcctcgatgccaccccttccccagctcaggccccatcctcttggtcacttggccctctggctgctccctaagagccttcggcttctttctccagctctggatcagttctggtctctggggctggccgccggtgggccgtgcagcgggaacagcatcgactctccttccccgagccacaggacagtggcagtgaacagtcatcccgctcacagtgaggcacccctgccccacatctgcaggtgatacagctcatctctccaaaagggggcactgaggggtgccagctctgactctctgggaaccactgcccagcaaaacggcagccccggggcccatcagcctgcatggggtcccccagctgggggtgggcccccgaccccactggacactgtttgcagcagtcggtggggttgacacgcacaggctgggcacaggccagccggggacactgcaccttctcacagtgcacctctccagtgccccccttgcaggtgcagacagcacacttaattaagccaaaggggggcacaacggggtgccaccgcgtacccgctgcccgccagctccggtcaccatcaaaatagcagccctctcctgggtcccggctccttggcagccctggcaagtctctgac

SEQ ID NO: 467525 - DNA, 1000 bp, Homo Sapiens; identical to SEQ ID NO: 337536

SEQ ID NO: 467526 - DNA, 643 bp, Homo Sapiens
cggtgcatcagatttattttttaaaggaatggattttgagagaaaacaacgtgggcagaagtatggaatagaaaataaatacaaatgtaggctattctgctaattgttttataaccacgacaaactagtacagagaatgccctgtacaaaacacaacaaaggttcaaacatcgagatgttcccttagcaaggctgaaaatttcagtctctggtatttggaatttaggctgcagtccttgtttctggatggatcactgggtgtgtggcacagtccatgcttttaaccagatttgaacagaagaatggccacttggcccaggtagaagtagatgaagtgtttggtttcatgtgtcacataactaccgaagttcctccccacgatgcaatgccaggtgggattgtacttcttgtcaaattccttcttgatatgagccgcaatgtccttctctatgttgtatttctccagcgcctgagtagcgcactccaccgagtcctgttgcatctcttccgacatgtccgcatttttgatcacggcctttcggtcgcacatggttaccgtggagaagggggctggccgactgcaacggtctcctgggggaggtgctagcacagctcaggcccggctagagctaccgtcgctacc

SEQ ID NO: 467527 - DNA, 1000 bp, Homo Sapiens; identical to SEQ ID NO: 158235

SEQ ID NO: 467528 - DNA, 1000 bp, Homo Sapiens; identical to SEQ ID NO: 158236

SEQ ID NO: 467529 - DNA, 1000 bp, Homo Sapiens; identical to SEQ ID NO: 158237

SEQ ID NO: 467530 - DNA, 1000 bp, Homo Sapiens; identical to SEQ ID NO: 337540

SEQ ID NO: 467531 - DNA, 1000 bp, Homo Sapiens
gttcaattcacctcttcatctgagccttgtgtctgtcatgtggtagcagctcagaagtataatcagcaaatgaatgggctcaacacacctttgtggcaacaagcaatcaaccagaacaactttaaacagacctttagtgactgaggtgtggtttaggacttcaaggttggatggcccaggcgggaaacagagtggagagctcagtaggccgtctgagactgctgctggcggtagccaccgcggcgcatgtagccctcgtttttgcggtagccgtccttctggtctcggaagtagcccccgtaggtgccctgcttgtggtcaaacacccgttcgttgttctccaccaggctgcccagcttctcggccagctgcagagccaggttctgctgggcagtgggctcagtgcggtgcatcaccactgtctgtgttggctggtccagggaggccatcagctcctcattaatgatcattttgctgatgatggagtgcacagtgggcagatccagctcaaacatgtctgacagcgtctccatgctgatggagtcatagacactgctgtaggtgaagaggtaggtcctcagtgactcttcctggatcttcctaaccagcatggtgcggactttgtcagcctcggggaaaaggtcccacactttcccattcatcttctcattgatgataaaactgtgacaggtcttccagtcacccatcttcatggccttggaggcagcgaccacatgttcccgcatggactcagggggacccagcaggggctgtcgctcgcccacgcgcagctggtggtggaactgcttgctgatcatgcgtcggcgggcatcgctctcatgggcggccatgtaggggatctccaggagcatggcagacaccaggtagacacactccagcagctccaggttgatgtgcaggtggaaggggacctgacggcgccgctccaccttctcctgctcctggttgcgctcctgcaggctgcgcagcagcaggccct

SEQ ID NO: 467532 - DNA, 1000 bp, Homo Sapiens; identical to SEQ ID NO: 158238

SEQ ID NO: 467533 - DNA, 1000 bp, Homo Sapiens
tttttttttacaaaaggtaggctccgtttattagagtcacacacaactgactatctcagtgtgactcaagaccacaaaaaacccatttctccttcacttctgagtcctggggttaatacctagaccagcaagtgtactgcttggggtccattcacaggtttacaagtttttcattgagtgcaatctgtgactgtgtgaggttggccaggtaggtcaccatcaaaaggtcattgatgttgctgttgagcatggtctcaaagtcatcgggaactattttcggtacttggttaaccaggctcatcaggaagcggcccacagtattgtcagctgacacctttccagacagtacatcctctgcatattgcaacactgtactcagggcatcctggatgcgagctgatgcccctcctacttgctgcaagtcacttgagagtccaatcactctgttggggctaaagcaggtcttcatgatcaggtcaactccgatgcgttcagtgtcgtagtacgcgtatttcactgtcagaggcgtgaacatcactcccatggtcctcccagggactcccattaaagtgctgacgtaggctttgatgctcatgcggccgttctggagacttgtgtccacagtgaggtggatggggttgggggcctctcggctgtagtactcatggatcagcacagagtgctctgtgatgtcatggcccgtagcgtaccagcccaggatgagctcatttggagaaacttttttatgcagttcatacatattcttagcaaattccatgtcaacagccacttcatcttctgactcattgtgcggcactgaaaagcaattggtgacctccactgagtgtttgtcgacagttcccaacagggtcccgataactcgggcagcaccctcgttgcgtctctcgtagctgtccacaatggaggccaaaatgactgggtgcagcctgaccacgcggccgccggggaagggccctggaagagcaggaccaggcagagc

SEQ ID NO: 467534 - DNA, 1000 bp, Homo Sapiens
ttttttttttttttttttttttttttttagagagagtggagctgctttattgcccttggagcccgcgctctcggaggctgtcttctgtcgccaagggtcccggaccgagtacacagtggcagctggcttagttggtggacggcttggcccactcgacgttgaggatgaggtggtcgtagccaaagccggacaccccggcaatggcacgcgcagcatcctcgcggcggtggaagctgatgaaggcaaagcccttggattggccagtggtcttgtccttagccaggtagatgcgggagatggagccgaaaggccggaagagctcctgcaggtcggtctcacgcgtgtcctctgacaagttggtgacacggatggtggcgttgtcgtcggctctgcggttgggctgcatggactccccgcggcggctggccccgtcgcgcaggctcggcggcacatacttccctgtcttgttctgcgtggcctgcaccggctctagctctcccggcagcttctccttctcgccagtagacaggcccagctgctcggccagctccttctgcatgggccccagcgtatccttgtaggggcagcgggtggtccagtggtcgcccttgcagatgcggcaggacacgatcttctggcccttgagtttgttcatagggtcctcctcctcctggcagttcaggtcctctttgctggtgatgaacgtcatagagacatcgtcactgacagtggtggtggccacattgggtccgggggggtcaaactctgagttcccgaacttcttccagttcttcctccttgcgacagcctttgaagccttccgggtctcaatcctgaaggtgcggacaatcttgaacttcttgccatcctcatctatcttgtactctgtcactgtctttatgtttccgttgatgacctccttgggaggcggcagtggagctcccggcagtagctctggctctgggctggtgtcacctgtggccagagggatccccttgag

SEQ ID NO: 467535 - DNA, 1000 bp, Homo Sapiens
tctgaccagaagccatttattaccaaaccaatttatttcttagagttcaaaaccttctgtgagaatcttctctggcctggttggagatccaccttcttcttttttttttttgagacggagttttgctcttgtggctcaggatggagtgcaatgacgtgatctcagctcactgcaacctctgcctcctgggttcaagtgattctcctgcctcagcctcctgagtagctgggactataggcgtgtgccaccatgcctggctaatttttgtatttttagtagagacgaggtttctccatgttggtcaggctggtcttaaactcctgacctcaggtgatccgcctgccttaaaaaaaaagtggtgggattacaggcatgagccaaccacgcccggcaggagatccagcttcttaagcctcaaactcaaattcaaagtactgtgggtcgaagtaatggatacggacgtaaccatcttcgccgccgctgctgtagctcttgccatcaggatggaaggcaacactgttgataggtccaaagtgacccttgactcttccaaactcttcttcaaaggccaaatggaagaacctggcctcaaacttgccaatcctggtggaggttgtggttacatccatggcttcctgaccaccgcccaggaccacatggtcatagttgggggagagggcagctgagttgacaggacgttctgtccggaaagtcttctgatgttcaagagttgtggagtcaaaaagcttggctgtgttgtccttggacgcggtcacaaacatggtcatgtccctggataactggatgtcgttgatctgccgggagtgctccttaacattcaccaacacctctccagacttggcactatactggttgagctctccactctcatggccagcgatgatgcactcccccaggggtccccaaacagcactggtgattttagagtcattgcaagggatcttcatgtagggctcattgttgtcaatctggctcggat

SEQ ID NO: 467536 - DNA, 1000 bp, Homo Sapiens; identical to SEQ ID NO: 337541

SEQ ID NO: 467537 - DNA, 1000 bp, Homo Sapiens; identical to SEQ ID NO: 158239

SEQ ID NO: 467538 - DNA, 1000 bp, Homo Sapiens
ttttttttttttttttttttttttttttttttttttttttttttttttttttttttcgtcttgaaatttatataccatacttacataaaagaagttaaaccaattgatcattatgtacatatattagtgaatattagtattttacatttacatacatgtgcatatgtaatcaagtaaaaatataaatgttaaataatttttatcagcgaaaaatacacaaaacatgactgatacttcaatttgagtgcttgttcgatattcagtgcttaaaaatgtttggaaaaataataccaaaatataacctggtgaaagatatttaaaaagtgaaagagataagaaaatagtaagtgtttggtgtgattttaataagtaggggaaatgagcagaaataagatctatatttggggaggaattgcatagcgtagaccggatgaagaatcggaaaggaagaacgtggtttttcccaaggccaatttcgctcaaaatggaacagaaccagggaattttcaggacaaagtaaatgaactgaagtttccatcatgagttcattctattagcagatgcccaattgacttcctccttgagtctttattaggaggcaggcctcagacattcaccctacagtcagatacaacttcagttccttacttggcttctgtcaagacggtaagagtgcaaggtgtcatataatgacattgcacaactttgtgggaatctatctttactgaagaatcatcggacggtatcaactaaccatctttccaagcacaggctggtttgcaattcttgaacctggcgtttcttttctaaagactgagttccggaaagggttggggcaactccctgcagggcagagctcccggctttggtgcgtccttcccagcgcgctccatggtctgggatgggcggtggcggcccgggccggcctgctacttgaggcagggacagcagaagcagcagagggtccggcaggggttcttctcctcgtactgcacggcct

SEQ ID NO: 467539 - DNA, 1000 bp, Homo Sapiens; identical to SEQ ID NO: 158242

SEQ ID NO: 467540 - DNA, 1000 bp, Homo Sapiens; identical to SEQ ID NO: 337545

SEQ ID NO: 467541 - DNA, 1000 bp, Homo Sapiens
aaggaggtttattgaccatttaatgcagggaacccagttacatttttggagattctgaaacactggaatagaactaaaagtaccaagaagagacaccaggaaaaataattgctttcatggaagataattacaacattttagcaacaacaaaaaatacagcttagaggcataggcagggagccactccttggaagtatctgctaccggttgatttagggaaaatgcctcagtgagtctagtcttgaaggaagactgggcaaggtgagggcactcctgaccccagtgcaaccagcctcaatctcctaactcgggccttcagaatcatctccccatgctggctccatggccagagggagacccaccggtgacagggccacagcttggacaagaagtacaggaggcaggcgtggaacagggattgcaggggagtttgcagtcctcgctctccagaaggttccggtatgtggcaatctcgttctccaaccgggccttcacgtccagcagcacctggtactcctggttctgccgctccaggtcggcccggatctcagacaactgctcttccaagttgctaatgaggctctgcatctgggccagctctgtgccgtagcggtcctccgcttcacacagggagttctgcagacagtccttcaaggtgtgctgggcttggcgctccacctccagggcattcaccgtgcatctcagctccaggatctccgactggcagcactgcagctcctcggagcaggacatggcctgcaggctgatgccttcagactgggcttggaaccactgttccacatcctggtggttggtctccaccatggcctcgtactgagcccgcatctcccccaacaccctgttcaggtcaatggtgggctcaatgtccagctcgatccggaacttctcccccagctgactcctcagaatctttacttcctgctcgtggttgctcttgagggagagctgctcctccttcagggactcctgctgggcctcc

SEQ ID NO: 467542 - DNA, 1000 bp, Homo Sapiens; identical to SEQ ID NO: 337546

SEQ ID NO: 467543 - DNA, 1000 bp, Homo Sapiens; identical to SEQ ID NO: 337547

SEQ ID NO: 467544 - DNA, 1000 bp, Homo Sapiens
ttttttaccatgatcgaacttcaatgttgccagggcatgcatcccacagtccaccccttgcagcctgggagccctactgaggcccagagaggggccgggacttccccagaatcacacagaagcggggttgtggggaaccactcgcccccacaccagggtgctctctgctcctacggggaggtggggtggttacctccttgtccagggtgaccatgggaagcccatttggcgtcagaagccccgagaggccaccgggaagaccatgggggcctgtcccgttccctgctccccatacaggcgaggctgcgtgcacacagcttcctgtaccccaggagggcctgcctggcacgcacccggtggctgcaccatccacacgcaagactgcaacttcagatgctccgcacgctggagatgctggacaggggctcccgcatccgaaagctgagcgagcgggagccgcgaaagctgtcccttggcctcagagagctgtcggtggtggaagctccggagtgagcctcgacggcccgggccaggcagtccccgggccctcgcatgcccagccggagacacccgcagcagaggaagctgagcacggctctgcacacctccctgctgcggaaggagtagatgatggggttgaccgccgagttgaggacggccagggccaggatccagtccatgccccgcaggtactcctgggcccagaggttggagccaaagacgtcggccagcagcagcccgaagagtgggccccagcacaccaggaaggccagcaggatcatcagcaccgtcttcagcaggcggcgggccttgcggcgggccgctgggcgtggggccttctgcccgctggcctgcaccaggcggaagatggccccatagaggcccatgatggtggccaggacgccggcgaagatcaccaggcagaagaggatgtagcgcttggagtagaggggcagaaggctggagcagcggtcaaaggcgcacaggcagttccagccca

SEQ ID NO: 467545 - DNA, 1000 bp, Homo Sapiens; identical to SEQ ID NO: 337549

SEQ ID NO: 467546 - DNA, 1000 bp, Homo Sapiens; identical to SEQ ID NO: 158244

SEQ ID NO: 467547 - DNA, 1000 bp, Homo Sapiens
ttataaaaagtaaatacacaaaccggtgtcatttattgtcattatcagtattacatactgtacataactgaatgtgctgtacttttatacaactggcagtgtagtaggtttgtttacaccagcatctccacagacacgtgagtaatgcactaggctatgacattaaaacggctaaaacatcatgaggcaatagattttctgctccattataattttatgggaccactattgtatatgtcattatgcagtacataactgtaatcttctgcaaaaccagtcaaatctaaccatgccacaaaaataactaccaccatctgtcttaaagaacgtgactcctatatggatggagattaacaagggcatagatcgattctatagaatatttcatttaattgattttattataactggattaggtctgagccctgggaaacagacatcaccttgttatacagaatcacacattatagttttaactgaagttgtttttcatataggacaatcataaatatgagtattacaagagctgactacatactttcaagtttatatttcctgacaaaggatatgacctttttccatcctgtaattcagagaaaaagaaccacttgccctatataaactctaaaaagaaaactgcataaacccaggaacagggggcaaggagtgctcccctttgacctactattagcaggtccaagaaatgatatatcaccacgtctatgaagaaatttctttctataaaagcacaaaatttaaatcggatttgactttacatattagggctttcatcttgatgagaaactcataacagcagcagctcaaactgattgttaaaaggaaaaaacacagggcagattaataatgcaacttggatcttcactcttctctttccaattcaaatgctggaatatgacactctttttataatattctgcccatgaggttctctcccttcttttctgccttcagagtcctttccaaaaggaaattactgcct

SEQ ID NO: 467548 - DNA, 1000 bp, Homo Sapiens; identical to SEQ ID NO: 337552

SEQ ID NO: 467549 - DNA, 680 bp, Homo Sapiens; identical to SEQ ID NO: 337553

SEQ ID NO: 467550 - DNA, 1000 bp, Homo Sapiens; identical to SEQ ID NO: 158245

SEQ ID NO: 467551 - DNA, 1000 bp, Homo Sapiens
agaatctagcaattaccaagacatttattagttgtcaaaaagctttacaatcagtttcatgatcagaaaatagagcaaaatttcaatattgttttctttataaaattgatgaatttctgaaaagataaaggatcatttgatttttaaaaatgtcagcttcatcacatgatgttccagagatctgaccccaaaagcttctcaagttttactatccatagtgtccttatttgtaactgagacccatccgttattttccatctgaagcttcttcagcagtttataacaaagtgaaagaagttggactaagagagccatcatggatcttgtcttcgtaatacacttgtcaacctttagaaatactttattctgcaaagaagtcttagttactgtctggagctggtggcatagaggaattagcttgtttatttccaggagaagcataagcttgtcatcgtctttcagctgttttgaaaaagcttgaacactggaagtaagctttaaaccctctgcagcaaaaacctctagttgatgaattaaatcctgggaagttttcagtggcccctctcctctagtaaataaatacagagaataggccatactggacatgttccgtccatattgaacaatctcattctcctgatcttcccacttctcaatttcgcagtcagcgtcagaggtgagcaaacccagcttaagtccaagctttgctatcttggcttgctcctcagagtcaggcttgtctggctttaatgatttcaggtttgcattattcttcattggctttggaagtgaaaggtagccatacttctctcctcgtcttccttcaaacacgtcattgatttctctcagcagtgttgacatgtcactaatttgggattcccaagcttcacaaaatacatctaggttttctttagcaattttactagatggatgcaatgtcaatgtttcagcagcagaaattatctgttggccagtcacctgaaatgtctcctctgcatgt

SEQ ID NO: 467552 - DNA, 1000 bp, Homo Sapiens; identical to SEQ ID NO: 337558

SEQ ID NO: 467553 - DNA, 1000 bp, Homo Sapiens; identical to SEQ ID NO: 337559

SEQ ID NO: 467554 - DNA, 1000 bp, Homo Sapiens; identical to SEQ ID NO: 158247

SEQ ID NO: 467555 - DNA, 1000 bp, Homo Sapiens; identical to SEQ ID NO: 337560

SEQ ID NO: 467556 - DNA, 1000 bp, Homo Sapiens; identical to SEQ ID NO: 337561

SEQ ID NO: 467557 - DNA, 1000 bp, Homo Sapiens
tttttttttttttttatcattcattctattttatttaactttaagcagggcttgatcagaaagaagagctcagaggagtgaggcaacaccaacaccagggcgtacgatacacccgaggctcctccgacaccagttccagcccggaagggcttggaatggcctgccacgccggggcaatggagcgcgtgaaagccaaaccttgggacccgaagagtaatttgactgcgaaggcaccgtcatcgtcgggcaccccctgtagacgggcgcataatagctacatctctggagatagtgatggaaactggggtccgatagatggagagaaggacgtaggataaggcttcttgtggggtgaagaggcagagggcacctggagagaggtgtggcatggagaaccaggggttttccctagcagagggcggcttcgtggacttcggccaaccggcgggtgcttccctcgagcggccgctagatggtggtgctgttctggatgcttccagtgggccccgaccaggtctggacaatgcctggcgcccgtcccccgcccctcatctacacacacgcaagaattcggagctccatggggaacagaagcaagatatccgtaaaatcaaagtctagggggtgggaatgaaaagggaaaagtgaggaacggggagccaaacccaggaagacgcctctgttcctgcacattccctctcctttatatactcagctcttggctgtctccagtatgtacccaccctggtcttccaagctgggagccactttttataacacaatcacagtttcacaaaccccaggaaggttccatgtggagagaggttaagtttcgcccttgcccggggaattatgacactcagaatatccccttggtgtaaatggaagacacctgcgctatagcagctgttgtaggcccggtccgggtgggagggcatacttcttatacatcggaatagagtctcctgccttccttggccttctcgagacaccacctgac

SEQ ID NO: 467558 - DNA, 1000 bp, Homo Sapiens
ttttttttttttttttttttttatgacttattctatttaatatccatttatcaacattttgtcacaataataataaaaataatatctgttttaaaaatccacagggaattctcaagggaggagcttgtcttgtttctcgcccctcacatttgggaactcctggcctaggcccagtctctttggcttcctgccgccaggtccagcccctcttagtgcctgaagtggggtcttctggacccatccttgcccacagagtacagtgaacacaatgccctgggggtctgtggccaggggggagtcgagatcactgggggcctcaaagggtcagggattggggagctagtgaggtggagagtgggcggtgggggagttgtaagataagagtgggaatactgtatttatgtgggatggaaaacacgtgaacaggcccaggcagcctctagagggaggggcaggtctggagcaaagagcggctgagggtggggcagaggggaccgggtgcccagagagctgtcgaggggagccggcagcctgggacgactgcggggagaccagggcccctcagtgaacctggaagagtccgaagtaggtgaggaagggggcagccttgagatgggcccaggggagggtgcggatccgcagggaggaccctggccgcagggccaacagcccagacacctggcagaggcggagctggggcccgagggaactcgccgcagtggctgagaattcctccaggcagcgcagggccagcacaccatccaccagcaagtccagcttcaggtagacagccttcccctcatcaaagtgcacctgacagtacaggtagtagagcccagcccgggtgactataaactccccgatctggcggttgtagcgcagagggctggagctgttgattctggcttcctcccagccactcactgtcccgtccacacctgcctgcgctccgtcctgtccaggtcgtggatgaacttcataatgggctgcgatcgctctt

SEQ ID NO: 467559 - DNA, 1000 bp, Homo Sapiens; identical to SEQ ID NO: 158248

SEQ ID NO: 467560 - DNA, 1000 bp, Homo Sapiens; identical to SEQ ID NO: 337563

SEQ ID NO: 467561 - DNA, 1000 bp, Homo Sapiens; identical to SEQ ID NO: 337564

SEQ ID NO: 467562 - DNA, 1000 bp, Homo Sapiens
taaagggagggaaggatgtagctttatttgctgcttaaaacaataaacaatagatagaaacatgttaagaataacttgaacttaatgacaatgtttgtggtactaatgtaagggaagatctttgcagctttctggaaatggtcagaaatgtgctcagtttcagggatgtactaatgtttctactgccaagagactaaagtgtactaatgcatggaatattaagttagagacattttcttaacctgatgaatgagccttagtttctttgggaccagaacattgtcgtagatacataagaagcccgacagtaaacaggaaagtcaaaacagacaaagaaggaatcacaatcagcggcaaaaaaactcctctctttgcagatgctgggccactgtcaatactgcccccatagcctctgtgctggcagtagggtggggaccacccatagccacagtggcagtgatgtttgttattgcagatccccttcatattgcaggtctcaggaaggcagacatgtgacaagacagacagactgacacacttcttatggatgcagatctttcctgggccacacacagtaccatctttcacttcaccaatgtcagatatgttcatccttaaatgatagtcaataccccagcaggtgacaccattgatatgagtgtgctgcaaagtaaaatgatcttggagaagaggaatgtctctcacattctcacattgaactctcccacaaaagacatcagagatatgacattttaggtatgttgtgccatttataccacagtgaccaaaacggtttccctgagagttgatttctttatagcaattctgagatgcactttttgcatctttaccaaaaatctccctgcaatgctggtcatggttattacacctcttttgatagcagtaggcactgtcactacaggggatcccgtcctgcacatatctatcttctggacactgatgagatgttccattgcaccattctggaaggtcacattca

SEQ ID NO: 467563 - DNA, 1000 bp, Homo Sapiens; identical to SEQ ID NO: 158249

SEQ ID NO: 467564 - DNA, 1000 bp, Homo Sapiens; identical to SEQ ID NO: 157459

SEQ ID NO: 467565 - DNA, 1000 bp, Homo Sapiens; identical to SEQ ID NO: 337566

SEQ ID NO: 467566 - DNA, 1000 bp, Homo Sapiens; identical to SEQ ID NO: 337568

SEQ ID NO: 467567 - DNA, 1000 bp, Homo Sapiens; identical to SEQ ID NO: 158251

SEQ ID NO: 467568 - DNA, 1000 bp, Homo Sapiens; identical to SEQ ID NO: 158252

SEQ ID NO: 467569 - DNA, 1000 bp, Homo Sapiens; identical to SEQ ID NO: 158253

SEQ ID NO: 467570 - DNA, 1000 bp, Homo Sapiens; identical to SEQ ID NO: 337572

SEQ ID NO: 467571 - DNA, 1000 bp, Homo Sapiens; identical to SEQ ID NO: 337573

SEQ ID NO: 467572 - DNA, 1000 bp, Homo Sapiens; identical to SEQ ID NO: 337574

SEQ ID NO: 467573 - DNA, 1000 bp, Homo Sapiens; identical to SEQ ID NO: 345263

SEQ ID NO: 467574 - DNA, 1000 bp, Homo Sapiens; identical to SEQ ID NO: 337575

SEQ ID NO: 467575 - DNA, 1000 bp, Homo Sapiens; identical to SEQ ID NO: 337576

SEQ ID NO: 467576 - DNA, 1000 bp, Homo Sapiens
tttttttttaaaatttcaactttattcttccttgaacttcccgggccctttctttccaggagccccatgtcctgttcattttctccatcttttccagagagacctctagaataagaagaatgccaagctgcagcaacttggagttttagaaatttgcttaccaagtacctgagtgcctctgccagcatggataaattaaccacctagcgggtaaggtcacatactgagcttagttctgcttaaggaacgacacaaacttaaaaagattcaggagaaataaatcgggtttccttttttctttcttttagaaaaatgagaatatagaacatttttcagaatatgaaagtcccaccacatgttcctagcaacttagcaactatctccaggcctcacatgtttagccctttcccaaaagtgtttacaatgaacacacactgggaaagccatctctaaaacactgtgagcaggggcacaaaagaaaatacgtaaagcaggccagcgtgggggctcacgcctgtaatcccagtactttgggaggccgaggctggaggactgctttagctggggagtttgagaccaggctgggtaacatggtgggaccgtgtctctggggggggagtcggggggaggaagctgggcgtggcctgcagctgtgatcccagctactccgaaggttgaggtgggaggatcacttggattgcttgagcccaggagttagaggctgcaccgggctataatcgcaccactgcactctagcctgggccagagccaggttgccaaaaaaagaaaaaaaaaaggaaaagagaaaagaaagagaccctcacctttaggagaatttttgagaaaacctttacattaaaaaagagggaggaaagatatcaagaaaagttatgaaaaggaatacaaatatggggggaaaacagacccccccccccacagaacaggatagtcataaaaatagctgtcatagtgccacaaattactgctgcgagtttgagga

SEQ ID NO: 467577 - DNA, 1000 bp, Homo Sapiens; identical to SEQ ID NO: 337577

SEQ ID NO: 467578 - DNA, 1000 bp, Homo Sapiens
tttttttttttttttttttctgctctgaccaaggctgaataaatcccgtgaccacttctcatcctcacccttgtcacccagttgaggagccgactgccccctgcctggctgggcctgaagatgggaggaactggccctgccctcttggacttggctgggagatgtgtggacccccagctccaggagagggactgatgagaccagggtcctggggggtgcacgggatgtggggatgggacgatcacaaggaggaagatagagccaggctggagacaccaggacttggggcaggggcaggcgtttctgtctgtgggaacacagcagagggaggcagggcagagagtgtccagcgccccccgccctcagccagcgcctacctgaacctttcaggtaaggaaggaatttcttccacagtgaagtctttcaaacaaacacaatcagaagcacaattagaactatgatccctacgatggtgcatgagaggtaatgagaagaggcaggagtccccgggctggtggtcattgtctcttcagcagctggggcaggagtccccgggctggtggtcattgtctcttcagcagctggggcaggagtccccgggctggtggtcattgtctcttcagcagctggggcaggagtccctgggctggtgttcattgtctcttcagcagctggggcaggagtccccgggctggtgttcattgtctcttcagcagctggggtttccacagtggcattggcaccaaattcttcaacacactggatatcatcccaggacgtacaattactgacttggacttccccactagggcacctgctacacttccggcacatctctggggagttttcattccggaaggtgccttctttacactgacacactgtgtctctggtcatggtgcaggaacttttatgtttttgatctgatttacaaactgtacatgggaagcaagaaggttcattgttggaagcgttggtgtaatccacaccctctgtgcac

SEQ ID NO: 467579 - DNA, 1000 bp, Homo Sapiens
tttttttttttttttccagttaatttttgtatttttttgtaaagacggcatttcacgatgttggtcaggctggtcttgaacttctgacctcaagtgatccacccgcctcagcctcccaaagtgctgggattacaggcatgagccactacacctggctaagaatttactttgtatacatgttaaaaaaaaaaaaaacctaatatgtattaactcctaacacctaagaggaaacctctggtaaaaagagtctttcactccaaggacacggcagagcctgtgccatcttctaagtagatgaactttccagagtccaccaagaggtcctgaatcttctcttttgcatgtctctcttccatcctctccaaggcatccagcagggtgtggatcgaggcgttccgtccagttttgttgacccatttcatcagcattgcatacaaggcatcccctgggcctgctgtaccagctctgaccacatcgatctcatttttcgtgaggtccagctgcctcatgagctggtcccaggagtcaaagggcacgatgtttgcaaacttgtcaaagaacagcatcagagtctcagtggggtcagcaccatttgctggaaccagcagcctcctcctctgagacccttcagcttctgccggtcccagcagacactgtgcctcccctggggactgtacagtgacacctgtcaaatctgccggctcctggctttccatttgctgctcagagacgaaagtggacagcgagtctgcgttgctcagaatctcgttgtgagcattgtcctcagccccaggccctcgtaggagacccaagcgccagaaacacaccctgtccatgcacttggggtcccctccacaacctgagccgatgcaacaacagacaatcagcacagccaccaacagcaacggaacaaccaaagtcacaaccaaaatcacccatatattatgtccattgcctgattctttgtggacacactcgatgtcactccagggcgtacaat

SEQ ID NO: 467580 - DNA, 1000 bp, Homo Sapiens
ttttttttttttttttagagttttttaacataaagttttatgtatttaaaaaaaacagtctgaagtattgtacaatataagtgctgtcttaatacaaatcactggtggaaaggagcaggacataccctcagcaaaggtcatacaatagggggtaaaacgtttgtgttcttgagggagaagtttttgctctgtcctggggaggtcatggacacctccgccccgacagctgcctctgacttcttgggagcgtctaccagttgaggcagctgaacagtgtcagctccgtgctggagacagtcctgctgatcacctgaatgctgaacatgcttcgtggggctatcttttgttttctctgtagtctctttggtgatctcatctgcttttctgctcgagtgatgacagccttgaaccttgtccttccttgtctcagaggggaaaaaggaattggatttcctcagggtctggggcctgggctgtggcttgaggttccgagactgatgaatccaagcatgcttgagggcctggtccggggtcatgcgaagagaaggttcccataccaaacaccttctgagaaagtccaggaagctggtgtcataggttttcagcaccatcgtgaggtccttggaatctgggtatctttttttccccctgttgttggttatatttttaggaaaacctttggaatcaaagaatgtctgtctcctggaggctgtctgaatgaagccggctggcggcagacccagcacctccatgatgcaggccagctgctccacctcattctccccggggaacagggggtagcccgtgtacaactccgccgtgatgcagcccaggctccacatgtcaatggccacgtcgtaggggtggcccaggatcacttctggggatcggtagaaccggctttggatgtacgtgtatactttctggtgttcataacagcttgatccaaagtcaatgactttaacagaggcttggcccttttggtatagcactatatttt

SEQ ID NO: 467581 - DNA, 1000 bp, Homo Sapiens
gtcgatgagcaaactgaactttaatttgcttacctgaaaggcttgctcttcattattggcataggccacagctatttacacagaatcattgtacaggatttacagcaagatgctacacatagcatcattctggataagcgacaaaggagtaagaacagactggggaataaagctctgaaatcaaagtgtaagcagaaatctgaaggtaggtgtacaaggaaggataagggccaaatgatgagcgaggttggtgaggtagacataagggaggaagaggaaacatccaacaacttgtggtgcagagatataagggaagagtccactggcacatagtcttaaaaattatgtttggagtttgaaggaggaaaaatctgccataagccacctctgtgagaaaaaagaaggcagttagaaccttacaggccaaaccttatacctcccctatcaaaaagtaattctgctgattaaatccctggataggagaatgagaaggttgaaaaaagaaagagagagatgcatagacacagaaccttaaacagagttaagagacacaaagtaaatatattcaagagagacacaaagaaagaggaaaagaacagaagctcaggcacatctagaaattagagacatcctattaacttcacgagtcatctttccttacctcatcttccccaaagctcttcctccacccctaaatctctgaatttctaactttaaccaaagagtagaattcgaatgaggctggcacatgggggacgatctaagattccatctcaccaattcaggtcccctccttatcctgtaccggaaggtcagggcttgagtcgtagccagggatagattagggtgagaatagacaggatggaggacacgaggccacaaagccccacaatcccagggccacagcgccagaggcctagtttgtccagaggaatgaagagatcacaggcatttctgaccacgtctagcagaagtgggggatgacctctaaggactcgag

SEQ ID NO: 467582 - DNA, 1000 bp, Homo Sapiens
ttttttttttttttttttttaaattttttcctttcaatttttattcattcagcaaatactaagctcccactatgcacataagagatgttcaatcaatgttagatgaagggaaaatattcagaaattcacaagtcactccagcactccaaaaacatacaactcttcatgctcctcccttctccgttcttggcctcatctctgcccacatcacaggttgttaaatgctcacatgaacaagaaaggaagcacagtatgacatggcctgtgacttatacaaatgtctgtcccaccaagaggccatcttttaaagtaggtactagttccaagcctaaaaacaccctaacgggtcttcagcttcatctgaggatatgccacagtgatcatgcctgctatagaggacacaagacctccaagtccaatgatgccaggattggatttatagatccccagctggtccaaagggttcaggatatcacaaaggttcttcactgtgtccaggagcaagggaggatgctgcttcagagatcggaataaaagaagtagaaaggattggagccattctgtttcctcctcagccacgctgaaccaaagaggatcctgggatgctgatttctctttctttgccctgtcacatgtaactcgtttcatctgcagggagatttcatacagatccctgacaaggctcagcagaagagaatagtagtagtggtgagcagccctcgttcgccatttctctttgttgatgccagaggtgagacctacgctcctcacccagaggatggtgtcacagatgaaataaatcacacggttcaggttggctaatgttaagcataagcgaggtaccaggtcagtggcatgaatgctctgctcagttgcctgtatagcatgtaccacattgcctagtctgaaccatttacgaccagtgctcacactggactccagtttcttgagcttcattaccaccttctctttgccagctttgggctctaacaaatatcta

SEQ ID NO: 467583 - DNA, 1000 bp, Homo Sapiens
tttttttttttttttttttcagcttacaaaacataattttatttaaatttgtatagataaaaatctaccaaaatttaaacaaaaattttatccaaatcctttcccacaacaaaattggacatcatggaaaaaaaaaaacacattcaaataaggttcccatctttctaccataaactggtagattctgggaggatgaggagtaagagagaaacgaggagagaagatagtgatactaaacacaatttgatcttcagtgttgtctcatcttgaaatatcttaataacagagatttccataagaatcaggattcatttttgacacaaaaatggaagcttccactcccaaaatcacaaataaggcttctggttttctttttagtgtgaggtaaacagtatattcaatattaaggcaaatggtaaaaacacatggatggtatattaatgcagatattccattattaaatatattttggaatactcacggatttttcaaacatatgttagaattagaaacctgtaaaatctgcagtagtgtgtaatagctatttgcttgaatgtcttagcagtgcctttttagtagctaatatgttcagtgtaatcttgtgcctttttagtaattaatatattaaatataatcttgtctgagtttttaaatggtctgtttttctttttcattatgtaggattcgatgcccaccaaaattcttgtaaatgaagcaggacttgatttcaaattctgtctatacacacaatatttggccacatagaccactccccaaagtctgcaaaacactgcctactgggcaggcttacagtgacagaaaagtatgagaacacaagatattatttttataaagactaaaatcagatttaggctgtctagatatcttattccagaaaacacagatttaagatttttcagtgattcttgccttccccctccccttttcttccccaatgagataaccatttctttcacaatgatgaaccatccctttttat

SEQ ID NO: 467584 - DNA, 1000 bp, Homo Sapiens; identical to SEQ ID NO: 337578

SEQ ID NO: 467585 - DNA, 1000 bp, Homo Sapiens; identical to SEQ ID NO: 337579

SEQ ID NO: 467586 - DNA, 1000 bp, Homo Sapiens; identical to SEQ ID NO: 337580

SEQ ID NO: 467587 - DNA, 1000 bp, Homo Sapiens
tctagaatgctaaccctagcctcatcctgcagcagaaaataggtgtaggaatgaggagacatggagcaaaacaagtcatcttccagccataggtgtcagtccagcaagtcttagccagtcgtgagagtacacttctttcttcttgagcctagttctgggcctgcggtgcggtagcaaggtgtgtgctgcagcagctggaccggaggaaacggccgacaccttctgggcggcatgtggtatctcactgtcttccaaaacttggtcttcatacactgtgactgctccgtgaagtccccatgccaccggatggcaccatgcttctgtttgatgtactgaattgactctggcatgactgtgtagtcctcgattttctccagctcaatgagaataaccttcatcccgtcctggatcagggcactgtagaccgcgatttgttcttctgacaggttcttcaacaggccaaagcccagcgattcggggaccacaatgacaatcagcctcctgcacagcttaacgttttcatcgatgacattggccacggcttgtccagggaattcatctctgccgaatataaacaacttatatccacattgtctctccaacacctcgggcaggatattcaacaccagggcatccacggcatgcctctggctttccttgtggggcttggggtataagacataggcgtcatacagcttcccatctactatggtctctgtagaatggaaggcacttcgataccaaagaacaatgtcgatcttaaaaatgttgtatatgtacacaacagacacagccacagccaccaaggcgataagccctcctatcaagtaagctcgaaaatccggagctgggagctgtaatataatgtatgctgtggacactccagcgtggcacatgaaaggaaggccataatcttccattttcacttccaagaaggtgatgtttactgtgtacaaattatgttcccgaaaagagacatgggtttccaccccttctctga

SEQ ID NO: 467588 - DNA, 1000 bp, Homo Sapiens
tttcaacgtgttttatgcattttaaaacacacatctaatgtatacatttaagacatttaacttgaaatgcatttaatgcaaaatatatttcaagtattttaaagcaagtataataaaagagaaaagcaaaatcattctatgtattagagactatgcaatagcaatgaaatctattttgattatatatgttcactaacatgttttcacacataaaatatgagctattaattaaattattttactctttttagtcatccagttggtacacaaaattgtaagcactacaaacattaaatcacattcttacactgacaatctcactcttttttggttttcagtaatatctactacacccatttgaaacaatctctgctttaaacttttgtagaacattcatgttgctcccacatgttctaaccagccttccgaactgacggtttcacagtcacttggtgattttcttgaatagctattatttttgagatcatcaagaaggctcccagtgctgggctccctttggggagtaagacatgtgtcttccaacgtcaaaagaggcagatgcacaatggagagatatctttcgccctctggatatgcttctccagtatgcttctctacatgtgcaaacctcctcaaatcaaaactgccttcctccctagatctgcttcccttccctgctctgtagcttccattagtccactgctaaataattgatctaagtaatcattaataatgataataaaaatagtcatggcaacactgacggagtgctgagtctgtgtcaggaaccactgtaagtactttattatatttattcatttagttacccctgggaggtaggtgcaattattataaattctaatttcacagatgaggaaactgaagcaccaagaggttggataaggttccagaggccacagaagtaagtagcaaactcaggactggagctcaggatgggctgcacagcccatctcttaactgccacaccatgctgccttat

SEQ ID NO: 467589 - DNA, 1000 bp, Homo Sapiens; identical to SEQ ID NO: 337582

SEQ ID NO: 467590 - DNA, 1000 bp, Homo Sapiens
agtgaataataggtttatttgcatatacacaagagaagagttaaccgttactgggtgagaaggaggtaaggcttcagcagaggaaggcaccttgacagacaaacaagagactctcagcttattaaatcaagcatagtcacaaacttcacttgccccaagccaacaacttaactcatttacctgctgtcctagagaatcattaacaaaaccagctggaaaatagagagaaatgattttacatatctggacctgccacttaaaactttatgtacagaatgcaggaaaaaaacataagaggcacttccaaatagttcttgatctaatcagtgccatctgtcctgctattaaaaatatctattatggaagaaattgggtattaaatgtgccatcaaagttggggcctcaattctaaaagagtttaggcaaaggtactctagaagtggttcctgccaggtttccagacccacaaccatagacacaaaatctctggagatgagggtggagcagctataaagcaagcatttctcaccctgctcatgtgtgtgtcttatggggcctatcacccggtaagctgagcctaggatgctgggaagcctctgccaaggatggaaggcatacttgctaaaaatgatctttcttggcttctcaagttaaccagaataaactctgatttctcttttgagtacccaaatgagattaaggcttttaacatgaaaagaccaagttctgcatttgggaattgtaactaccaagtagctagttcccaagggaactttaactacttcttttcaggaagatatgtatccgattgtcctttgagaagtcagaagaggctaagtacttattaaaataaaataaatagaatagaataaaataaaggactgggtgtgctgactaagaaggggaagagaaacacacactgagtgatcgtatttttttgtatataaaggattaaaaaaattccaatttaatacattttggaaaagcaaatgtaaaatga

SEQ ID NO: 467591 - DNA, 1000 bp, Homo Sapiens
ttttttttttttttttttaatagtaataacctttatttaaaatagatttaatttaggaaagctcattttatatgagtttccaactaattattagagtcagaaacaaagaaaataaaatcagagaaaatcctctgtagaaaaaatacacaaagaacatttctacatgtgaaaaaacagtaaacagtgttaacatccaagttattagtctcaattccacgtctcctagtgaacaccactatcaaccttgagatctgatttgttcttgtcattcttcactgagtagatgaaatatgttaaggtgtctttttcattcactggaatagacctaaagtggcaaccaactatctcaacaagttgtgctttattaagtcctggtctggttggtagcttgaagtgtcttttgtatctcctaagtgtatttacttgtaattggtataaatcaacctctggggtatcaatatcttgaacaggtgaatcacctccatcatcatcactcccttttctctttcttctgtttcgaacactctgaattaagtttttatgataatcacatatgtaaagatgccttgcgctcttatccagctcgatcttcaccttcttctgggagatgctcttctggatcctcttgctgaagctggcgttgcctgccgcccggccgcaccgctcaccatcctcccgcaggcagcacagttgcccggggcccggcccggccgcccccgggggcccagccgctgagaccgcccccgcgcccggcacctcagccccggtgcccgcgccggtcccgttccccgccgaggcggcggcggccgcggcagcgaccactgcggccactgcggcggccgcatccccgccgcggctcatctcgtcaggcgtgaagccgttcatgtctccgagctcccgaggccggcgctgacagaaatcccctctctcctggccgctccgcctctctccgctccggcagcggcaattcactctgcacaccaagttagacagcggcacg

SEQ ID NO: 467592 - DNA, 892 bp, Homo Sapiens
ctattccagcagatttgtgttgaaattttttttcgccattagaaactgtgattctctatgggaccttttcagttttgcacgccgattttgaaaccaaatctggattctgtcttcctctagattcaatttttgagctaagtcttctctaatatcgataccaggatagcagtttactctaaagacattttctaacacttcaatctggttttgagtaaaagcagttcttggtcttcggcctctataccaactcaactctcttttcaaagacagtctttctgaggctgaaaagtaattttcatatttcgaagctctttcttctggcattgggtgatccaccacgctagggaatgaaatcccactgggaggatttgggacatgtagacataagttaccatctttccctgatgagctgcaggtgtctgcccagggcctgtggggtttcattaatggaacacagtctttcttctggtccagtcctaagattctctcaattgaaaaggagcaagttgagggtttgttttccccgagctgagcgccttcctgaaggctgggagacatcctctcgtggtctgcacagagcaacagctctggcctctgctggctctgccccacgtgtatagggctgggatcttcctgcagttcaccttatagctccgctgacaagggggctggatttagaacgtcactaattaaaatcctgtcttagaaagttttagcatgtcaatgaacacttgcccagccagcagcttaaggagttaattgtttatttgtttgcaagtaattagcaactaatggctacaccaggggggccacctacagggacaaaaagtgttatctctcctaagcagaacacagacttaactttctctaaagaagtgatgcacaaatgtgg

SEQ ID NO: 467593 - DNA, 1000 bp, Homo Sapiens; identical to SEQ ID NO: 158254

SEQ ID NO: 467594 - DNA, 1000 bp, Homo Sapiens; identical to SEQ ID NO: 337585

SEQ ID NO: 467595 - DNA, 1000 bp, Homo Sapiens; identical to SEQ ID NO: 158255

SEQ ID NO: 467596 - DNA, 1000 bp, Homo Sapiens; identical to SEQ ID NO: 337587

SEQ ID NO: 467597 - DNA, 1000 bp, Homo Sapiens; identical to SEQ ID NO: 337590

SEQ ID NO: 467598 - DNA, 1000 bp, Homo Sapiens; identical to SEQ ID NO: 158256

SEQ ID NO: 467599 - DNA, 1000 bp, Homo Sapiens
ttttttttttttttttttttctttttttttttttttttttttttttttttttttttttttttttttttttttactcactaatttttttattatatgacaggattgactaacttttcccccatttgcttggttttacagaatcttgagctcagaaaatatatctccaggttctctgcagtttctctgacacacacaagatgtaatccacagcatcttccatttaaatgacccctcatttgggcaatcaaattgaatagtaatcattttagacttattagggatacagcatctcttatccaagcatattccacaaaaagtgggtttgtaactctgagtacttgagcatccagaaaagacaaatttttcagctttggagagttggaaagtaggttggcatgtttttcctttgggaatctttattgtctttaatatattgctgtcgcaaggctgaatgtaacacagtcttttctcttttctcatttcacagttgctgttttcattggtcaccctgttagatattcccatcccacatgttctggagcagggagtccattttgttgcttgcacaagacatttttttttccaaataagtgggagatttctataagctggcattgttttgtagcttgttgaaagctgctgtagtaatggttccaggctacagtttgactgatcagacttctttccacctttagctccagagcagtgactgccagccagctttggtatgaacagaggtgtgcatccaatggccccactcacacagaggcagctgaacaaggggttgggctgaaacacttggccattatgataatgtacctggttgaactcgcacccaacagctacaaggtatgcacacactccagtctcgtacctaggcctgtctactgagtagtcacaatacagccctttgtgtgggtcacagaggtcagcttcattgcagatttcccctggttgcttggcacagattttacagcatccacagccatctctcaccagg

SEQ ID NO: 467600 - DNA, 1000 bp, Homo Sapiens; identical to SEQ ID NO: 337592

SEQ ID NO: 467601 - DNA, 1000 bp, Homo Sapiens
tttttttttttttttttttttttaaaaaatcaagccatttattgcaatgttttcctattctgacacatttggaagctctaaaaacagggggaaaatatgggttataaagacagtccaatttcgatctgaatcctaactttcccagtcaccaactgggtgactctggttgagttttctcacctctatgagcttccgtttcacatttgtaagaacagaaataataatgggaacttctcaacattgtcgtgaagattcagtgagctaatacatgcaaagcactgagagcaatgtctggcacagaaaaggccctaaataaaagaattctaacagtaaatattatattttcctaatacaataaataatagcctgatattcattaacaacaaccttttccttttagcttcaacctcttcagctttaaacctttattaagtctatttctgtttctaaacaaccggtaaacctccatcttcctaccagaaaactggccatttggtcagcagaacgaaaggctgtgaaatgagtctctgcaatagatgtgtcctgaacacgggggcccctggagtcccacagcctccagctctagaggtcaccccaggctgctaccaagggcacccacttcttggtttgacccacacccctacctgaacctgtcttggtcatttcagtgggtctggcatggtctgcagctgggtctctcaaggctctgtaagagtagaggagtgttccagggcaccactctcaggggccagacaggccagtccagaggccttaccaattcctatgaaccccaagcaggacaagggagaagattcaaggaagagcctggccaactgcccaaagccctgccagtcagcagctgattcagtgtgagagtcaattggtccttctgaaacgggctgacctttccctgtctctggagtattaactgggggcttttcccatcaacaggaatgtttatcaaattttatttctgactgggacaaacctaatctgtacc

SEQ ID NO: 467602 - DNA, 1000 bp, Homo Sapiens; identical to SEQ ID NO: 337593

SEQ ID NO: 467603 - DNA, 1000 bp, Homo Sapiens; identical to SEQ ID NO: 158257

SEQ ID NO: 467604 - DNA, 1000 bp, Homo Sapiens; identical to SEQ ID NO: 337595

SEQ ID NO: 467605 - DNA, 1000 bp, Homo Sapiens; identical to SEQ ID NO: 337596

SEQ ID NO: 467606 - DNA, 1000 bp, Homo Sapiens; identical to SEQ ID NO: 158258

SEQ ID NO: 467607 - DNA, 1000 bp, Homo Sapiens; identical to SEQ ID NO: 337598

SEQ ID NO: 467608 - DNA, 1000 bp, Homo Sapiens; identical to SEQ ID NO: 337600

SEQ ID NO: 467609 - DNA, 1000 bp, Homo Sapiens
ttttttttttttttttttaacttacatttttaataatattatttttaaaaaaacttggagctgggataagtggcagcagggaggaggggcccagagctttacccctctattaccagctgcctaggggaaggagcattcaacgaagccccgtaactttaagtccctaagggctgtgggtatagacaaccccaggcttgaaaggggtaaagtcagggggatgggaaacccacaatctggggtgaagatggaggcaaatgccctggggggtggtcaggacatgtctcagaggcccaggttccaagtaggcatccacatgagtaccccctccccctaaaaggctctgtagaggccaggcccagcccagggccactgggggggcaaatcttggcacctgcccccagagagtccagttcctccctgaagcgggtggatggaggctgcccattttagatgctcagtctcttcattctgtcttctgctccctggggctgtgaggggtggggcaggtaggcagagcactgggtggccacagcagggccttttactgggaggcctgtgacgtggggttctccgatttgctttcttggctggacggaggcttgctgttccaggggctgttggcgcccagtgcaggggagttgttaaagctgtcctcgtcgtcaatgccgttggctgcgtcaaactgggtgttctccagccgggtgatgagcctctcgtcctcgtccccgaactccccgcccatcagggtgggctcccccaccaccatcacatcaggtacctggctggagagggcgaaggtgctagctgggctcttcttcttgctgttgctgttgttggtgttgccaccaccagagctcatggtgctgccccctgacatcttccgtttccgccgtttgctgggctgctgacgtgtgggctccgcagggggtgctaccatgcgctgccacttctggaaaaggcaggtcttgaggcagtcgcgggggctgaggctgtaggtctt

SEQ ID NO: 467610 - DNA, 1000 bp, Homo Sapiens; identical to SEQ ID NO: 158259

SEQ ID NO: 467611 - DNA, 1000 bp, Homo Sapiens; identical to SEQ ID NO: 337603

SEQ ID NO: 467612 - DNA, 1000 bp, Homo Sapiens; identical to SEQ ID NO: 158260

SEQ ID NO: 467613 - DNA, 1000 bp, Homo Sapiens; identical to SEQ ID NO: 158261

SEQ ID NO: 467614 - DNA, 1000 bp, Homo Sapiens; identical to SEQ ID NO: 337606

SEQ ID NO: 467615 - DNA, 1000 bp, Homo Sapiens; identical to SEQ ID NO: 158262

SEQ ID NO: 467616 - DNA, 1000 bp, Homo Sapiens; identical to SEQ ID NO: 337608

SEQ ID NO: 467617 - DNA, 1000 bp, Homo Sapiens; identical to SEQ ID NO: 158263

SEQ ID NO: 467618 - DNA, 1000 bp, Homo Sapiens
ttgaaagaatcactgttataataactttaatttatcttgcattttacagaagtctatgaacgattttaaaaaagcacctccttaccccatatcacgtttctctgacaggtgttaaagtaggcaatgagtatgtcaacagcttgagcatcagcgtcttgcaaggacttcagaccaaccactcgccaaaaatcttggcagcttttttatcttgtttttaatacaacggtatatccactctgatggcaaacctgtccagccacatctccacaacaagctttgcaaaatcagtgattagcaaattagttagctttggcacggagctgtgctcgcttgcccgtgacagcctggaagccggttttgatactggcaacagaacatctagaatgacaagtttcgcactgtaggaaatagagtcgtgtgtccttctgcaggattgtgtccggtgatcggcatgtgtgacaagtgacatattccttgatatatcttctcaagacattttctatctgtttctgttggaatcttcctttgattacaagttggttattaccatctatagaaccacttgtacccaattcagccaacaaaaatgcaaggagatgtttgggctgacgatgtaatagtttacagatatctgtaaagttgacaaaagaagttttcttggttcctactcggacgacttgtggaggtttcatgacaaatttccttttctccccagcaaccatatctggattcttttccctcatgatgttgaacactcgattcagcagctcctcgtatgtgtagtctctttctgagcctgcccaagcagggcctgtctgattactgaatgagataccatcatcttttttgttgtcttcatcttctagagcttcatctttctctagtatttcatcctcatctgggaacttaacattcttctttttcttctttttattgccaagcataatgtcaaggtcatcctctggttcagttggttcttgaacatcactttcaatcttaa

SEQ ID NO: 467619 - DNA, 1000 bp, Homo Sapiens; identical to SEQ ID NO: 158264

SEQ ID NO: 467620 - DNA, 1000 bp, Homo Sapiens; identical to SEQ ID NO: 337611

SEQ ID NO: 467621 - DNA, 1000 bp, Homo Sapiens; identical to SEQ ID NO: 158265

SEQ ID NO: 467622 - DNA, 1000 bp, Homo Sapiens; identical to SEQ ID NO: 158266

SEQ ID NO: 467623 - DNA, 1000 bp, Homo Sapiens; identical to SEQ ID NO: 337615

SEQ ID NO: 467624 - DNA, 1000 bp, Homo Sapiens; identical to SEQ ID NO: 337616

SEQ ID NO: 467625 - DNA, 1000 bp, Homo Sapiens; identical to SEQ ID NO: 337617

SEQ ID NO: 467626 - DNA, 1000 bp, Homo Sapiens; identical to SEQ ID NO: 337618

SEQ ID NO: 467627 - DNA, 1000 bp, Homo Sapiens; identical to SEQ ID NO: 337619

SEQ ID NO: 467628 - DNA, 1000 bp, Homo Sapiens
agacttgcttttggtttttattatcaacaatcaagttaatggtacactcttggaaaactataagcacatgtagaaatatttcccttttaaatagaagcattcattataacacatataaataaattcaaaaatctgaaacataacttatgacaattatgttcacaaacatagtccaacaggaaaaaaaaagaaatcagacagacatgcacctgataacaaaaatatataccattgtctgaaccgtggcctctctaaacacaaaagattgaccccgtgagaaccttattacaccataaagacacgccatagagactacaagacgagaaaaacattatacggtcacgtagaggagacagtctgcactgatattaacacgatacaattgagtcacagaacacagttgtagaaagacaccgaaaaagttaaagcctcaacattcaactaatatctagagtttgtgccttttaaaataaaaacaacaacaaagaatcaaaacagagatgtctaaactgcgcgaagaatggaaccctcaatatacagtccatccaccatacaggatgtgagtccagttcggatcattccaacagaaatgcaaaccgagacacccctgcaaacgtgtgtgtgtgccttttccttgctcggtagatttctctgcagccagttacgtggactgcaattgaccccaatccaaagcagtgccaaaaagttcagtaaaagctggtggaagaagaaaatgccgacggggtaggcgggagcgagggggaaaaaaagagttgcgaaacatgagacacattttgcagagtttgcagatgaaaaggcatctcatggatagggcatctttcagggccgaacggctgcaaagattcggggttgggagttgcaactgtgtggggttccgatgcgctaatggcgggatggtgttcagcgaggtgggacaggcaagggggtgcgagaaagtcactccggccgccgggacagtctgagcaagtcgtcgccgcag

SEQ ID NO: 467629 - DNA, 1000 bp, Homo Sapiens; identical to SEQ ID NO: 158267

SEQ ID NO: 467630 - DNA, 1000 bp, Homo Sapiens; identical to SEQ ID NO: 158268

SEQ ID NO: 467631 - DNA, 1000 bp, Homo Sapiens
gattttagaaatcgtttaataatgtaatgctagttttcataattaaatatcaataaattcaagtggtatgaaagttacactcgcgagtttcaacagaaaaagaatgttaatattttggaggccaggccaggtacaggtaatggtttgtaaagtattacaaaccctttcattaagcaactctgcctagaagctgcctctcactgtagccaagagtctgacctgcacctgataactcagtaagctagtggacgttagagagtgccaaacattctttaaaaaacaataaacatggacgccttctagtaacacctgaagggtccttgtgtatctgactcatgcccaagggaagaaaaagccttattcttatagaactatcaaaagtccaagtcacaggcaaggaaaaaaaattacacatgctaggtgatatttagcagaaattcttagaaattctggtgaaagcacaattctcacaacgtccagaggcaatagttcatactgcaaatatatgcgctatcttcctccacctccatgtcaaacctaaggcccagggatcagagttgaatgtaaatcagaggaaggctaacgaggggttctttattgtgtgtgcttttcaacagaaagaattccaatcagtctgtgaatataatcatttatttgtctttacagtgatgatggaagaatgtacaggtgtcccctttcaataaagtataaaaatatgtttatatacagtgaagtcacaataatctttaactgggaaatttatttagaattcctgatctgttcttattaaaactgtgggggaaacaaatgttttacgtaagtgctacatttccagtagattgcacctggcatcaaaagctcagcttcatcttagggtcctgcttgatattacaaaagactaattttaagtcctaggactcaaaataaacatgattttttgaataatagatatatacatcaaaaatacatctaaaaaggcattggttagtgctattaaaaa

SEQ ID NO: 467632 - DNA, 1000 bp, Homo Sapiens; identical to SEQ ID NO: 158269

SEQ ID NO: 467633 - DNA, 1000 bp, Homo Sapiens; identical to SEQ ID NO: 158270

SEQ ID NO: 467634 - DNA, 1000 bp, Homo Sapiens; identical to SEQ ID NO: 158271

SEQ ID NO: 467635 - DNA, 1000 bp, Homo Sapiens
ttttttttttttttttttttttcagaagaggaattttacttttacccacttatggtaatatttgcaatattagaatataattaggttaaataaatcaaataaggaatccagaagaaactgttcttgagttaagccaagtacacactggcaatttcgagaaaggagaactctacacattaacaaaagaacacacaagctcaaatgcaagtttatatggtgagtgtttttaaaggatttaaaaagcatgctccatcagcataatagctttttctcatttatgtaacagatgcatttctgtctgcttgtgtacagcaaagggttagaacctgaataaacttatttatgatttcagaaatgtggtattttagaaatgtactccatagaatttacttcactgctcctaccactgattcttcaaataagcaaagtacagaaggccttatcccttgaaaatgtttttaaacactagcactttaaattgaaacactggtagaaacgtagcaatgtcaggtacaatgcctatacttagtcttatttaaaataagaattgaatgcacaacagaaaatttatcattttctttatcattggaggggagggaaagaaagcaagcagaggtggggatatagttacactatttaagagctgaatacaaagacaatgagtctttcatagtctcaacaactccacaatgaataactgtggattatctcatttataattcacattggataaaaaaaatcggttcccctctgtgtgtatcaatttaattcaaaccttatcttcagaatacaaagatgaatactacaagataaactaactgcaataggtttttctaagtagaagaccaaacaccaaagggaatccctctttccaatgtcttctgataaggcaagattttgccagaatggaagtctaacacttaaataagcattctcttggccaagtaagaaactacagttgttgtgggtattaccctacaattaccatatgtattacata

SEQ ID NO: 467636 - DNA, 1000 bp, Homo Sapiens; identical to SEQ ID NO: 158272

SEQ ID NO: 467637 - DNA, 1000 bp, Homo Sapiens; identical to SEQ ID NO: 337624

SEQ ID NO: 467638 - DNA, 1000 bp, Homo Sapiens
ttttttttttttttttgcaggcgcttccagcgctttatagttctttccgggacagacggacagacagacagtgcggcccgctctgtcggcccgcatcattggcaccttggacacggccccaggcccaactcagtccctggtaccctaccgggaggattccggtcccgccccagctcagcacctcggacagttcccggcccagcctacccccctcccccctccctccgcaaacaaccaaataaattaaaaggggcagtggggaggagcaacaaaaaagctaaggataaggaagcgggatgtccctcctccaaggtaagaagttttcttttcctcccacctgtccactgaggcgccgcggccggggtggtctcccaggttgattttgcctccaaacctcagcctcctgaaagaagccggcagccccttcccccacaccccccagctcccagcatgcaacacgttggaaaaggtggggagaggcggtgggggtggggcgagggaccatcctggtggctgtctggatacctgggactgcagtttctcctggcacctcagtcgatccaaattaaaaactaatattccctttgatcaggggagaggggtgtggtgactcagtcaggaataaaaaaatgcaagctgacacaagtggaggaagaaggcagacaggagggaagatggtgacacatgacaggagcaacaagaagggcagatggggacacaggtgcaggaggagaaacaggggtctacggggtacagtcaggcaaggggtaagatggagatgcagacacacaaacccaaggaacggaaaatggaaaggcagggagagggaggaagaaagagaggaacaggagagagagggagagagagagagaggaatgcagacaggaggaaaaatgaagacacaaaaaggaggcaaggaaatggataaaaccgagggggaatgggctgaagggaagggggagaccccggcagaaatggagaaatgggggcgcagacagac

SEQ ID NO: 467639 - DNA, 1000 bp, Homo Sapiens; identical to SEQ ID NO: 158273

SEQ ID NO: 467640 - DNA, 1000 bp, Homo Sapiens; identical to SEQ ID NO: 337626

SEQ ID NO: 467641 - DNA, 1000 bp, Homo Sapiens; identical to SEQ ID NO: 337628

SEQ ID NO: 467642 - DNA, 1000 bp, Homo Sapiens; identical to SEQ ID NO: 337629

SEQ ID NO: 467643 - DNA, 894 bp, Homo Sapiens; identical to SEQ ID NO: 158275

SEQ ID NO: 467644 - DNA, 1000 bp, Homo Sapiens; identical to SEQ ID NO: 337630

SEQ ID NO: 467645 - DNA, 1000 bp, Homo Sapiens; identical to SEQ ID NO: 337631

SEQ ID NO: 467646 - DNA, 1000 bp, Homo Sapiens; identical to SEQ ID NO: 337632

SEQ ID NO: 467647 - DNA, 1000 bp, Homo Sapiens
tttttttttttttcagcaccatgattcagccctttaatcttccacgggagcagttgagcgcggggcgtggcgggcggccctccgtgcccatgattcaggggcacagctgccccagcagacacacactttcatacgcactcacaccccacccccagacacacccccaggtctctggaactggcccagggtcctgctgctctcacagccgcagggacagggctcaagggctaccctcacccccacccggcttcctagcgccctggacgcccacggcccctcttggacttcttggtccctgaggggggacggatggggagaggggcggtggtcgagggcggcggcggtggcaggagtggaggtagaggtagctccgtgggctccggcaggctggggctgggccgaaacccctcaaaaggggagaacttgagggggctgacgggggcccgggggctactgttgaggcgcctgggtgagcgcagcttgggctggaaggagaagccctccttgatgctgtccaggacagacggcgccacgtatgtgaagcccaggaaggcctggttggcactctcgctgagggctgtgtcatcaggactgtccaccggcgtctgccgtgtgaagcgggtatcaaactggctcacgtcctcctctgactgcagacagggcctgaaaggggggtccacacgccaggccagaaggtcgtcccaattcatgtgccggaaaaagggatgtctctgcacatcagcagcatcccctgggccacccccaatccgctggctgggattccgtttcagaaactttttgacaaggtcccgggcatctggggtgaggtaggggggcagtgccagcttgcccctgatgatcttatccatggttttcttccggttctctgcggtgaagggcggcgatccagtgagcatgtcgtacatcagggcccccaggctccaccagtccacagcccggttgtggccactgcgcaccagaatctcaggggccatgtact

SEQ ID NO: 467648 - DNA, 1000 bp, Homo Sapiens; identical to SEQ ID NO: 337634

SEQ ID NO: 467649 - DNA, 1000 bp, Homo Sapiens; identical to SEQ ID NO: 158276

SEQ ID NO: 467650 - DNA, 1000 bp, Homo Sapiens
ttttttttttttttttttttttttttttttcttttatttgattcatggttttttttcctttttaaagcacgaataacatttctttcaaaataaatatacagttctataaaaaaatataagaaggtactataattcttggtcactgtccagcagaaacatgtttgattgcttttagagtcagaagtcaacaccatccacaaaaatacattcttttagccaggttttagaacactttgaaacatagaaaattccttattctacaaacaagtccttttagagatattctaaatatgccagtgatgaatgtctaattcatatgcaggattcaaggctattgaggtgagctagactaagaataccaagaacacaaaattgtattgatacacaaacagtatgtaaattactttgtcagattacaaaaatgcatcagattttatctatggttttcatagataaacataaagcaataagttagttgctttaaaaaaatatatagctcaggtgtttctcttcattcaagtgtgaaaggcacagcagtcccgagtcttaggggcacccaccgcagccacatcaccgcgctgggacagatgcagtccgcagcgttcccagtattttgtcccagtgtgtaaagtacggagcgaagttgcagttaaagtgagagtgatgcaggtcgtggtgcaccacacccccgtaccacccgaagggcaccagtctgtgagtggaccaagggaagttgtagccggagtggtcctccacggaaagccagatgttgaccacgtggaaggtcagggtggtgagcgggtggcacccgagcagtgtgacgttcatcatgtcgaagaagcccaaagaaaacagttcccagacgctcatatactgcgttgccagcgcgaacgaggacgagttctggtggtgcaccttgtggaaggtgcggtacagccagggcaccttgtggtgcagcaggtgccacacgaagaactccatgtcgaagagtagcaggcag

SEQ ID NO: 467651 - DNA, 1000 bp, Homo Sapiens; identical to SEQ ID NO: 337636

SEQ ID NO: 467652 - DNA, 1000 bp, Homo Sapiens; identical to SEQ ID NO: 337637

SEQ ID NO: 467653 - DNA, 972 bp, Homo Sapiens; identical to SEQ ID NO: 337638

SEQ ID NO: 467654 - DNA, 1000 bp, Homo Sapiens
tttttttttttttttttagatgttttaaaatacatttatttcatgtcgtttgtccccagggtttggagtttgatgttctggaccaagcgtaggctctgagcaaatgctaccagggctggagaatcagttctgccacttcctagttatgtgatcttagacaaatttccgcgccttagttttcttctcagagaaatgagactagtcctatccacactatggacaagtggtaggaggcgaaggagctcacgtttgtaaagagccttgcacggtgcctgagacaaattcagtgcttagcaaatgttagctcacctctcccttttcttcctgtatccgattttgtatacaaatgtgtagaaaatttacatgaaataatgcagaaagatgaaaatccatgtttattcttcttgcatttggtggatgctagtttacacttcggtggaatggtcaggttcttccctcgatgtgccttgtgcagactgccccctgggttgaagtggggtgttactacgcagatggaaacagcggcagaggtatttgctaaatgtcccatcaagaaacgcatacaggagagggttgatgcagcagtgggtggtggcgatgagtttagtgatgtgaacacttttgtccagattgtagctgctcttgcagtcactcagggagaagtgttctttgaaagtggacaggaaaaatgcaatattgtagggcgcccacatcagaaggaagactaccattatggcaaaaacaagcttgaaaaggctatacctctgctccctgaaccttagtgtttttctcatttgcacatagagaaatgtaaaaataaatagggggaggacaagaaccgaaatgttcatttttaaagtcagaaaatgcttccagaatgtctcatcagctggcaggaagggagttctgctaaatgcacacttgtatttctggtcttccatctgaggtttataaaccacgaattcaggcaaagtggccagaatggctgttacccatgcca

SEQ ID NO: 467655 - DNA, 1000 bp, Homo Sapiens; identical to SEQ ID NO: 337640

SEQ ID NO: 467656 - DNA, 1000 bp, Homo Sapiens; identical to SEQ ID NO: 158278

SEQ ID NO: 467657 - DNA, 1000 bp, Homo Sapiens; identical to SEQ ID NO: 158279

SEQ ID NO: 467658 - DNA, 1000 bp, Homo Sapiens; identical to SEQ ID NO: 337644

SEQ ID NO: 467659 - DNA, 1000 bp, Homo Sapiens
ggggccagctcccatgagtgagtacaggccagttccagcacaggcactttcaaccaagcaactgcaatatgtgtccttcaaatgctgtccctacagggcctgggcgggggctgatgcctcagccactgtagtgttcatcagaggaggggtcccaggttcgaggcctggccagtgccagagtctgtgagaagtgggtccgaagggctccatagctgaggtctctggtgtcttttaggctgggatccgcagggtgagggctctggggctgctagtcagttgtcccttcacctgttcggggatgatatccatcacccaccggtaggggcctctcagctttgaggccttcgtccctggctgaggccgctggctagtgggactctgcgggagggtcccaggcaggaagagccaccggtaagggtccagtctgcaaagccctggagcgagccctcagcccaggcagccgcaggcggtggcggagaggcggtccacggttctccaggtgctgttgacgtccatgaaggagaccgcttcgtagcgcgtgggtcggcagcagggctggctgacgggccgggagcccgggggcggtcgcagggccccggcgcccagtaggctggccaggctgaggtcgtgtggagagcgcgcgcggcggcaggagccgctgcagaagcggaaacgcaccagctcgtcggagcggtggcccaggccgagcgcgcgcaccggcaccagctgcgagcgcaggcggcagccccgcgcccccgctgcccgagcgcggctgcccgggcccccagcccgcgccgcgcggcccccgcggggaagagcagatgggggtgcaggcggcgggggcgcgggccgagaaggctgcggcggcggccgccgggctcttccactgcaccagcgggccgtgcgtccccccggcaggtggccggcgggggacgccaggacaggcggggggccttcgcggggggcagggctgcggggcgcggagcccagggaggcctct

SEQ ID NO: 467660 - DNA, 1000 bp, Homo Sapiens
ttttttttttttttttttttttttgagagataaataaaggcctttatatacacagaagcatgacgcagcacgggcaggggggctggcagctgcagcagtgggcttggcaggtaaggcagggccaagtgctcctgtcaatgggagaagatcccccggaaccgggctttgtcctcttcgtccttctgccggatccgtgcctccagggcccgcagctctcggctcaccacaggcgccagggctgggtccagctccagcactttggcaaagtcagcctgggcctcctgggcattccacacggccgcgtgggccttgccccgcttgaagtaggccttgacgttgtcgtcgtacttgttgaggatggaagagcagtggtccagcacctcgtagtactcctcgaccaccagcttgcactggcagtagttgagcagcagcggcgtgatctgcttgtccagctggatccattcaggggacccaggctgttccttcatctgcaggttcttgaggcaggcaatggcatcgtagtacttggcagcagcctccttcacatgcccctcgcggtacaaccggttgccctcctggtggataagtggcactgcctttgccttctcttcgtctgtcatggcccatgggtcctgctggtacgtgccagggctctccaccttcagcatctccatgtggaagatgaggggctgggggttctgctgcagggcgtccaggtcagcatggcccagggagctgtgttcacgcatctgtgcaacaccgcagcagtgccgctggccctccagggggtccttgcccaccgcgatgttgcggagactcttggccaccagcgggtacaggaccacatgcttgatgtcacagaggaactgggcaatctccccttctcgcatggtgcacacgatggtctcccacacaggcagcttgaacttcttgccaatgatgagctccatgggcttgccacgagcccggctgtcgtccagcacggtgccctcgtcgtcac

SEQ ID NO: 467661 - DNA, 1000 bp, Homo Sapiens
tttttttttttttttgaacagaacgcactcctttattccctgggagacgacaggctccctctcggggctgggggacgcttggttctgggccctagcaaggtggggacagtgctgggggcactgctggctccactggcagggcaggtccgaaggggctcctggcccttcctcaaagcttctccaggtaggaaccagggacgaagccacgctgcccgttcctctccacagtccaccagccatcctccccttccaggatcacctccaggatgtctcccgcggacaggtccagctcatctgggttctgcgctgtataatcgtagagcgcccggtactcctgggctggtgaggccgggtttccctgtatctcctgcactgcgatggctgtgtagacaccctcattccgctcgggggtgggggtcagggtctctgtggacgcagcagaagctgccaacgaagtggtcttgggacttccgtgcagcagtccagagaacctctttatcatgccgcaggacggctgtatgccagggctgctggtcagcggggtgacctcccgatcgtaatagttctggtagggcaccggagcggggggctctgtgcccgtgctcttggcctggatgaaactgtcgatgtcggcgtctatgctgcagccttccagcgtcagccgcacttcctcgtagagctcatcatccttgacacactgcatggagagctggttgctgtgcacccacagggcgttgcggagaatggtcagccggtcaaactcttgcagctgaaaggcctcacaggtggtccggtgctcctgctcccactcagcccggaccttctccagctgcgcaatgctctgcctgtatacccgctctgcctcggtggccgagtccttgcactgcctggctttgttctgactcttctccacctgcttctggtggccgttggcgctaatgcgctcgaaggcctgctccgcgtcgtccgcgtcccggcacttctgctcgtatgtcttctt

SEQ ID NO: 467662 - DNA, 1000 bp, Homo Sapiens; identical to SEQ ID NO: 158280

SEQ ID NO: 467663 - DNA, 1000 bp, Homo Sapiens; identical to SEQ ID NO: 158281

SEQ ID NO: 467664 - DNA, 1000 bp, Homo Sapiens; identical to SEQ ID NO: 158282

SEQ ID NO: 467665 - DNA, 1000 bp, Homo Sapiens; identical to SEQ ID NO: 337648

SEQ ID NO: 467666 - DNA, 1000 bp, Homo Sapiens; identical to SEQ ID NO: 337651

SEQ ID NO: 467667 - DNA, 1000 bp, Homo Sapiens; identical to SEQ ID NO: 158283

SEQ ID NO: 467668 - DNA, 1000 bp, Homo Sapiens; identical to SEQ ID NO: 337653

SEQ ID NO: 467669 - DNA, 1000 bp, Homo Sapiens; identical to SEQ ID NO: 158284

SEQ ID NO: 467670 - DNA, 1000 bp, Homo Sapiens; identical to SEQ ID NO: 337656

SEQ ID NO: 467671 - DNA, 1000 bp, Homo Sapiens
ctcccctttgatcttgagaatcattactacttacgtgagtagtttcctgtgactatattttcttttggtagaaagcaagtgactagatatgaccacacacaatgagatacaaaaagacacaagcatttactgatttgtgagtagacagtgactagatatgaccacacatgagatacaaagacacacattactgattgtgagagagaaaatcaaaatgaaatactggaatcactcatttgtaaacagtcccatatttcttataaggcttgtaaggcaattagtggctgtattgtgttgtggtttttttttttttttccccctgtgagataaagtttaacttttggaaaaagaaattgtcaagtgacgtgggaaagtggcaactggacatcagcttatttttctcttttcagctaatgtaaataaaaagaaagaaatagaagagactgtttgcatttgggagtgaaaggagggtgttcagctgagaggagttcaaatatacatcaaacaagagtgtgttctgcttttgctactactcacgtttccatgttgtccccctctaagacagtctgcactggcaggtagcccattcggggatgcttcgcaaaataccttttggttcgaaatttgttttttagtaccttggcaaagtctcgaacatcttctcctgatgtagtcggagtgcaatattccaccatgggatagtgcattttatggccttttgcaactcgaccagaaaaaaagcagctttggcagatgtcataattaaagtgctttagactcctgtacctgaatccaatgattggacactctttgcagatgttacatttggcctgatgcttggcagtttctgcagcagccactctgtgcaggacgggcagccacaccatggactggggttccagtctcatccagtctaggaagagggccgcttcgatctctggcttattattagcaaattggaagcagctccggacacttggctcaatgttactgcccccaa

SEQ ID NO: 467672 - DNA, 1000 bp, Homo Sapiens; identical to SEQ ID NO: 337657

SEQ ID NO: 467673 - DNA, 1000 bp, Homo Sapiens; identical to SEQ ID NO: 337658

SEQ ID NO: 467674 - DNA, 1000 bp, Homo Sapiens; identical to SEQ ID NO: 161256

SEQ ID NO: 467675 - DNA, 1000 bp, Homo Sapiens; identical to SEQ ID NO: 158285

SEQ ID NO: 467676 - DNA, 1000 bp, Homo Sapiens; identical to SEQ ID NO: 337660

SEQ ID NO: 467677 - DNA, 1000 bp, Homo Sapiens
aataatctggaatggtagatgaatttattgactattaaatgcactccttgccaacttgaaagcaccaaagttagtgcttcctttggtagcctgattgtaattatctcttctcgttaggaccaaaggcttcctctggtagcctgattgtaattatctcttctcgttaggaccccgaggctgagagacttcctcttccttgtcacacagacaaaatgggaacaccccacagcaaggcttcagccacgtcctgccctgattcagttctgagagttggtaggtcacaggcacgatggtttcctggtgttccttcagggcgttggccacctttttaatcacaaaatcatggaggggctctgtggcaggtgtcaggggtgtggactctgaggggtccctggagagatcgaagagcagaggggggttgtggtaggtaacctgttctccgaaacatctgcataatgaggtgacatagcagccaccagaagctggtggctggaataccggggtcacatagtgagccttccaaactgacccactgtcgtccttggggatccaccgcacggcgtgcaggtaggagccacagtagtggaaaagaaattcatgctccgagtgcctgacgttgccctgcagcaagggcatgaggtctcggccgtcaatgaccctgtcctgagggagacttcctcctgacactgatgcgacagttggtaaaatatccattaaacttgtaggttccttaatcaaccgtccagctggtacctttccaggccatcggacaattcctgggacgcggattccaccttcccagccccccatgccttttccacctttgtatattccattccatccaccaagttgggcatgccctcgcctagcttccaaatgccctccgtgatctgatgtaaagtagacaagggtgttgttccttaggccaaaatcatcgatagcatcaagaatcttgcccaccatggagtccatctcttccacattatccccatacaagcca

SEQ ID NO: 467678 - DNA, 1000 bp, Homo Sapiens; identical to SEQ ID NO: 158288

SEQ ID NO: 467679 - DNA, 1000 bp, Homo Sapiens; identical to SEQ ID NO: 337664

SEQ ID NO: 467680 - DNA, 1000 bp, Homo Sapiens; identical to SEQ ID NO: 158290

SEQ ID NO: 467681 - DNA, 1000 bp, Homo Sapiens; identical to SEQ ID NO: 158291

SEQ ID NO: 467682 - DNA, 1000 bp, Homo Sapiens; identical to SEQ ID NO: 337667

SEQ ID NO: 467683 - DNA, 1000 bp, Homo Sapiens
ttttttttttttttttttggaattttgtaagatttattgagaatagaacaggcttcctgtcccctaaccctgtggtggatcctgagaagagggaagcctaggtctgggtggtgtgggctggaggccctacccacctgcaaatggggactcccaggcccccgcgggtgcatacagtgaacaaagtaattgctctcccctatctcctgccgagcccagtgggtggcctgactctggtgagcaccacacaccccagagtcccatcttccaggaaaagctggggtcttacagcagagaggctctgggagcacatctccccttctggtccccaaaggcccccagctgcctggcccctggcccactaacccaggcatgctccttccagcactgggcagaggagtcaggaagatgcccttcctcacccccactgacgccacctctccagggaccttaacgcaggggctgggaatggaatcggaagctagaatgagcaggcagcagcagctcccctaggtatctgcctctgagaggacctgaggacagaggcgaggcccaaggcagaggccggagtagggccccgcttcacctggggcctcaaaggtgtcgtttattcatttggcaaatctccactgagtgaggaaatggatgggtgagaggatgggattagagaatgaacaaatgtcacctgcatattttcccaattccagcctgagcaggaacccggcaggagccaagagtcctttcaaggtgggagaacaccaggtattgctgatggggaaagtgaggtctgggaggctgggttgggcctaggacacgaggggcaagaacggagcttggggatgtggcagttcgtgtgtaaacaagtgacatcttcttggcgctcctcggcagacagcagggccttaggaaaatgtgctcaatggatagagtcccttagcagtggtgacagttgaggtggggaggactatttgaaatctcagcaaggaaactcctccacgagaat

SEQ ID NO: 467684 - DNA, 1000 bp, Homo Sapiens
gaacatatacttattccacctgtcttctatttctatgacttagatattctgcatcacaaaatccctccaaactgggactatgtttttgaagtcattcattttacaattataacaacaataacaataatatttattgtttgctttgtgccaggtactctactgctttacataaattatctcattctgtcacatctaacggcaactaagtatacgcttacatctgctagtggcacctaaaataaggatattgttggtcatctttaaagaaatgtcttaacataccaaagtagtggaatcaatagaataaaatatttaagtcttacaaagcgtacgacactaaagtaatataggataccactaaatttatatttctatgtatggaaagtaaagctattcctggtacatggtgctgaccttctttttatcctatttcttacacctttctcaaattcctattaaaccacagcttcgaatatgtcaaataaataaatttgatccatacattcagttaaatccttcaactatgtagtaatacctaaagtgagtattatgttgctgcattaatgccaaaaaatgtttcccatggcaatccagcctaatattaattgtggtatgggtgctgaaaaaataaaatgagacataattttactaatcattcactttgcattttgaagctctatgctgttcttaatcaaaactcttattttattatcaagaattacactagttctaaaatgagtgaattttctgttggagacaggaaatgaagaactactaacaccgggaatgtatttttcctttctcaatattaacacatgatatatattcatattaataacaactctggaaactagtttcattccttctacacataagcaataaacagtatgtgcaactatgaatcctagcagcagtaatgtggatatataatatagggtttctttggaatatacagccatttctaatatttcatttcagcaagtgtacaggcaaccatcac

SEQ ID NO: 467685 - DNA, 1000 bp, Homo Sapiens; identical to SEQ ID NO: 158292

SEQ ID NO: 467686 - DNA, 1000 bp, Homo Sapiens; identical to SEQ ID NO: 337668

SEQ ID NO: 467687 - DNA, 1000 bp, Homo Sapiens; identical to SEQ ID NO: 337670

SEQ ID NO: 467688 - DNA, 1000 bp, Homo Sapiens
taccaatcccatagggcccagcccagttctctggggctttattattgggcaaacaccctgacatttggagcactcccatgggcagtccataaagttggtgtccaggctctgcagacatgcctggtgatggtgatggtgcctccaccccagggcagatggaggggcttctactctgtcctgtcccctgctggatcttgggtgctgggctctctcccaggggactcagatggagccagaggccaagctcccagctagagctgcctgggccattcagacagtcgccttcaggggcacgctgtctgctggttgatccgggtccttcttccttgacatggtccagtgggtgaaaatgaggatgaggaagattcctattgctaccagggtgcctacaaggatgcccactgccgacagcttcgtgggcatgcccttcatgcggcccaccttgcgcatgcactgcccctccacgttgcagcgacacacgatcactcgaaccaggagctgccacatctgggcattgtggctgaccaccacggggattatgtgttcacgtggctccacccaatgcagggccaaggtgaggtaggcatgggaaccattgagagtctggaggcgccaatcccgttgcaccgtggggttgggaccaagggtgaagctgtagggaccgtgcccactggccagatcggggtccttgctgggtccactcacgatcaagccatggtcttggcggggtgtgcagaggtattgggagggcacaggggcaagagtcagggctggggcaggaggggcctttaggaagtggatcaccaggggtgcagaagcgctcagtctcggctcatctgtatcctgggcctccacaagcaccgtgtaggtgtccccaggctgggcgccctgcagggactgggcggtgtgcacctccccggagaatttctcaatgcagagccagccctctgagtcattgactagggagaacctgagggttcggctgatggggtcggagggc

SEQ ID NO: 467689 - DNA, 1000 bp, Homo Sapiens; identical to SEQ ID NO: 337671

SEQ ID NO: 467690 - DNA, 1000 bp, Homo Sapiens
tttttttttttttttttttagctatggaagttttctttattgattacttaatgtgtaacaataattggcatctttttcacacattacaaaaaattatacttggctcagtatgcaaccttttaagcatagccatattatttaacaaaagaggggaaaacctattctacccaacacagcatttacaaatgcacaaaacatgccactttggcttgtatattgtctagattaaaaaaaatcttttaacataaataagttagtataatttttcagtgtttttacagagttatgtacacaggtacacttcaaatggtttttccatacacaggcaatgaaatactgtttaaagatgtagtatccatttcacttatcctacaagtgtgcttttctctacatgaaccttcctttaaaaataacactttcctgtggataaatggacagagtaagctttaaattaaaaaatatttcattttttaatgtgaagttacttacagatctttaaaaatatcgagggatttagaattattttgactgtgtttacacagcccgaagtgaaaagaaaatgagaaaattttgtcaacaaatttaataaaagcagatggtcaattcttaacattcaaaactcccaagcacctcggatttttgccccaaactacctggagtgatcaccattctgctgagtaattaactggtaaattccaactttaagagagactggggagggcagtgaggataggtttctgttgcttttttaaaaaagccacatgcagctatctaacaaactttagatagcttgggagatcaccagatctcccaaatgagaataaacttcttgtaaaaataaatagcaattatctttagccagtgttcaaatttttgtgatttttttaaatgaagtatcagctgtctctgaaagggacattacatctttaaagaaaacaattcaaacccttccccaaaattgcttctcttcatgcaagtcaaatatttatctacttgctgt

SEQ ID NO: 467691 - DNA, 1000 bp, Homo Sapiens; identical to SEQ ID NO: 246439

SEQ ID NO: 467692 - DNA, 1000 bp, Homo Sapiens
ggacagaggtatgtcaatgataatactgcatttgtggtcagctttttcagggtgtcacagcaaaatgagggacaaggtacacagggtaataaccaatgcatctgcattgagttctattgctaaaataacaacattctcgtgggtaaataaaattacattttacgatacacgtttcatttaacagaattgtcttctttttgtaagtggaaaatgtataactgtatcaagtacctgtatgaattaagttcccttttattcccaataagactgaagtttaaaggtctacattgttttttaataaattaaagatgtattaatcactcttccagcaaaccagacatacataggaggcacagcaaaagacccaacctgaggggcttccctcaccttcacccttgttctcacgtggaggtggcgcatgtctatgagacacagtaccccactcagcgatcctctgcagtccagcaaattctagcacttgcttggaaaacaaatcaagtggtaagaaatgttttatccttagctgtgtcaacttgatggtgctgggccattcagctcatttccctgatggattagaataaaacgtcttcgttttctattaaaatctgcacaatcagcttttggtaccgcatatcatgcagggtggtcagggtgctgtcctcagggggcctcatcagagtgggcccaaacacgatccccagattttctgcattcatgaaattgtctttttcattcatagtaacctttttgaggtggatcattaggtaccggagggtttcatagtgggcaggaggcagcagcatcagcacttcatggacggcttccagcctctcatctgcattggagatttttgctgcatctataaatttggaataggtatcatatgtgatgacagggatgggtaagtctctgaaatacagtttaagggctccagtgatgatgtttatgtctggatagacattggcagatatatcggccttttcaccatctctgtcaaatg

SEQ ID NO: 467693 - DNA, 1000 bp, Homo Sapiens
tttttttttttttttttttccactctacagagtttattgggtttgtaactggacgaagtcacacgtgtacaaaatgaagctcacactatcccaaagcagagtagggactgaggccggggatccattactggcctttgggggagctctgaggtgaggggcaaccaaccctcccactccagagctgtggccacaggggtgggaaggaaagggaacccacctggctttggtcacagaactcagagcctggcattaggccaggacagacaggtggatgggagagcaggagcctcagaactcccctgcccagggagcccaggggctgctccaccggtcccacttgtaatgtgcttggcccagacctagactcgggctggtgcaaagggaaggcagcaaagcaggagggaggagacactgatgtgtggtgggggagggagcggcacctggacctgtggaggagggtggctggggaggtgggctagctgcctagtggcagctagcagcgagtttcataaatgccactgcggccaatgtagcgcacccatttgatgacatcatggtcgctgtagttcagcttcggttcaaacaccttcaagtagcgcaccttgaggccagagggcgcgaatggcacctcaaagttcatggaaatggggggtcgagcccatttcttcttgtcgttggtaggcagaagctcaatctctgcgctgatctgcgattccttcatgcctgccatgcgcttgatcttccacacgatggcattctcgctggccttgtacttggccttccccttcatgcagatcacctgcaccccgcttgtgttcagtggggttgggatcctcacctcgatcttctgagccagcagtgagggtttaaagttggacttgatgaccaccttgacctccagtttggtgcgtcccacttctcgcactagcgggatcacccggaagggaaggatgatgtccttggttgtgcgatacctcataagctcaaactctccatctgg

SEQ ID NO: 467694 - DNA, 1000 bp, Homo Sapiens
tttttttttttttttttttttttttttttttttttttttttttttttttttttttttttttttttttttttttctgggaaccagctttatttttctcaggagcctctcactgggaaccagacaaccccagagggcatctttgcctgcccttggtgacagtgtactccaatctcgtcattcattaatgtgatggccagtcactgagcacctggcagatactggttttccatcttctcacactcagctctgcccaaggtgggatttttgtctttcaaggcaggagccatcgtcccacccaggatgagccatcctcttctgggctaggttagagttgcctgttatgccaaagaatggagctgggctggagggaggggcaggtggtgatgggggaagagaagcagggtctcagcccaacctcagtaccaggtcagctggggtgccctgtttcatcttgctgggccggctcactttggagctggcggatttgtcaggttggaaattgctttcttcatctccacccaggacacgcagcccacagctctgccccgcgatgtcacgaagagggactgaaggttcaacagcttaaagaggttttgtgcctggtgcaaggtggtctctgagaatagcgtcagggtcactggttccgtggggcagcccctggccaagatgtcctggagacactgctggtgtcctggagccctggaaggaggctcagcctggagggcctgcaccagctgggccctctgcacgatgcctaccaggatctgggactctgtgctctccaccaggggatactcggtcacgtctgtggaggtcacaaccttgaccacctcctccagcggcgtgtccttggccagtgtggtgatgctgtggttcatgaagtgctccaccctcacatggtgggagccgatgttgcggcccagaatccgtggcaggtatggcagcttcttgacaatgatggtgccatcatagaaggagggctggcagctctgtgcaatgg

SEQ ID NO: 467695 - DNA, 1000 bp, Homo Sapiens; identical to SEQ ID NO: 336132

SEQ ID NO: 467696 - DNA, 1000 bp, Homo Sapiens
gaattcttccttttttgctttgagtcagtcaaggctggcctcccaagaagcataaattgctagtccaaggctgtatggaacacagcatgttctgtccactagaagaaaggggttccaggccctagattcccagcataaaacactgttcatcccatgcaaaatgcagtgaaaattggtggatgctaaagaggttcttgccttgatcttcagaagacatatccttgggtgtccctgggttgagagagtccattgaggggttccacagtgaggatcaaagcatgccggtctccctctcattcatagaagtcctctcattcattgatgacatcttggtaaagcttctatggctggggtaggaagagtggcctgtatcttcacttagagcattgaccaggcgagagaagagggccaccttgaacttcttgaagtcctgacccatgaaaacatacagaatggggttcatgcagctgttggcaatggcaagggcagtggccaggggcaaacccaggctgaagacagagccaggcatggcagtgtggtggagctctaggaggttgagtgtgtggtaggggcaccagcagaggaagaaggtaatgatgatggtcacaataatcttgaagggcttcttggtcttggccaggcggttgcgctgcagtttgcacacgatggtgaggtagcaagctgtgatgatgaggactgggaccaggaagccacagaggaagcgggtgacagtcaccaccatgtgccggctataccccacagggtccatttgggagtgagtgggccacgaggaagacccaggtgtggacaggctgaagttgttgaagcaggatattttcccatgcaggttggctgtgtcccggaagacgagagatggggaactcaagaagaaagccaggacccagatgaccatgcaggccatgtaagccaggcgaacgctgcggtggttctgggaccagacagggaggagcacagagatgcagcggtcagagctgatgat

SEQ ID NO: 467697 - DNA, 1000 bp, Homo Sapiens; identical to SEQ ID NO: 337674

SEQ ID NO: 467698 - DNA, 1000 bp, Homo Sapiens; identical to SEQ ID NO: 120120

SEQ ID NO: 467699 - DNA, 1000 bp, Homo Sapiens; identical to SEQ ID NO: 337679

SEQ ID NO: 467700 - DNA, 1000 bp, Homo Sapiens
aaatcattagcactttaatgcagagtggagagaaactaataaatcatgcagttcaggcactcgttttccttatggcatgtttgaaaacataaaacatgcaatgatgagatgcaggtcaatatgaatgaacaatattacaagactgctcagaagcatttcattttacatcataggcttaatgaaacactaaaagaaaagtactgttctgtgatttctttaaacagtcagagactccaactatgccatgaacaccttcaacagtgatctaggctgttgtttccaaataaacatttgaaatgtcataaagatgggagtggagtaggtgaggaggagggagctaattgcatgcatgattcgcttccaagagctcagtattattacaggtacccatttatactagaaataaactgatacaatcatttacttccttcaagtgtacttaactgatccatgaaaaattacacctatatttataaatgactgaaaaaagcaagaaatcatctattgagctttgattgtgttgtctggcttattgtctgtctgtgaaaggtgagaattttaatcataattaatgggcaactcacttgctttccagcattttagtcatcacaaaattaatcacaggaaccctaaatttgctccacaatgcttaattaattatgcattaacccatttctctcaagcattgttttctgaatctttggtgggaaacacattgattaggcacatagtttaaaacttctatttcgttattggtgtggttatgaattctctcctagattctcatgcagaaaggaacaaggcttgccatattaccacacttgactgtcaagtaacatgttttcacttatttctggaattaaaaagaaaactaagcaaaataaaaaccgcgttctatttttcagcatgagaaaaccttatgcctgatatttttatttccactcagaagagttaagatgttgaagaaaaactatgtatatatagcaaggtattgtagtca

SEQ ID NO: 467701 - DNA, 927 bp, Homo Sapiens
ttttttttttttttttttggctcatagaaagtcactttaatagatagggacagtaataaataaatgtacaatctctatatacaagctgagacctttccttttgtctactccaagccttccccctgcgtatgtgggattgagggtcacatcattggcactagtgagagggtagtcagtagccacttctgggaaaggtgggtagtgtggcccaagtgggggactgatgctcccaattgttcatgcttggtgcagattcaccattcggtcaatcagagctcggcgagtcgcctctacttccctggtcaggcgctcgatttcctgcttgagccgttcattctcttcagctagctgtgccactttcctttcattctcctgttctttctccttcatgcgctgctttccagcccgggctggggaatgaccactctgtttccgtttcctggttctcccttggtcttcctcctcttcctcctgagccagggagctctgactggaatctggagagtgagggctctgggaggtgcttgtgacctctgctggttctggctcctcctcagtcagccaagccagagaagcagggtcaagagtggtgaagatttttgattcttcctcttcatttccaggaggtgaaacataggtacccccattttcatctgaagacaggacctcttgcaggtcctcataccaggcttccagctcccagctggacagtgtcccgaaggagaaaggcaatgactcagctgccatctctgcagttggatcagtctggaaaagcacatctgctttcaggtgtggtgatgtatgaagatacacttccttcttgaacactctctcctcaggttccagctctgattttggctctgtcgctgccacccgctcatctttaacatgatacgctcagtgccttagacttaagtctctgacctc

SEQ ID NO: 467702 - DNA, 1000 bp, Homo Sapiens; identical to SEQ ID NO: 158293

SEQ ID NO: 467703 - DNA, 1000 bp, Homo Sapiens; identical to SEQ ID NO: 337682

SEQ ID NO: 467704 - DNA, 1000 bp, Homo Sapiens; identical to SEQ ID NO: 158294

SEQ ID NO: 467705 - DNA, 1000 bp, Homo Sapiens
tttttttttttttttttttttttttttttttttttttttttttttttttttttttttttttttttttttttttttttttttcccagagctgcagtttaatgtttaatgcccaattatctcaatacaaggaggcttacatggtgctcataaagacacgaccaggcgaaaccaggccggcaggaaatgacccgcatgagtcccagcacggggaccatgttctctcggttccagctcaccctcgaaaagtgccacaggcaaggttcttcagctcacccaggagccagcaggctggccaggcgtgtggccaccatggtcactgaggatcctcgtgggagaatagggttctgggacctcaggatacaatcacaagaaccagaaagctgcttccaaacaaccccagaaggttttcacttcacatgcgctaagccacacaacacctggatgctggggcacccaaaccctttccctaaaactctgaacactgcagaatggaggttgagaacacttggggagggagaacaaagtcagaaccatcctaaagccagtttttcaagcttgaccacctccctcttcctccctgaaggcacaccagccgatcccattactgtggaaaagggacaccctctggtctattctaacacctttaatgggaaaggagttaggagcatgtccctggcttcaagaaatctctgaatctccaactctactggatgatttcctggagccccaagctttagaagtccctggggacacgagtgatttttttaggggggctgctggtggggctgggaagtttcctggcagaaattatttacctcagaaagacactggcttttctcttaccctcgttttaaagtctacctggtccctaaagaaaataccactcaggctgggcctggtggctcgtgcctgtcatctcaacactttgggaggccgaggtggtggatcacttgaggtcaggagttcaagaccagcctgactaacatggcaaaaccccgtc

SEQ ID NO: 467706 - DNA, 1000 bp, Homo Sapiens
aatctgaatcgctatcactttaatcagcatctgtatgaaggcagcagacagcgtttccctcagagcagccccattcttcagcggcagggacacaaggacccgcaggccccgctttccgtccgagcacagcatgcccagagggaccagcgggggctcctcagcagaatcttagatttagaaggtgctccagtcaggaccctcacaggctgggtgacgaaggctgtcatgccgtgagaggtcgggccacgaccacgcagcaattggagaggaactgcacaccacggacactgctcttgaaaagaggatgatttacttgcttctaaaactgacaggctgcacttgtcctctccaagcagaggtgtgaagcaggggcagctggttctcactggtctttgaagttggcctttctcttttccacaaacgcggtcatcccttctttccggtcatcagtggcaaaggttgaataaaagagtttcttctccaacttacttccttctgttaatgtcatttcaaaagctgcattcactgattctttggccatcgctactacaattttagaattgctggcaattttttctgcacactggatggcttcttccaccagtgtctcaacaggacaaatcttgctgacaagacctgcttgcttggcgtcctgggctgagatccggtcaccggtgaggaccatctccatcgccagcgacttcccaacagcacgggtgagtctctgggtgccgcccgcacctgggatggttcctattaagatctccggctgtgcaaactgggccttctcaccggcatagatgatatcacacatcatggcaagctcacagcccccgccaaaggcatagccattgacagcagcgatgactggcttcttgacctgggtgaggtggtcccagtgcttcaagaacttgctggagtaacagtcctggaaactcaggttctgcatttccttgatatcagctccagctgcaaaggccttatccccgccggtgaggac

SEQ ID NO: 467707 - DNA, 1000 bp, Homo Sapiens; identical to SEQ ID NO: 337684

SEQ ID NO: 467708 - DNA, 1000 bp, Homo Sapiens; identical to SEQ ID NO: 158295

SEQ ID NO: 467709 - DNA, 1000 bp, Homo Sapiens; identical to SEQ ID NO: 337686

SEQ ID NO: 467710 - DNA, 1000 bp, Homo Sapiens
ttttttttttttttttcattaagagagagacttttattattcccatagggaagggggacactggggatcactaaactacagtggtgcctggaaaataaattaaaacagaaatgcatcaaaacaaaagggagattggagacacggagagcagctgggaggctgcggtggtgggcgggcccgcccaggcaggcaggctctccgaggagaaggccaagtggtcccaggcctcagccagcccattgcttgtccctctgtcaatggcggccccgggcttcaagccctgtggggccatgactccaggcctccccaaagcctggccagggagtggccagagtccagcttgggcccacgcaggggcctggccagcagcaagcagcactctgccctcgtgggtttgtggttgcccaccctagtcattggaggtgacatcgatgtcctccccattggcctgcttcgtggcaatgcgccaccggttgatgtgatgggagcccttcttcttctgctcggactcaggcccttcctcctccagcttctgccgtttgtactttgtcctccggttctggaaccacaccttcacctgcgtctcggagaggctgagactgccggccagctgcttccgctcggcgcccaccacgtagtggttcttctcgaaggcgcgctccagccgcagcagctgcgagggcgagaaggccgtgcggatccgcttgggcttgcgtgcgaaggggccgtgcagaagcagcccgtcctggggcacgtcgctggcctggaagcggtggccgaagaagcggttccgcaggacccaggggtagaaatggagagggtcccggtgctgggcgccgaagaaggagtgcgggggctgcagcggggaggcgcccagctggtgcgccggatgcacggtcagcgcggggtggttcatggcctcggggaacacgagctcgggcccaccgtagagcgagcggcccgcgcccgcggcggccgcggcagggaagccactcacgaa

SEQ ID NO: 467711 - DNA, 1000 bp, Homo Sapiens; identical to SEQ ID NO: 337687

SEQ ID NO: 467712 - DNA, 1000 bp, Homo Sapiens; identical to SEQ ID NO: 337688

SEQ ID NO: 467713 - DNA, 1000 bp, Homo Sapiens; identical to SEQ ID NO: 337689

SEQ ID NO: 467714 - DNA, 1000 bp, Homo Sapiens; identical to SEQ ID NO: 337690

SEQ ID NO: 467715 - DNA, 1000 bp, Homo Sapiens; identical to SEQ ID NO: 337692

SEQ ID NO: 467716 - DNA, 1000 bp, Homo Sapiens; identical to SEQ ID NO: 337693

SEQ ID NO: 467717 - DNA, 1000 bp, Homo Sapiens; identical to SEQ ID NO: 337694

SEQ ID NO: 467718 - DNA, 1000 bp, Homo Sapiens; identical to SEQ ID NO: 337695

SEQ ID NO: 467719 - DNA, 1000 bp, Homo Sapiens
gggtgcagctgttttatttccagcatgttcccaacctggtgaccctccacagtccagcagtagagagatgggtaaggggttagatcggcccacacctccacctgtccctaaggttacctcagttgctgaaagctaaaaccttgcgcgcaagggcgaccttccccaggagggaggagagacgctggaagagcagccaagcctccaagccagggccggccgggatcagcagaggtgcaaagtcccactcagacggacccagcccttcccctcccaacactcatcccttccctgctgggggccggggctggggctgggctcagtggcccaggaggcgcagcatctcctgaggatccaccagcttctccctgggcttccccgtgccctggccccgggccacctcctcggcatccagcttctcccagtctgagaaagagactggccggacccctcggctgctgagcagggcctggatggctgcgtagccaggcctggggccagaggggagcaacccagccttcaggtcctgcagcagcatctggccggtgaggaagctgtcagtcatggttgtggctatgacacctgtaggtcctctcttcacccagccgctgcagtagaggcctggcacatccataacccggccctccacattggggatgaccccaagcttggagtcaaagggcacgcttgggtcgacagggcggctcttatacccaatgctgctgagcaccagcccacaagggaggtcttccatgtctcccgtgggcactgcacgggtggcctcatcgacaccctccagtctagtgactgctaggcggacacctgctgcccgccgcccatctggtgagggcagcacctgctgggggcttcggaaaaagcggaggccccaggcacgggaggccgatgcctggcgggcagcttccgccggccctggcttctctgtggccgttcgaagcagcagttccgtcagccgcttcctcgggcgggggacctccttgatctt

SEQ ID NO: 467720 - DNA, 1000 bp, Homo Sapiens
ttttttttttttttttttttttttttttttttttttttttttttttttttgtataaatcgtctttaattgagaaagctggagtggagacccgatcccctgggagcagtgccaggagttgggtggagactgagtggggtttgtgtgggtgagggggcatctactcctcttgcaacaagccagaagtagaacagcctaaggaaaagtgacctgccttggagccttagtccctcccttagggccccctcagcctaccctatccaagtctgaggctatggaagtctccctcctagttcactagcaggttccccatcttttccaggctgcccctagcactccacgtttttctgaaaaaatctagacaggccctttttgggtacctaaaacccagctgaggttgtgagctgtaaggtaaagcaagttctatccaattagaagctgttggggcgtatgaggtctggagtgcaagaggccttcacccttcttggcctgacctgtaggggagaagggtgagacttattgctgaattggggtctcctcactgggagggtcaaggctgtatccatttgtcctttttattaaggacatattactctaaggacctcagctttaaaggggacctggaaggaattcctgctgaggtagctaagtattcatgtccacccaacacagatgcaggttcagtcatgccataattttgacccctcccccatcccagcttccctactatgagccagggatccttccaaaattcctctgcccttctccagactctgtctccctggcacgacctcagctgggttgaaggagctagaaactgcatgtaaaaataagcttagcattctatatggaagaatcatatttttagagaattatctaggaaaaacaagaaatggttcttgattcatccagaagtgtttttatgaatcatagctgggtcttttccagaactcatccgtaataggtatcactcaagaaggcgggagggtggggctagaactt

SEQ ID NO: 467721 - DNA, 890 bp, Homo Sapiens
ttgcaacagagaagttcggagacagcaaagaataagcattagcttacttcctgctgctcttcagccacggagcaggaatgtctggtgaggataaatcactcaactgtgctcaggacgaataagtcacaacacctgtgaggatctggctatgttgtcttactcttgttgactggtttgcctccattcattattgcagacgcacttgtgcttttacttggcgtcaccccaggcttcgggaccgtttccccaacatcatgcaaagatggttctcggtacatggcaacttccaatggcttgggtagaaaatgagctgctggtttggttttctttactctgttccctttcatagcttgcccttccttatttaatcccaaaaaccaggctctaccagattcctgttgtctgtacaacatggatgagtagattacataataattttcaaaaacagattctttaaacttgcattcaggggtaaaaagttctgatgggtagaggtaaccttctccattcatggctatatacaaccctgttttcactccctggatggcaacaacacgtagtcccactggtatgaggttgaagagtgtagaattagtgctgtcatccttggttccatcgagagctccatcggggtgcatttgcaagtagtagccttgcctgcaatataacctggtcactatacccttgagctggggatcttggcgccgcaacctgcgcttcttgaggccgaagatgcgcactttggagaagatatccaccaggttgccgttgcagagcccgcggttcttgctggggctgctccgcctcctgctggcagacggccggtcccagtgctgctcccgcgcctgccgcttctggcggatcaagccgctagcgatggccgcggccat

SEQ ID NO: 467722 - DNA, 1000 bp, Homo Sapiens; identical to SEQ ID NO: 337698

SEQ ID NO: 467723 - DNA, 1000 bp, Homo Sapiens
ctgtagtagaaattttattcccacccataaaatatatcactaaatagctgaaaaatttacatattattttaaaacatagacttaaaaaatcatattagcttctccttagcaaaatgcttttgttttatgtatttacaagaatatactgtacttcaggtacacaattcactcaagccggcctgagaaggccttggatgcagatcaatgctccaataaagttcattatcagctcctcctgccttgtgacaggatgatttgattttacaaaagtccctttgaaaacaagagtaaacgcagacggcttctagagaaaagtctggtgaagcagcagttgataatagattttcttttagtgatgaaattaatcttgttttggtaatctacagcctgttagggataggtggagggatgaagtccttaaaactaaattgttcctctacgaatcttcgacctgagcctgcggagagagtagccccaaatccatctctctgctgaaaggtcgcctgttttggtaggtgtgaggacattccgaaacacggccatccacattctgatacatcgcttcttctgcatctgccagctgacatcctaaaaacgaagtcaaattagggaaggatggccgtttccttgagtcaaaagcccagcaggattgcattataatgtatatttcttctgtagcataaaatggctgatccattttaaatccattttgaatcagtttgtagaagttagcatcaaccggaatgccagggtaaggattcacaccaagtgagaagatttcccacagtaatattccatatgaccagacatcactcttaatggtgtagatgccttcaaacaggctttcgggggccatccattttacaggcagacgggcattgcccctgacaacatagttggaatcactcatgatatctcgagccaatccaaagtcacatatcttcaccactttcccgtgggtgacaagcacgttcctggcggccaggtctctgtgaacaca

SEQ ID NO: 467724 - DNA, 1000 bp, Homo Sapiens
gtcccagatctcctttatttgcagccagcatgccatacaaagaccacttggcaggagtgatgctctactgtgccccatggtttgtttggtctcatcacattttcatcatattcacaacacttcagccctatgctacgaccatagttaaatccctgaataagagtataggactgaatatacagtaagggtggtgcatatgagagaaaaaaatctacccagaacagaaactgcaagatatctcattggaaaatgcatcctagttacacaatatctctcttgagtccttgtgtatgatttcaaatataggatttagttaaagatcatattaaaagttagtactataaataagcatgagttgaattgctctgtaggtaaaacattgacctcatacttaacctttactttgcaaactttatggttcaacaaaaatgcatgcatcatgattttgagttaagtttaatggcagttgtttgacactctgaagttgctcattcatgttgtttcttggggagagggagctggacaggcaaattttgctccttggacttttagagtatgttacatattggctccaatgatttgcttctcatctggatatcccatatgtctttttgaagtctcttgctctcattctcgaatccctccttgagaaggcgttcctgttcctgaagtttaagagcgagggtcttctcttgctctgccattaactgggccctgtccctctccatcttctcagtcaattgtttcacatgttcctgataactcttctctttctgttccatcatctcctcattcttcttttgtatttcctccaacattttctttgcagcttctgcagattcagcctttatacgttccacttcaatcgctttttccttttctgagagtgactgatcagtctgtagaagtgcatcagccacatcctccttggactccaaatattttttcagcacctctttggcctgtatccccttccttggcacctggtagtacttattct

SEQ ID NO: 467725 - DNA, 1000 bp, Homo Sapiens; identical to SEQ ID NO: 337699

SEQ ID NO: 467726 - DNA, 711 bp, Homo Sapiens
agtgctcagtagtcattttaataaattttcacaatgggctcgacttagcataaactttattggtttgggttctcttggctattctggagtggggctgaggcaggtgctaagtgaagggcagaatccagtcctgagctgggtgtggtcagagtcaccgagacctgagcctgcagaggtttgtctgatccagcaagcaggccaacagctcttgaatcagcaagtcccgcagcaaatcttcatcgctggggttcttggctggggagctctgtggctccactgcctcctcctccttcctattagcttgactggccagctccagcgcccgagcctccctctgggtgatgttgtgtttccagtcattcttcttccccttttgggccagcagccagttcacaaagtcttgttggtgaatcttgtccatggcaatactgtagtcactgatgaaagtcccttccgcgtacctggggcctcgaggttgagggctgctcaccttagcatgagatccaacaggcagggaggggagagcgctgaagtgaccctctttcttctctcctagtcccactgccaggaacagggacagcagcagcagagcaaaggtcttcgtggccaccatcttccaaggttatttcctgagcagacttcctttccagctcttccagaagaaggacagataggggtctccttcccctgatttctggaccttctgagcct

SEQ ID NO: 467727 - DNA, 1000 bp, Homo Sapiens; identical to SEQ ID NO: 158299

SEQ ID NO: 467728 - DNA, 1000 bp, Homo Sapiens; identical to SEQ ID NO: 337703

SEQ ID NO: 467729 - DNA, 1000 bp, Homo Sapiens; identical to SEQ ID NO: 158302

SEQ ID NO: 467730 - DNA, 1000 bp, Homo Sapiens; identical to SEQ ID NO: 337704

SEQ ID NO: 467731 - DNA, 1000 bp, Homo Sapiens; identical to SEQ ID NO: 158303

SEQ ID NO: 467732 - DNA, 1000 bp, Homo Sapiens; identical to SEQ ID NO: 337706

SEQ ID NO: 467733 - DNA, 1000 bp, Homo Sapiens; identical to SEQ ID NO: 337707

SEQ ID NO: 467734 - DNA, 1000 bp, Homo Sapiens; identical to SEQ ID NO: 337708

SEQ ID NO: 467735 - DNA, 1000 bp, Homo Sapiens
ttttttttttttttttttttttgtaagtaactttatttttatttacaacagaattggtggctttattcctccatctttagggacacttggcattagcagctagatggaaagtccgcagtgaagtcaaactcattctgccccagccacagctccggaagctcattggctcggtccaaccccagttccaccaccagcgacatcagcacttcctcatccactgggtccgaatcgatgatagcagggctctgggcaccagcagaaggagagagtgattctgcccctcccgcctgggccccaaagtcccagttttgcaggggtcctgcctccccgggttggcctggagtggcagcagccatcccctgatactggctattaagtttctgcagctgcatactagccagcaagtgaggggcggggtgcaggttgaaggatgggggtttagtgggaggggtggttgtaggagagcctattggagatcccgaggaactagtgggagccccactggccttggttccatttgaggctaccccagggtagtgcagaatggccactgctttgcgatctttcaccgcaaggttggagtaggccacggagctcatctcttggttggcatcctccttcgcaggtgaggtgccacccttgacatcaagtgcaggcctcgacgttgttggcatttcagagccttggcagaagttggataaattggcgggaagtgatgctgccagctggagctgttgtgctctgagaagccgcctgccctggagagagggaagcgcggagctcggtgagccgcaagagaggcggcggagcccccagcccctggcacgcacgccgccgccaccgctaccgcgaaccggtcgcgctcagcgcccgcggccgcgccgttggccacccgaccccggggcgcctgggaaaagcccgcaccgcgccgcgccgccgctgcaccgcacagtgccgcgccaagcagcccctgaccgagctggtgcccgcccgcccgccc

SEQ ID NO: 467736 - DNA, 1000 bp, Homo Sapiens; identical to SEQ ID NO: 337709

SEQ ID NO: 467737 - DNA, 570 bp, Homo Sapiens; identical to SEQ ID NO: 337710

SEQ ID NO: 467738 - DNA, 1000 bp, Homo Sapiens; identical to SEQ ID NO: 337711

SEQ ID NO: 467739 - DNA, 1000 bp, Homo Sapiens; identical to SEQ ID NO: 158306

SEQ ID NO: 467740 - DNA, 1000 bp, Homo Sapiens; identical to SEQ ID NO: 337712

SEQ ID NO: 467741 - DNA, 1000 bp, Homo Sapiens; identical to SEQ ID NO: 158307

SEQ ID NO: 467742 - DNA, 1000 bp, Homo Sapiens; identical to SEQ ID NO: 337714

SEQ ID NO: 467743 - DNA, 1000 bp, Homo Sapiens
tttttttttttttttttttctgtggaatttgctctttattttgggaccagggaaggaccacacacagccctccagcccagggggcgggggcaccgagacgcgggcggagggccgcacccgaaccctgcccagacgccgccgtcgggaggcagaatccgggtttctggggtcgggagtgcgtatgcaaatgacgtgggcgtggttggcagatctcccaggaggcctcaggggtcctcaccacaggtctgggccctccgaccgcgacctgacggggcggtcctcgccgtcggggaagaacgttttggaaagaagcgtgtccgggccgtctcttttcccataccgctgccgggtgaccaggttgaggtagtggcgcagggaggcgtagtagcggttcagctcctccggcgaggcgtcttcgcggggagcctcgggtttgatggggtaggcgtcgaccagcgcccctaggcagacgagcagggccagaagcactgtggtcaaggcgggccacggcctgcgcacgaacaccatagcgatagcttgtgaagcagacgagcaggaggtggaaggcgagggaagtcccaagggctgcactgccgcaggtcaagctgaggcctcctctgctcagcgctttccttgtggggcttatatccccgcctgaagcttctgcaaaacacagtaacagatacttgtggtgtgctgcgcgcccaaggctcaggcttcgctctaggacagaggtaggcaaactccttatcttagcttgttatctgaattcccaaatctccagggacctccagctccatgaatggtatctccatctcttcaggtgactgagttggaaatcttgacttcactccaccaatgacctgagtcattcttagaaagtctgaagaaggagcatgcagttctgagggtggcagcaggtccaggaattggaatgtgaccacaggggaattcctcataaagggctgaacttgcctgaatgagtttcctcttggcagca

SEQ ID NO: 467744 - DNA, 1000 bp, Homo Sapiens; identical to SEQ ID NO: 158309

SEQ ID NO: 467745 - DNA, 1000 bp, Homo Sapiens; identical to SEQ ID NO: 158310

SEQ ID NO: 467746 - DNA, 1000 bp, Homo Sapiens
ttttttttttttttttttttttttttttttttggaaccttatcagtaatttattcattctagtacagcttattgggtgtacatagtatatcattcttaattagccaaatagaattcttcattgtgtatccatttttagctagtacattttccccaatgcaaatctaaaagtatgcatctgactcaatataagaagtaaatccaatattttagaaattcttctttctgtgttctccctttagtgcctacccttttcttcaatgtgacaggtaacttgttctgatttaaaactcactgatatttcttcttgtatattgtcttatatactcattttctctataagaaaaaacaaattgagtatccatgatgatgagatcacattgggaaatctttgatcatgtttgaaagggcctcagggataactagtcaattcttttgaacactgttgactattctggtttcttaaaatagattttctggcagaaaaagaaagacatgccattgtgcgtggtttactcaacaacaattgtgtggtttgtcattgtttttaaaagtaatattttggtggggttcttgatgttcagtttctatgtagagtctagcagatacatttcttctctggtggcttttccccatccaagtttccagaatttccaccattgacagtatcagggatttgtgtcttctccacacactgttccattcgcttcatgattaagtccaaaagggtttctacagctttctccacattctgtccagttgctgcacttgtttcaaaatatggtatgccatatttgtcagccagttcccgagcttgccgttcattgacttccctctgatctggtaggtctgccttgttgccaattaatactatatctggattttcacaataagcatttgcttgcagttggctcatccagtttctgacatttaagaagctctgttgactggtgaggtcaaacattaataagaagcccatggcgtctctgaaaaatgcagtg

SEQ ID NO: 467747 - DNA, 1000 bp, Homo Sapiens
tttatcaggaaatagcctttattacaaaaatctgcatgtaaacaagtagctaccgcactgaagagcctccctccagggcaggcacacccgggctgtgaaaaaaggcagagtcctctcccggcacgcaggcctgcccggcggctgcgctgcggctgcttgggacgcatatgagcctgcgcatgcatctctgtgggcccagccctcactggcccctgagagccacttcgcagggcagcactgtctatctgtccatgaccatgaggttgggggtgcccggctggcagctccgagggacccagagtctgagcctgctctgaggcacccggggcagttggctgggccagcccaccaacccttccgttcgtctcccaccatagtgggagcgggtgggacctagagaaccgagaggtcgtggcaggacttggatttggcgcgaaaggccatcttgcggctgttacgagctacgatgcggcccaagaagcgcttcgcctttttgccaaggctctctcgcctccgggtgcctgcttgccgtcgtgcgttggcttctttgctgtccctgcgcaggcgtatctggcgcacgacaccttcaaacagcgcctggacattgtggtgcaatgccgctgatgtctcaatgaacttgcagtcaaagaccaccgcgcaggcccggccctcatccaccgagacctcacgagagcgcaccaggtcgctcttgttgcccacgaggatgatgggcacatcatctgtttgccgtgcacgccgcagctggacccgcagttctgaggccttctcgaagctgcccttgtccgtcactgagtacacaatgacataggcatcccccatggccatgcagtggccgggcaaccagcggcccccgtcctgctcccaaatgtcgtagaccatgagtgatgcctcttctccgtccactacaatggagcgatcataggtgtgccctgctgcctctgcttcaggcccgtcctccacaccgccgaagatgcgcgcc

SEQ ID NO: 467748 - DNA, 1000 bp, Homo Sapiens; identical to SEQ ID NO: 337715

SEQ ID NO: 467749 - DNA, 1000 bp, Homo Sapiens; identical to SEQ ID NO: 337716

SEQ ID NO: 467750 - DNA, 1000 bp, Homo Sapiens; identical to SEQ ID NO: 337717

SEQ ID NO: 467751 - DNA, 1000 bp, Homo Sapiens
acgccagcaggccacatggctggccaagcaattattattatggatcccttgggctgtgggccttcccatccaccccaccacaactgcccaggtagctggagctgatcataaacaagaaggctctgggcagagtccatggcaccagcaccagccaaggcccactcctgaagacccgaagcccagcccctggatgaaggtcctaaggtcctgaggactccccagcctgtgcaggcctgcaaacccaggctgcccacaacagaaggggctctcggcttgtctggcctctctggcctcccaagcaggtgtgggagggcggggcaagtgtgggctgatcagctactccatatggccagggtcctgtgctggtgcctggctggggggctgcatagcctgcactgtctcctccaggctgcccctggggaataccacgtagtgtgtggagttcagccctggcagctcccgctggttctccttgctatgccggatgccatagccgaaatacactgcaagtcccatcagcagccagatggagaagcgcacccaggtcagatagctaagtttcagcatgaggcagatgttgaggacgatgctcagggctggaatcaggggaaccatggggatctgaaataagtcttcccgatactgttgctggtgagcccccaggacaaggaggctgagcagaaacatgacactggtgagcaggagcagcaggatgtaaccccagtgtgggaggtgcagggtcgagttcccaaagacaagcacgcagcctatggtgatggctgaggccaacataacgccaagcgcccaagtcaccactgctccagggctgtacccatccaagaagcccaggtagggcctcagggctggcttcagctcccctggctcagggacggaggcgtgtacagtgcccaccagctgtaggtggtctgagaaggagctctgctgcttggtcagggggccagggctggctgggcctggggagctgggcggggaagacttc

SEQ ID NO: 467752 - DNA, 1000 bp, Homo Sapiens; identical to SEQ ID NO: 158312

SEQ ID NO: 467753 - DNA, 1000 bp, Homo Sapiens
atccgcccgccttggcctcccaaagtgctgggattacatgcgtgagccgccgcacccagcccctgaattacctatgactttatcaagggaaagagtcacctgtgttgttaaagctgagctgatgacagctccacaaatgttaactgaacaaagtgccacactatgtgcctgtgtctgaagatgaatgagacacaatctgtgtgttctcggagcttctccaaggtgaacttttctggggcttaacctgcaactggccaggaacagcagcttaaaatctcatcaatagctgtgctatttcaaagtactggcattctcccaggacatcccccagggtgtcaaaatttagccaaagcaaacttcaaatgaacacaaagtccttattttctcaaagaaaacaaaacaaaacagaacaaaaaaccccccagatttatttagcttaaacatttcccctgatctaaagagaaagatggcaaaagatacctagcatatatgcacaagcacccactccaatgaactcagataacctgaaagaaaaaaggacaaagttctgttcaacttagaaaattatcttcgcttttgaaagatgtttccacgtcccattccacgtcctcttcctcttgcggccacttgggccttgagaatagcagcttttcctcggccagcccctgagccttggtttttatttttcatgctctttaacatgggtgcgttcttcagcatgtcaggcaaaatcagaaagcggattttgctgccacggatgtatacctgctccagctgtgccactcggccatctctgtatgtgactgtgatgttggacatctggcagttcatgttgtcctctgcttcaatgagcttcccccgatatacctcaccggtgttcgtctcacatgtcacaatgtggccctcggcctcatgcagtactttaatcggcacaccaatagacatcttggcaggaagagagttcggctctggcctacttttcttctcttcggtccgctgc

SEQ ID NO: 467754 - DNA, 1000 bp, Homo Sapiens; identical to SEQ ID NO: 337719

SEQ ID NO: 467755 - DNA, 1000 bp, Homo Sapiens; identical to SEQ ID NO: 337720

SEQ ID NO: 467756 - DNA, 1000 bp, Homo Sapiens
tttattaaactcattagtttgggcagtatactaaggtgtggctgtcttggattcagatagaactaagggttcccgactctgaatccagagtctgagttaaatgtttccaatggttcagtctagctttcacagtttttatgaataaaaggcattaaaggctgaagtagtctgggatttttatctattaagctaaccatttgattcaggctgttgtaggacatgttcttcagtgtggacagctgtatggctgtgactggatcagtgtcctgctggtgtacacacaggtgaggacctggctggcgaagcatccccattaggaagcaggttaggaatgtgcttcatccctgttttccaaggcccaataaggatccatgtgatctttgagtgtagtgtgtatgttggttggtgattgttccaaaggttctttgaggtgattttcggggatctctggcatatccgtcaggttaaactccacagttttcctcctcacttgagatacttctgggtgctccatcaaggccccatcgctctctgagagcaattcaaaacttttcttggccccagaactcacagtctttaagcttttgtctttggtgtctatgcctgtgacactgtgaagctttgacggcgctgatggttctagggggaagaacatgggagtggggctgaggggtgtctgtggggcactgtagtagcctggcctctgatacagtggggcagacttgaaggcgtccacagccttaagcttccaggccttgttgtcttcctggcccctaacgttctgtttggctgccttgtggtttttgggcaggccctcgtggagaagggattccctcttgggccacagtagtttggtccttgagtttgccctgggaggatggtgatcatgggactgcaggcctaggaagcggccaatgatgccagcgtgagcatcctcctcgtcctcctgattgggctggaactccatctcctctttgttcaggctgatgttgaaggtgga

SEQ ID NO: 467757 - DNA, 1000 bp, Homo Sapiens; identical to SEQ ID NO: 337721

SEQ ID NO: 467758 - DNA, 1000 bp, Homo Sapiens; identical to SEQ ID NO: 337722

SEQ ID NO: 467759 - DNA, 1000 bp, Homo Sapiens; identical to SEQ ID NO: 337723

SEQ ID NO: 467760 - DNA, 1000 bp, Homo Sapiens
gccaatatatttctaaagtcaaaattacagaaagaagcactgcatgtcaaacattatgaaaatactatgtatgagagaataaagtattttggaaaaacaaacggataattctttaaatccagaactactttttatcttctgatatcatagaaacaatgtcattgtaaacttcttgaggggcatccattgcccagataaagtccaagtgattgtaaaaaggaatctccttgtggtaaataagattggggagttttggaagcaaaaggccaacatcttgggggtcagccaacaggtccttgccaccgttccacactgcaattggtacattcatggctgtcacattgtagtagggaggttgggactgatcatagtgcatcctattctgaactgggcttccccagtcataagcttggaatttcccagacttaacagcctgggtccaatggaacatgttttgaacagaagttcctgctggattatgtgatagatacacatccaagcgactcgtgttaaagttcttactgtcaaatccacaaattataaataaggcattgctgcaaaggagattcagcatctcacgggagcacacttcagtagcaagaaattgatcaaagaagttgtgtgggtagaatattttgtcaccaaatataaacttgaagagggattgaggaacaaatctaagtttgtttataaggctttttgtatacttcacagtggcaacaggagctagagcatagaaggttttgattcttttagccaggctgggattggtggaaaaggcaataaaaccaatggtggtgccctgggaatggccaacatagtgtagctgcttctgtccagttttctttacaatgaagtcgattgtggctggaaggtcatatttagccatttcatcaaagctgaaagcccagaattcaactgaatctggtgaatagtacaagtttcttctggcccaggtgtttcctctgctgttgcccagccacacatcataaccagcatc

SEQ ID NO: 467761 - DNA, 1000 bp, Homo Sapiens; identical to SEQ ID NO: 158314

SEQ ID NO: 467762 - DNA, 1000 bp, Homo Sapiens; identical to SEQ ID NO: 337725

SEQ ID NO: 467763 - DNA, 1000 bp, Homo Sapiens
tcacaggcagaggtactttatttggcaattttaacatgacacgtagagaaaagaaccctgccctccttcaccagcctccccagaaatcccaccttcctatttcaagacagagtaataacagcaccattttacacgaaagggaacagccacagccttggcaccatttctggttccactttccatggaagggcagagaagcattgctcaaaccccaccactgggtcagaaaccaggcaaacagcagcagtcacatctgaccttttgcacacacgagagcccgacactcatcctggctcccaagccttcccaaggtgaccctgtctcagccaccatcatgcagctcttctagtcccctcccggcccactctgaggagctgagcaatgatgagcagaatcttcatgtctctggcaggcggaggagggttcctgaagtggtagagatgcagtccactagctgggccccaatgaggtcgtgcacatggtaggtgaggccaagccgcaccacgacaggcgcccgccggcccaggagctctgataggagcagttcccggtactttgccttccggaccatgctaaggacagcctggcgccctttaacaaagtacttgatgaatctcccagctccaggcacagctagccaccagctcccagcatctcggacggtgaggactccagcattcaccagatgcgtgatttctgagtccctgaagccaaaggtctgtgtcatttggtcctgctggaaactaaggtccccacaggctggaagtactgaagctagaaatttctgcactgccccagcatacggtcggccatcacaggccttgaggactctggtcctgtagtcctcagtgaagataattccatgggcatccaagtcgaagcccagctggacgattctgatctccccctgctcttgaagctccttcagctgccggtcggccacggtcctgtcaggcacaaggctgtacacctggctcctcagcacgatgggcggcagcgc

SEQ ID NO: 467764 - DNA, 1000 bp, Homo Sapiens
tttttttttttttttttttaaaactaacaatcagtgtatcaaataatgctgaggagggtgagttacattacagagacatgcacaagaaatcaaggatgcaatagttcacaaagtgttgcaaacagttcacaaatgttgcatggtccaattcccagagttcacctgtcacatgtcataatactgagaaacagcatccactggaggtacagcagaactttttagtgtggcttgatgttaattacataattaggctgtattgtaagtcattcttgtctttagaagccaaacacacagacacgagaaacctgacctgatactgtagccgtgggtgctgcccaatcagggcactaatgtcataacacttctcacttctccccctgtgctacactggaggatattctgcttcctaatgtgcaagaaagtcctctttttccatgtagccatcagttttagcagatgggggacttgggtgggaagcctttgctttcctttccttgtggcagggaatgcagaacaaatatggtgtctgtaaatttctgaacataaaagaaaatacattttaagattttcctgtgttcccaagtagtggctgtagaaatagccctgcagttccaaatacacagacaattataaatacccaaagaaatactctgtccaccaccatggccacgtatttccagtcatcttctacctccttggtttcattgtggctcttcatgttttctgctatgaactgaacactgttaatcacatcttcaacttcaggcgagtgctccgaattttccaccacccactgtaatggctgatgacttaatcttctcttgcttgtggcaagctcatttgatttgtgacaatggaagcattctttaagatgtctgggttccccatggcttgcaagcttgcctttggcaggcctcctggcaaggcctctgggcactgcatcagagcctgtgccccttgtcttgtccagaggccacctcatcagcaggacctggggcag

SEQ ID NO: 467765 - DNA, 1000 bp, Homo Sapiens; identical to SEQ ID NO: 158315

SEQ ID NO: 467766 - DNA, 1000 bp, Homo Sapiens; identical to SEQ ID NO: 337727

SEQ ID NO: 467767 - DNA, 1000 bp, Homo Sapiens
tttttttttttttttttttttttttttttttttttttcttcttagcttactttattgcacacttacgtcttaagtttgtaattaagtcccttctcactacatgcaacaatatagctgaactctaaattagtgcttattagttgtagattacagtataagccagttttgaaaacataatctaaaggtaatctcaattagccaaaaaaaatcatctcccaattagctagaataaagaaggtattttacatatccaggtaaaacatatttcatactgtaacataatttattcaaatcgtcagcttttaagttattctttgcctgtgaggccaaggggcacgccactttgcaaacgtttaaatggtgaataaaacactctttccaatcaacaagcaatctcacaagcagtggtttaaaaatgtcttttttaaataaaaactgtgcattccaaaaattaaaatctttcaaacaacaacaaaaatggcacgctgattaaacttcattttagattctgcaggacacttggcccaacttggttttactctagatttcactgccctcccactccgctaagtctttcaccaacattcaagctattttccttccctgccagccagacaggcgatgggagaagcaggcgtggcctccattgtcagcaggtctttgatgtcaaaagggcagcatagtcctttcaaactcatccaacgtgtttgcatctaaccaagttaaacaagtaaaagaagtaaaataagaaagcaatgcttgtagaatgtacagtagatattggtggcacatgcctgtttaagattcgcctgcttgcctctcctgttcgatagtttctttggaagacaatggattcttctcttgcgtttctgtcttcttcagtttcgacttatcgaatttctcgatctcagccataccaggtttgtcagacatggctgcggaggaagccgtagggagcaatccaaagtgagcgtgagaaacagccacctgtccgggtctc

SEQ ID NO: 467768 - DNA, 1000 bp, Homo Sapiens; identical to SEQ ID NO: 337729

SEQ ID NO: 467769 - DNA, 1000 bp, Homo Sapiens; identical to SEQ ID NO: 158316

SEQ ID NO: 467770 - DNA, 1000 bp, Homo Sapiens
ttttttttttttttttggtacgaaatcacttttattcacaatcacagcgacccaagtgcacaagggaagcagcagccacccctgcactgacagaggtaatgagatgatggcttcctccccccaaccctcagcctctgggatccctggctggggggcccgctagccagcccccgctccctcccacacagaaggggtctcccagggtcagtgactgggtagtggagacccatagtgggacagtgacttccccacacacccactgcaaggccagcacaaaggcccagcctgaggtcctggcacaccaccccctggcagccctcacggaagaactcccgagtcacacagaaagcctgcccctctctcccgaaacaaccattttatagaaatggaagctgggctccagggggctacgactcggccagggccacacagctggtcagtggccaggactaaaacccatgccctgcctgccacacagaggtgcagtctctgatggatgcaaaaaaaaacaaaaacaaaaagccatctgagggggcagagggctgggaggctgggagagcccaggccagggcaggcagggctgagaggaccgacctcagcaggtggggcgctccctccccagaacttagagaacctggaggtgttagaggcagcccttgcctcctcatcttccctacgaacaggctccctgccccgccatcacaaggtctccctgtcctgttcctggcccacactaggaacactggccctcctagaagtttgacgtccttatggaggggggacctcctgggccacctgaggtacctaagccaaccatgataacccagctctggcccaggaggaagggtgctctatggctctgggtgaccatcagccccagggcactaaggaggcttggtttgcctctctgtaaaatagacactgtttgccaaaaggcctcccaatttggcccctccttatggagttccaattcatgattggtagggctgggtatgagctt

SEQ ID NO: 467771 - DNA, 1000 bp, Homo Sapiens
tccggggcagagaggaaaaacaggatcaagtctggaccatcccacaccactggactagcactgagtgcccagttccaaatccttcactggcagtttgagtcccaaggaagaggttcccaaggggtcgatcatgttcttgtaacgctccccgcggtgttgagctaagaatgggccccagtccggctgtggcgagcacaccaacttcagcctctcaataaatcttccaggggccagatgcatttttatcacaaacataattgggatccagatgacggaacaggcgagcattagccatccgagcaccatggaccagttaggatagcggtaagagccataggtcatgggctcccactggtaaaagctgaagcaaaggataaaggttaaaatggttggggttacaaatgcccagcagactttccagaagatgttaggctggaatccaatcatcatctctatatcttcacagaatctttgcaagccatacacataagagatccccacgagctcaaaaatggcaatgatgacaagggcataggaggcagcataggtgtccacaagctgaaacatgtaaattccaccctgagtgatcattggaaaacccatgatgaagaaacaaatgcagcagcccagagtaaacactggcttgtgtgtgcgtaggtacttgggaaactcgtctgagatggaggtcactatggtctcgatggtggcaaacatagtgtcaagtccaagagtgaggagcatcaggaaaaagatgatggcccagaacggagagagaggcagcctggttaaggcttccgggtaaaccacaaatgcaatgcctggcccttggtctgccacattctcaatgttgactttgcgttcattggccatgaagccgataacggagaagatgacgaagccggcaaagatgcttgtggcactgttggtgcaggtgacaattagagtgtccctgtagcagttgttgtggaatttgttgtaagaagagagagtgatcaggcct

SEQ ID NO: 467772 - DNA, 1000 bp, Homo Sapiens; identical to SEQ ID NO: 337732

SEQ ID NO: 467773 - DNA, 1000 bp, Homo Sapiens; identical to SEQ ID NO: 337734

SEQ ID NO: 467774 - DNA, 1000 bp, Homo Sapiens
acaaaaagcttcagcctttattaaacaaaggaggaggtagaaaacagataagggaacagttagggatcccttctttcccctatacatacacagacatacaaacacacgcacccgagtgaatgacagggaccatcaggcgacagattgaagggcagagggaggcagcaccctccgagagttggcccggacccaagggtgggctgagacctgggccaggggcagccgttccgaggggttatgcctgagcagtttggagatgaggtcctgggctcccgtgggcacagaagcggggaactttaggtccaccttgacgatgcggcgataggtctcgttgtgtgatgcactctcaaagggtgggttccccaccagcagctcatagcaaagcactccaatgcaccacagatccaccttctcattgtgcatgcgcccctcaatcatctctgggggcaggtagtccagggtgccacacattgtcttcctcctcagggagggcgcatgcacagaccagccgaagtcagcaatcttcagctctcccttgagccctaagagcagattttctggctttatgtctctgtgaatcaccttcttcccatggcagtacattagagcatctgccaactcctccatgatcgtggctgttcgctgctcgtcaaatgtgcagctcttctgcagctccttgtagagctccccgcggggggcatactctagaatcaagtagatcctcctccggtcataaaaatagttgtagagacgcaggatgttgggatggtgcaggtgggcctggatttcgatctctctgcgcagctgatgctccacgccctccttctctatctgggacttgaagaggaccttgagcgccacgatgaaatggcttttcttctcccgagccaagtacacgtttccaaacttgcctttgcccagaggacgcccaatctcaaagtcatcaattgtgaagtgccgcgttaagatgtcgggtgtcccactgctattctccatcacc

SEQ ID NO: 467775 - DNA, 1000 bp, Homo Sapiens
actgcctggccacctacgagagcatttttcacacagccatttcatcaggatcatcttcaacatcaacaaccacgacatcatggtaatcattggtactggtagtgactacagtagggtcaggaaggtcagcgatggtgtcagactccagctggctggcagcaggcttggtgggcccagcggcagggctagaggccgactcagggaggtcactgtcgtcagacacagggtgggcaatggcagggatctcggggcaatgggaggcagagagctcagggttgtcagcagcagcgggcttagggtggctggtagtggcaggcttgggatagtcagcagtggtgggctcagcatggctggtagctggcttgatgggtttagggtggctggtggcagcactgaaggcagacttggagtggctgccagcagagacatggtggccagtgatgggcttggggttgctggaagcaggcttgaaatgaacagagtcaggcttgaaatggacagagtcacccttgaaatggacagagtcacccttgaaatggacagaggcaggcttagggtagacagtggcagacttggggtgaccagaggcaggcttggagtggccagagacaggcttgaggtgaccagaggcagccttggagtggctaaagacagacttgtggtgggtagaggcagatttgcgataggcagaggaggatctggaatggggcttagggtggccagaggcacggtcggggtggccagctgcagcatcaccaggtaatggaacattccggacattcatcggggtttcctccacagcaggacaggcatgggcacggtcttgttcacgagcttggtcgcgagcatgggcacgggcgcgggccagggtacgggcctcctgcatctcacgaatatcactgatgaggccagggaagaatatgatagggtgccgcatagcatggaagatggtccagtattctcttcggaaattctcattgaggagcccgtagatcacagc

SEQ ID NO: 467776 - DNA, 1000 bp, Homo Sapiens
tcactggtttctgtgcttttcaccaacattcttcttggaacaggggctgatcacagtcggcgtgggtgggtaaaccaaggcaacatttactcgctcgctgccgttcttggggcaaatgatctctgccactccttccggtctgggctgactcagcaactcccctggaaaagcatgtggattgggcgatcctctcttaaggcacttagaacagagaatgtgcacggtgtagtgcagtccaggccattcctgaagtaggacattcagttcctccaccaagggggttatggcttgccatgcggtccatatatttggtaatgatgcatggctagcaatggacagggtgtctggctgcaggactcccctggcaggtctgtaactcacaaccacaggaactttccctctataggcaaagatctgaaatttaccatccgacctgtgcaccacatggctgttgatctggacactgtagcgtgcaaacaacccaggtggaaaagtaaaaggaaagctatattcaatctgcaactgctcagccacaaaagactgcccagctaggttggtcccattaatccaggcttctgcatggggcacctcgttctgcacatagcatgggaacttgtaccaagctgtggacccattcaaaggcttgcccttgggtttattgaggcagtaacagagtcccatcttctccagcagctccagcaacagctgcaagtcctgctgggcctggacatgaggcttaagcagcaaccgaatgacatgagctggcaagagcccatgcaacagaaagccctccacatactgatggagctgggtggcccggagcagttcctggctgggggtggaccgcgccatgggcggggagctttccccctccgccttgccctctccactggtccctaggagcagcttatgcagcagcaaagagggatccctctggaagaagacattgaggatgtcgatgaggcgggtgaggttgtggaagacgtgctccttgagagcc

SEQ ID NO: 467777 - DNA, 1000 bp, Homo Sapiens; identical to SEQ ID NO: 337736

SEQ ID NO: 467778 - DNA, 1000 bp, Homo Sapiens; identical to SEQ ID NO: 337737

SEQ ID NO: 467779 - DNA, 691 bp, Homo Sapiens
ctggagagaagcaagaatatgactttaatttaacatcaacaatgacactgtgtaacagcacagggaagaggtagtggagggagatggtcaggcttcctgttccttaaccagcagagccccagcaacctagaagcgcctcacctagcctcttaatggagtgggaaggagcagggaattggaaatcagaggctcaaaaagtaaagaaggctgatggcaagcctggggagaggcctggaaacgagggaagggctgagggctatgaggagtcccctagcgcaggtcttcggcagtgaacatgcccctggccctgcgcaggatggagtccttggcggcgtcatatgggtgctccttggaggggatctccaggacagcggggatggactgctggtgggcgtccagggcatgccgcaccatctctgcgatgtactggttgatgaggatgatgccaatgtcatcccggtttagaaattgccggaaagtgtcttcgatctcattgatggttgtatccttctccaccaccaggaaattgggatggcggttcttgttaagctcccctatgccgcccagcaggaaaccagtcaccgtgtcctcgtctccgatcactgcgatgagcttacccctccccgccatccctgcagccgggcagagctcaccctagagcaccagaagccactgaaaccccgcctccgcc

SEQ ID NO: 467780 - DNA, 1000 bp, Homo Sapiens; identical to SEQ ID NO: 337738

SEQ ID NO: 467781 - DNA, 1000 bp, Homo Sapiens; identical to SEQ ID NO: 337740

SEQ ID NO: 467782 - DNA, 1000 bp, Homo Sapiens; identical to SEQ ID NO: 337741

SEQ ID NO: 467783 - DNA, 1000 bp, Homo Sapiens
tttttttttttttttttttttttctaaaaaatattttaatacttgaaaacttctaaaacaaaaggtaaggtaacatgttctttcaaaagtgaatttcacatgcaaaccattaattatatttattttactgtgagataaaagcaaaacataacattcggagaaagagaccagtaactgacctatttattttatattatattaatgtgaatcctcattagaaatgtgataacgttattgcacaaacaaaaccgtgggcagaaacatcccagcaatgcaggggcgcccataccgggttacaagggatgtccagcatgtgtttccctggaacactcagagtctgcacttttcctgcaaatgggaccatgtctgattatttattatgaaagaacactttaccgaccatttttttctcagttggtataatgtagaaataggcttttttacatccattaaatagtcttgaaaacatttttgcactaaatcaaacgagctgatatcagaaagcaattgccaccttccacctggagtaatgtgtgcatttttaatgctatgattatatgcttctttagggtgacacagtttctcttctggcttctataacacctgcattaatcttccttttttgctgttaaacaaaacttgctggcattatgcatcccatccactgggggtgggctgggaacaaacaggtttcgatggttcttcacaaggagacaaacaatctgaattatcttttacaaacagtgaaaatgacaagatgtttgtctctcagtatgcattttaaaacaacataaatagaatacacttcttttaacaaagcctggccttggtggctttctagcttgcagtctaagtaacgtttggtttgcagaagggattccctgggagacggctgtgtggggcaacctcacttactggttgtgtgttctccatgggaaaagcaccagatggggaagcccaggatcagatgtaagctgcaagcttctttctctcttcaaac

SEQ ID NO: 467784 - DNA, 1000 bp, Homo Sapiens; identical to SEQ ID NO: 337742

SEQ ID NO: 467785 - DNA, 1000 bp, Homo Sapiens; identical to SEQ ID NO: 337743

SEQ ID NO: 467786 - DNA, 1000 bp, Homo Sapiens; identical to SEQ ID NO: 158319

SEQ ID NO: 467787 - DNA, 1000 bp, Homo Sapiens
tttttttttttttttttttgaggtcagaatgttctgttcacttgcaaaccatggctaaggtcaaacttgtagaaaataaaattccatgtaaatcccaaagatagggccccttggggtttcatccccttctctttctgtgagcccaagctcctctcttttccttgggaatggagcccggcagaggccacagaaggaagcaggaggccaaatgctcctctctcactggggctctgggttggaggttggtgagttgttcaagatggcaacagcagcttccagacactctctgacaacacgaaggccacgtcatatgaggtctcagcttcaagtacaggagttgcagcccactgtagggagcaggagctcccaggagtccacgcactcacatggggtaattgagcacaacatcctgtttggcaagttccagcaacataggatcatcgaagaatttgctgatgctcacatcttcactgaggcccttcctacggcgggttttgatcatgaattcccgggccaggtgaggagctggctgtggctccaaggggcggatgacaatgctcttgtccaggggatcaccaggcacaatctgccagtggtggaagacagacagagaaaaggcttgtccctgggtgtgagtccggagatcagtctcaaagccaaaagagtcgatggccgggataaaagctttgatggtgtacagaggggagcctgggatgggtgcatcctgagtcacgtgccccctgcgcctggccaggacggtataaactgcagagacgcaatctgcaggggcctggacctctacaaagtagtaaggctccatcagacgaggagtagccatgaggaaggcagagtagacgactctcctggctgtggggatgatctggcccccgccccggtgcaggggctcctgggcaaccaccgcatccaggatcttaaacttgacattccgaatcaattcatcacagagggggccctccctggttccccactggaaaccttg

SEQ ID NO: 467788 - DNA, 1000 bp, Homo Sapiens
ttttttttttttttttttataattaaagtcttggtcatttcatttattagctctgcaacttacatatttaaattaaagaaacgttattagacaactgttacaatttataaatgtaaggtgccattattgagtaaatatattcctccaagagtggatgtgtcccttctcccaccaactaatgaagcagcaacattagtttaattttattagtagatgatacactgctgcaaacgctaattctcttctccatccccatgttgattttgtgtatatgtgtgagttggttagaatgcatcaacaatctaacaatcaacagcaagatgagctaggcttgggctttcggtgaagattgactgtgtctgtctgaatcaaatgatctgacctatcctcggtagcaagaactcttcgaaccgcttcctcaaaggctgctgccacatttgtggcatcttttgcacttgtttcaaaataaggatagtcgccgttgtccctgcaccaagcttgggcttcttctgtagacacctgccgttcgcttatgtcaatcttgttacccagaatcacaaaaggaaagctctcaggctctttcacatctgcataatatatgaattctttcttccagttacttaagttctggaagctttgtgaatcatcgacactaaaagtaagcaggcagcagtcagaacctctgtaaaatggtgtcctcaggcttcggaatcgctcctgacctgccgtgtcccaaatctgcatggtaacaaaatgtccatccacttccaaatctttatttaaaaattccacacctattgtatggaagagctgggtatcaaacttattagttacatatctgttcataagtgaactcttcccaactccaccatctccaaggagaattactttaaaaagtgatgattttcctgccattgttaatctcaaaagcttcaagaaccctcctagggttgttgagaagatgcactcaaacgacacgggaaaagtgtttcatcacagt

SEQ ID NO: 467789 - DNA, 1000 bp, Homo Sapiens; identical to SEQ ID NO: 337746

SEQ ID NO: 467790 - DNA, 1000 bp, Homo Sapiens
ctggcattagccaatgtgcaccagaaagaactgcaaccagcagcagctcggtgaaaagacctctaccctttccctcaccctgcatgggccctggaaggtccagaagcagctgagcatgagcaggaggaggcggggtgaggcggggagcagaacaaacctcctttccttccccaagctggtccctgagccacacataggttaggcatgagctgagtgtagggcgggggttgggccatctttgaagtgaacacaaggtggaagttttgatttaggctgaactgaatcttctctctgtatgacccagtgacctatggggccatacgttagccagaggaatctggtccatccgctagaaggaatcataaccttccttttatccacagcattttcatccacctgcctgggtagagtccacaacttcacatttgtttcctctcccctcctgttcccacaaattggaaagggcttaccttgtgttctgttctgaacatcactgtgttttgagggcaggggactccagattgaggagatcaagagagccataccccatgaagattgttagaggacaagttaattccaagacatacccaagatcctaacccagacagagtattgggggcagggctctggagatgagaaaggtgaaggaggccgggaggtcctgtctcagatggtggttcccagtctgggattggactcggcaggaggtgacagccatgggccagattgtggtgtcctgcctccataagcaaggctggtcttgccctgtgtccctgtgggtcctggccatatccaaggaggtgtttaggcagctccctgctgctgatggtccagctcttagagacctcaatcagaagtatgtgctgctcacaaaggccactcccgggctggaagttcttcccttggcctctgtttccttctctgagggcactgatttgggggaccgtgggtgaggccccagctccaggtcctggagggtgtctttcaggccctggccatg

SEQ ID NO: 467791 - DNA, 1000 bp, Homo Sapiens; identical to SEQ ID NO: 337747

SEQ ID NO: 467792 - DNA, 1000 bp, Homo Sapiens; identical to SEQ ID NO: 337748

SEQ ID NO: 467793 - DNA, 1000 bp, Homo Sapiens; identical to SEQ ID NO: 337749

SEQ ID NO: 467794 - DNA, 1000 bp, Homo Sapiens
tttttttttttttaagcaaagaaaaatcatttttaatataaaaattctatatcaagagatattccttaaataatataccaatgaaaatgtgttcataaatgaaaaaactttgaaaaataaaatcagacaaatataaagcactattaccaacaataagatgttataagttttaaatattacagccatttttacattttggctaaaaaaagggcttacatgaaaaaaatgcattgaaaaacatcatttttaaacatgaaagaacaaaccagaagaattccaaattcagatagatttttgaaactttttatttatattttggtcttacaaatgatcacttttaaatggacttttctgtaagaatgtaaaactcaaaaatttgccaagtatgtatctgatccacacaaatccctagaaaggttttctgtgtagtcttcattaacgcaaatctttgtgaatgtttcactcttactgtaggatcttgaatatgttttacaataatgaagctacaaagtttttatgcagtgcattcattgtaaactataaataacatttgtattaaaaagaaagctgggtaatacaaaaataggagagactctgaggagcaggcaatctgttgaggctcagtatatcttatttgctttgtagtctgctgtcattcctttcaaagagcacacagcacatgaggcatagtaatcatctgtcttgttaacctctctaatttagaaatctgttgttcgtaaaactggaccaattatcacaaactatcatttgcataattaaccgcaagtctgttacaaagcattttgttagtggtatcaacaaatgcaggaggatggacatttataaaaaatgggttttgttaagcttgccaactccttagatatcatggactatactgccatttcacgatttaattagatatttaatgcctcaagtaaaagactgatcaatggaagcaagcaaaactaaattattttctaggtgctgtaatatttcattt

SEQ ID NO: 467795 - DNA, 1000 bp, Homo Sapiens; identical to SEQ ID NO: 337750

SEQ ID NO: 467796 - DNA, 1000 bp, Homo Sapiens; identical to SEQ ID NO: 158321

SEQ ID NO: 467797 - DNA, 1000 bp, Homo Sapiens; identical to SEQ ID NO: 337755

SEQ ID NO: 467798 - DNA, 1000 bp, Homo Sapiens; identical to SEQ ID NO: 158324

SEQ ID NO: 467799 - DNA, 1000 bp, Homo Sapiens; identical to SEQ ID NO: 337757

SEQ ID NO: 467800 - DNA, 1000 bp, Homo Sapiens
taagatctgtgcgttttatttttgtaaactatatctaaaacatacctcaatataaaaaaccagaaacaaaataacaaaaacggggtgagaacaaaaaatacagatgacaggttctgtagttatggtactgaactgagcttcctgtcagccaaaactagaagggaaacatgaccaccacctgacttgttgcagaggctttagatctgagcacttggatctgaaaacagtttctctttagatgccttcaaataagggacagtatccttgatgacaatacagtacatacattcacaattctccaagaccatctctgtgtatatcaaggttaacctggatgaatatttctgcagcaggcatggggtaggcaggcaatatgaccaaatatgtagtttggaggctcaaatgaaacaggagaaagagctcaggaaccatgaagcatggtgcaggtatcagggtcaagtattctaaccctaagatcagggtgcatgagaactggagaggcctcaatactgagacttagacgaaaggtgtggaattaacttcctagtgtgactaatccaacttagctcaaagcggctctgagatcagcccttctctcaagtcaactcataaacaaatgctttagttacaggaggtattaactgcaaaataacagccaaaagcattcctgggcacgtccattgagctccatgtaacagaagccattaactgcatctcagcaaccaaattgtctttcatcttgtagtcacagaatccctgagttttaactcagcacatgactgcccagataagaggttctatgtcccagcatctctttcagcaaagtgtggccacagtgatctgagcaatgctcagtcatatcttttttttaaaatctgctcttttctctctctctttccccagtggaatgcagatatggagctgatgagtctgctttgatcttatgggtaagaaaacatactgggaatggctgaataagacagaaggaaacaaagttcct

SEQ ID NO: 467801 - DNA, 1000 bp, Homo Sapiens
ggcttgtaacagactatgtaacaaggcaaatgctcttctcttttttcatcaagattcggtgtgtggctgtcagaggaagtcattagcatgtgcagtggagtactaactaattaacacagatctaatgagagggcactgacagaaagcagcctcttttcttgaaattcaaacatcatctcaacttgattttttttatctttctgacaagaaaaagtacaccttccttcaacactagggaaactcaaaatgtttattcattaatttccattcacctccctttaatttacagtatgtacgctttaacaatgacagaaaagtgaattatcaaacttcattgataaatactgacataacaggttaaatgtatttcttaagcactatgtatgtgttcttccacattcctatcgtctacttcagatctgaaatgctggctccctcctggtactcctcctctaagcaggctcttcagcatagaatagcaactcaaaggccaaaccttcttgcccaaggtgaaagtggtcaggcttcgattcttctttagaaaatgctgtgcggggtctcattggatggccttgtgagatccgaccagatcacttttggacaaaaagaggagtcaaagagaacttgggtttccagaaaaaaataaagtgctgccccctataaatcagtctctgtggaataggtgtcttcctaaagaggtagaaataatagggggtatgtgttgcagatgcccatatttcaataatactgaacactgtatctttaagggttgcatctttaggggtttaaaatggactgactccactcatctctctgattttttcataagtaagccagaacaccattgaccaaggggtcattctcagccaagatggtaaaaagcctttatatagactcatgaatccttcaccttgaacagcctgaatcaagcagtcagtcgatgatttatacaaaagtccccttccttgtttatctcgtggttgattcattattctgcttt

SEQ ID NO: 467802 - DNA, 1000 bp, Homo Sapiens
gagtgtttttagagcacttttatgttcatttatgataatagggacctgcccaggcactgggctaggtgttccacatctactgtgtcattatgtaaattgtttttcacaagaacttgagaagctagcagtgtagctattattatccttggggtggtttgtttttggttctttgggttttttcccaggggaagaagctggagtttggacagcccctggcctacatgggctcccttttgcagaggctgctccagcggggatctccttgagctcaggtaaataagccagtgccaggccaggtcctctgcactcctttgtctattttcccctttgttccttggatctgaaaacccttcaaggcttcagaggaagctcagtgagttgattctcatgtaccgggagaagataatgtagaggcggcggaaccagaggagctggctgcggtggcaggacatggctttcttggcctgtgccacttctttgctgttgagcacgaagaggacatcctgcgtatgaagcagagacaagggcagatccagaagggagatgtacttgcgcagcacattcacagactgaagcgtgagcacagagcaccctttaggtaacttcccttctgagtgcagggccctcacagctgcatacagagcaatgtgattgctgtggccacttactccccctgcatcgaaagtcaccaccagattgatgccattcacttctatgtgctgaaggaggactctggccacgtgctctgtgtcccactgcatgcctgggtcatctgggaaatccctgttgtcaataatcattacactggagagtggaatccccaaaacatcacagctctgcaaaagttctttcttacgagtctctccttgattgtagtaatttcctgcagagaagcaaagcaggtacacccagtgccttaggcgggccaagcctagcactgtgggagcaaaaaacatggcttcatcgtcagggtgcgctatgaccagcagggtccggcttt

SEQ ID NO: 467803 - DNA, 1000 bp, Homo Sapiens; identical to SEQ ID NO: 158326

SEQ ID NO: 467804 - DNA, 1000 bp, Homo Sapiens
tttttttttttttttttaagttgacaattaagcagactttatatcagcatctaacttttttaaaaaaaggcaagttacaatataggaattttagagaattgatgcatttgagaaaagatgaagcagatagatatataattgttcacagtggtaaattataggtggttttctcacattttatgtcagtttcttgtatatcaaaaaatacattcatattatgagacacaggaatctttacatccaaaataatttgatacagatgccttaacattgctgaatgagacaactttggaaagattcttgttttgtgattcctttttaccctctaagcacagtgctttgttaacactgtgtgtgtagtaaatgtgtgtgctgcttcagtaaagaatttctagtaaactaaatgcccaaggtgactgcgtgattccatgccagacaggaaaaagcagtcatgctttttgcccctagctgaacgtttgttttccccacaaactatgtattcatccacagaatagtgaaatatgctagatcctagtacaagacaagaattcaatctaaaaaatctctagatagataattaaaatattgctagttttgttattcacaaaactgaagatacttgatggaatattttcctcatctgaaacaactatcagtgtcaactaagtggttatacctaacaaagaactagttatcaattaaaatagtattttatcatttttacaccttgtgtattgtgtaaatgctcttaggtttgaagactaattgaatctgctttcagcattttgttgcagagttttggaaccagctcctttagaatgctctaatagcttgatggccttgtcagagttttcaatatttctaagcagagtctctaatcttctcttaattttcttctgatcttcaagagcacagccaattactatggattgaaacttctgatcaactggcccatgtggcacctcagatgaacatgcactgtagagcgacattaaatgac

SEQ ID NO: 467805 - DNA, 1000 bp, Homo Sapiens; identical to SEQ ID NO: 337760

SEQ ID NO: 467806 - DNA, 1000 bp, Homo Sapiens
tttttttttttttttaggaacagaaaatttattattatgcaactagcaagctggggtcaaagggctttcccaaaaaaagttgtgtttccctatattacaggtatcaaaacagagcaaaacatccaggagaaccaaactgaaactcagaaaagagacaatttctgaggcccaccagatcctgattccattttgaaatactctattgcagtacctctgggtaaatattagctggttgctaaagacaggatctgaggctgggccaattcttaaggcaccagctgtcttgaggaggaagatgaagactgtgaatgaaggacagcagacttgcttctaggaaaataatatatgtaagttgggatgcctcttgcagccagatgtttccgaataagtcgctcagtaccataccagttaaaacctttcgtggcatgtccaatacgtggaagatgaacacttgctttcttcttttttgctgctaaaaatatcttcttcaggccctcttctagggctgccatcttaatgccagacaggacattggaacgatcacgatgctgagccacaatcaaggccaacaaatcttgccctttgtttcttgattctttatcatcaacaggaaataaaaggacacctcccaaactcaggtctttcattttcccagccagctcatatatttttcttggctcagcggatcgcttttccagagctgtaaataaaccacctctgccccagtggccagagtcatctacgcagtgcacaatgagagcatcctcggccccagcctgagggtgggtgacatcaccactaacgtacttgagggaagtagcatctgggtcttggtaatccagctcagcagagctctcttccccattctcaaggtcctctggctcgctctcctcagagggcaggcagaaggactggtaattgttggattcccaccaggccatctttttcttatgttcagcctcttccttttgcctcttcttctcctctatgagtctccttc

SEQ ID NO: 467807 - DNA, 1000 bp, Homo Sapiens; identical to SEQ ID NO: 158327

SEQ ID NO: 467808 - DNA, 1000 bp, Homo Sapiens; identical to SEQ ID NO: 337762

SEQ ID NO: 467809 - DNA, 1000 bp, Homo Sapiens; identical to SEQ ID NO: 158328

SEQ ID NO: 467810 - DNA, 1000 bp, Homo Sapiens
ttttttttttttttttttttttttttttttttttttttttttttttttttttttttttttttttttttttttttaaaatcagcagactatttattacatagtccagattgtctactctagaatataggttatgaatagctgtgccaccagaacagagaattcatagacttcaatggatattaaataaaacatggagtaattgaaaggctagaagtaatgtgatactaacataaccaataggcaaaagactgctgaggtgatagctatttagaatataagatataaagtgagaagtaatatgaaaaaaactacaggagggaagtccttttcccaaccctcagttttggatgttagacatttgtagaaaaaaaattacaaagctgtaggattcggagagttctagacttgccattaatgttcaggcagaacaaaagctgaattgggcaaaaaacatgacatccccacccattttgtttagactgtctataaaaatgactttattatgatctttgcagcacccatctcagaccacatctttccatggttctcatgaaccttaacccctcctattaaatcttatacttcccgctttattgtcactatagatgtgagaaacagctgatggtcatctttgtttacaagccattacaggtttgaacaaattcaaaattgcctattattaagcctccgcaggagctactgggcataagcaaacctaagattttataacccagcaattatcctatagaaaatagtccagattattatattctgccacacctttattcatacttgactccaaaaagttctcaattattcacagggataatctagaaaataaatattagttttgctttcaaagacattactggaatgagcaggaacctgcatctttgttatattaattaacttattatttagttttcctgtctgcttagaaattggctgtttaggttgaaaaatgatttaagaagcataaactataacacaacaatttaaa

SEQ ID NO: 467811 - DNA, 1000 bp, Homo Sapiens; identical to SEQ ID NO: 337764

SEQ ID NO: 467812 - DNA, 1000 bp, Homo Sapiens; identical to SEQ ID NO: 158329

SEQ ID NO: 467813 - DNA, 1000 bp, Homo Sapiens; identical to SEQ ID NO: 337766

SEQ ID NO: 467814 - DNA, 1000 bp, Homo Sapiens; identical to SEQ ID NO: 158330

SEQ ID NO: 467815 - DNA, 1000 bp, Homo Sapiens; identical to SEQ ID NO: 337767

SEQ ID NO: 467816 - DNA, 1000 bp, Homo Sapiens
tttttttttttttttttttttttttccttgcttacataattttaatcgctatttttaaacatatttaaaactaaatcaaagtggcttttaaaaattctagaaaacaccaaattcaaaaattacacaaaatcttatagccaaaagtcaagaaaataattataaacacaatttgggatgtaaggacttttaaagtatgttggtaaactcaaatatcttccaagttccatcacccatctctgtccccacgatctacatgacatccttagttcctggcatggggctggctctggtgatgtcagaagcacttgcaaataaaacaaggagtttgcaaatcacatcttctgttataggggaggagtgggcagcagcttttagacaaggttgaattcccttaggtttagctgtagaattgtgtctttgacagcagcaaacacaaagcgaatattgtctgtatctgtagcacatgtgaagtgagagtagatgactttctctttgtcaggattctgatcttggtaaagcttcaggataaagtctctggcagctctgacatcctgtttcggtcctgtgtattctgggaaatagctaattagatgagagtacatgattttctcttccaaaagatccttcttgttcaagaataaaatcacagacgaattcagaaaccaggggtaggtgatgatggttttaaataaggctttgctctcttccatgcgattctcgttgtcacactcagccaggacctggtcatattcactcagagcaaccaagaaaataatggaggtgacactctcaaagcagtgaatccacttccgtctttccgatcgttggccaccaacatccaccatccgaaagatgatgttttccaagtcaaatggatactcaatgatgccggtggtgggcactcggacgcgaagcacatcttgttgggtaggcacgaatgatggtgtggcgatgcggtcaatgtcagtcaggtaatatttggcagagtccgacagctggt

SEQ ID NO: 467817 - DNA, 1000 bp, Homo Sapiens; identical to SEQ ID NO: 337768

SEQ ID NO: 467818 - DNA, 1000 bp, Homo Sapiens
tttttttttttttttttttatagaaaatgggaatgtatgatttttttaataaaacaattctgcttcagtgcaaatatgtagtccaaaacaacaaaaaaagaaaatgtcttatgtgacttagcacgaacagtttccacagcctttcacactattgacaatttcttcttgtagtttctttctttcctcctctttggatatattttctttctttgcttcccatttggggttatcatggttctgcacacggctgctctgtgtatgccacatttctgaatagatactatgagggttagcaagcaaaccatggtgggtaccacgttcggctaccttaccctgatccaagacaatgatttcatctgcatcaaccactgttgacaatctgtgtgcaatgaaaatagaagttctgtgtttgaccacatccttcatggcaccaagaatagtctcttcagtaatcgaatctaacgatgaagtagcttcatcatagagtatgactggggggtccttcaaaatggctcttgcaattgctactctttgcttttctcctcctgaaagcttgagtcctcgttcccctacttgggtgtcatatccatgtggcattcgaagaattgcatcatgaagtccagctaattttgccactgcatacacttcctcaggtgaagcactgatgtttccatataagaggttgtaataaatagtattatggaagaggacagcatcctgaggtaccactcccactgccctccgaaggctttccaggctcacatcttgtatattttgaccagcaagataaatgctacccttttgaggctcatagaagcgaaataatagcctcactattgtgcttttccctgacccactacctcctacaatggccactttctttcctgcagggacttcaaaggatattccactaaggactttctggccctcaatgtattcaaaatgcacattatcaaaggccacggtagctgtctgtggtgtgatctgaaggggagatgcc

SEQ ID NO: 467819 - DNA, 1000 bp, Homo Sapiens; identical to SEQ ID NO: 337770

SEQ ID NO: 467820 - DNA, 1000 bp, Homo Sapiens; identical to SEQ ID NO: 337771

SEQ ID NO: 467821 - DNA, 1000 bp, Homo Sapiens; identical to SEQ ID NO: 158331

SEQ ID NO: 467822 - DNA, 1000 bp, Homo Sapiens; identical to SEQ ID NO: 158332

SEQ ID NO: 467823 - DNA, 1000 bp, Homo Sapiens
ttttttttttttttttttttatggagactatttcacttttttaatcaaagatggaatattcatcacagttccccaagggattttctaactggcctgggcaaggagttcacttgtagagtgtagttagtgaaaacatccagtggccaagcctcatcaataactgtatccaaaaggagacgctgcttggggtgtacccagagaaaacaccaagctttcctggcttcccggccctccctctccccattagtctttggggtgcatacataagtgttgtgtgaagtctcttggggtttagaagatcttgcactcattgatggagaagagcctccttctgtttcgtctcctggcctggttgacggcagttcggacggcgcactcaaacacctgctgtactccccgattgctaagggctgagcactccaggtagcccttggctctgacatcctgggccagtttcttcccttccatggcattgacgcaggaggccctgtggggccccatctcccgctggtcagtctgggtggccaccaccagcacaggggtacagggcaagttgctcctaatttcaccaatccacttgttcttcaagttcaggaatgagttatggttggccacagagtagcacatcagcaccacgtctgcctgctggtaggacaggggccggatgcttctgaaggcgtcattgccggctgtgtcccagaggcccaggctgatctggatgccatccatgaagacgtccacccctgtgttctcgtacactgtgggcttgtaggcctccgggaaggtctcggaggtgaagcgcaccaacagagaggttttccccacagcagagtcgcccaccaacacgcacttgatggaactcagcatcttcccagcctgctgtcctactctgaagtccagaatcccagggaaaagagccctcagtgggcagctgcagcacacgccattcagcaaggggaatgcaagccaggtaggtctgtgtcctcaggacctctgacgg

SEQ ID NO: 467824 - DNA, 1000 bp, Homo Sapiens; identical to SEQ ID NO: 158333

SEQ ID NO: 467825 - DNA, 1000 bp, Homo Sapiens; identical to SEQ ID NO: 337774

SEQ ID NO: 467826 - DNA, 1000 bp, Homo Sapiens
ttgactcttggtgttcgaaattctatcctcacacccaaggagatggaaccagaaaggcagcctctctccagagtttcccaagcttgcatgaattcatgctaaattgctggaaggctgcgtctctgctgtggtgtcagttccggatgccacacatccacgatgaatatcagccggaaagatgaggcatcctgccatacctcgtgctcaaaggagtcatcaaagatgagcaccttgccttcctcccaggtcttggtctcgttggcacatcgaatcttgcagccttccttgggaatcaccaagcccaggtgcattcggagcctgcagtttgtgggccctgtgtgcggccacacgtgagtcccggggtgcatgatggaatatttgatctgtcctcttctgcatcctgttgtctcggggaacttttctagtaaggtacaggttttaggagctcctttgcaggcattttcatttcttcttccttgctgccacagcgtgaactggctccagtcccctttttccctcaggttttcatcctcaggcaggaagagacctttggctttatccatcactgcaaggccttcatctcggattaacttccagtttctttctaaagactttactaactctgtgtagcccgtttcttttggggtccaccaaggctgtgctttcagtccattcacattgtagagtgagcgttgccagacagatgcaaagtgtcctctcttgtgcccaagctcataccacttatatgcctctttgttcccaaccctctgcatggcatcccccaggtggaaataaaatctcccatcatcagtgccaggatctccggattctattccttcctttaaatatgggatgctctcagcaattttgttctgtgccttcaggatgaagccataatggactttagcaaagccatcattaggtgtcacactcagcacctcttcataaactttctttgcattgtcattatctcctatcaagaggtatcccacgccaaggt

SEQ ID NO: 467827 - DNA, 1000 bp, Homo Sapiens
ttttttttttttttttttgcttactaatagctttgttttattattcagttaattatttcatcttttataatcatacaataattctcttttaaacaacactgttatacctgaagatggtcatattatattctttcttccttctgcagtagtaaagtgtttttcttcatactcagtttttttaatagaacatttgaatatcaagaagtgtagttaactaaaaaataatgaacggaccaaactccatggaaaacgattgcacactcaattaaaagtctaatgctattacagtggttcatgtacattcaagaggaaactccagaggtcttggggacatgggagctgggagagtgttggtgggatataagcacctcccttaagacctgtttggcagcttgaaaactcaaggttgaataccggtccagtaccatcaccctttctagccaggatgggttccttcaggtaagcattaggaaaagtcagcaggttgagatcaatagtgtcttccaaggggaaaaaatcctccagtcaattgtacaaccatcctaagattttcccctgccctgttcatatcagcctttttaacttgaatgtaagtaggagccagtcataggagttgtgtgcattgtgtgtgcacacgtgtgtgtgtgtgtacatacatacacacattcagtggggagaactcaacgagaaacaggaggaagaaagtcttggggaaagaggaggccaaaaaaggagggtcacagaaagaagaagtaaaagacaaagataaagaaggtagaggaacttgggagattgagggaaagataggagagaggaagatagtgtgcctaaaataaaaacagaaggagagggtacagaggagtgactctgatacctgcttcaccctctccctggcctgtcaactcccacatcatccacttctgggcaggaaggcatcggcagcctcaccctcctttcactcaagcttaaaacaccgtgttctgcacagatatgaatagaa

SEQ ID NO: 467828 - DNA, 1000 bp, Homo Sapiens
ttttttttttttttttttttttttttttttttttcacagcggcgacccaggcctccaagcttgcacagaggcaaggccagacttttccgtcgtttattttcaataaataagcagctcagcgcagtcggtcgccttgtccctgcaagcccctcggggttgggaaggggaatttacaaggttgagagggaggcgggtggccgagggggaaggaaagggaaggggacatgtttataaacagacacatgacacgggtgtgggggacaggacgggggtctgtgccacagctctgcctgaagatgtgtcactatcggggtggggaggacagagcaaaaggatgctcacttccttctttcatcttctggatctgtgacacgggctcagagatggaggagggggaacagttatccctctaggtagttccgagcaacgaacttgaggatttcgtcgagcccaatgactggcagtgagatcttgaggaccatgagccactgggtgaggtccagggcccggagcttgaagatcatcggcagggggtcaacatagaggatgaggaagtgcagggacatggagaggcagatggagcccagcagccagatgttcacccagggtggcatccgcagcagggactggttctcggacaggctgttcagtgcattgcacatctcgatggtcaccagcacggacagggccatggtcatgggctcgggggcctcgaagacctcacagtctatgccctcaaagtgggtgttgtcctcggtgcactgcatgaagtgagtcagctggctgtagttgacatgaggcccatcctcagcgtacaggaaccaccaggcagctgctcccacggtggctgcacccacatagcccccgattgccatgtagcggaagaagagccagccactgatgaggggctccttggggctccggggggggcggtccatgatgtccaggtctggtgggttgaagcccagggctgtggctgggagcccgtcggtcaccaagt

SEQ ID NO: 467829 - DNA, 1000 bp, Homo Sapiens; identical to SEQ ID NO: 337775

SEQ ID NO: 467830 - DNA, 1000 bp, Homo Sapiens
ggcggcacagacgcgggctttattaacatttggtagtgagcacggcccccagggcatcgcgggggctcgggtcccggtgacgcaacggttaaacctggctcgcgacttagcgcaggcgcctgggggaaagcccggagcctgagggcggggccacggagccacttccggcggctgtgggcggaaaacccaaaacttccgatgggaccaagccttccgtggcttcacacgcaccggaagggaatctgggtcagccctccctccaaaggagacagcacggatcctctttttgcataggcctgagggaagtacttccgcccatattcaagatggctgcccagggcagtgggaacgggtggagtttcgggatgtggagcgaaggtcactgggagggggcggagcttcccctgcccaagttccgatcccaccaggactggaagactcgcgtccagctggagctttgccgcatctgcgttgctgtgcccgcgctcttcgggcgaggaagtcccttcttaaaggagtccacaaactcgtcactcatcctccggagctcgcggccatagcgctgtgctgcccagaggttggggggcgccgagcgcgagcggccccgaaaggggctgggctcctcccccatcccttcgtcgtcctccgtccccgcggggtaggagctgtggcgactccggatctccacagccccagcgcctccatgatggctgctgctggttggctgctcctgctggtgactggcgtcccacaggaggcctggggcctggcgatgatgcttgccggagcctgagggcccgtcccctgcggggctggggcccaggcccctctctgcagagctggagtcttcctgctcactcggctcaaactctgggatctggaacatgctctgggctgtgaggacaagatgttacgtagtcaaggcacagctggggccaacggtggccctggaaggcagaggcaggtacccctggcttcctctcccaccgtagcgccccca

SEQ ID NO: 467831 - DNA, 1000 bp, Homo Sapiens; identical to SEQ ID NO: 158334

SEQ ID NO: 467832 - DNA, 1000 bp, Homo Sapiens; identical to SEQ ID NO: 337777

SEQ ID NO: 467833 - DNA, 1000 bp, Homo Sapiens
cacaggatgaagcagcagcgtttattcaagatacaacagtgagggaatccggtcacgttcccttctccccagagagggcgcatcttgacaagtgatccagtagaaatcttttagactctaagttaagttcataaaaatcactcccttcaccctgtctcccagggtcaggcctggactctgagatgaactggcttggggcgccctcgggtggccacataaaaaaccacagtctgaggccagcctggggctcccagacctgggcgagatctgcccaggccacctgtccttcggctttgggtcgctgtctcttggcagatggcccaacacttgggggtggcccaaggacacctcaggaaggttcccgctctacggatggcccgattagccagaggtttccaggccatctgtctgcctccaggagatggactgggacctttagacttcggtggagaacaggatgctctgtctcttgctgtccggggcagggatggcctccagctgcaggaagtacagcagcacctggacctgggacatgacctccaaggaccagctgtcagtcatggtgataggctggctggggttggcagggagcttgctctccttctcggagggccggagcagcgtggggccaaagaccgtggcgaggttgtgcagggacatcttattgactgcctccttctctgccacccttttcaggtggtccagaaggaaaaggaaggtgagcaggttggcctccggcagggacagcagcaggttgagcatgcagctctcctttgcaaccgggtctgaaagagcgatgccctctgcgaagttggggtagaactcgtcagtgaagaggggctcgggcagctcacggaagtacagcttcagcgtgcctgcgatggcgttcacgtccatctcgctcatcatcaccgacacatccttgttattgacgtcgaaggctgccttcagtgcctggatgtccgtggccacaccggacacgcggtagatgcccacctcc

SEQ ID NO: 467834 - DNA, 1000 bp, Homo Sapiens; identical to SEQ ID NO: 337779

SEQ ID NO: 467835 - DNA, 1000 bp, Homo Sapiens; identical to SEQ ID NO: 158335

SEQ ID NO: 467836 - DNA, 1000 bp, Homo Sapiens; identical to SEQ ID NO: 158336

SEQ ID NO: 467837 - DNA, 1000 bp, Homo Sapiens; identical to SEQ ID NO: 337781

SEQ ID NO: 467838 - DNA, 1000 bp, Homo Sapiens; identical to SEQ ID NO: 158337

SEQ ID NO: 467839 - DNA, 983 bp, Homo Sapiens
ttttttttttttttttttttttttttttttttttttgctctccctcaaaggaagtgtttattttttggagctcaaagaccccagaaaaaagcaaccccccccgcaaaaaaaacccataacaacaggcagcacatgccccccacaccgcaccccatgcccaatctcagggtgggagacaagaggggggactcattgtccggagggaggctctggagggagacagccctgggtcaacccgactgtgtccccacacccaggactgccccatggcccctccagacctgctccagaggcccttctccggctaccccgtgctctccccgctaaccgtgttgccccatgacccgctcagaactgatgagatcaagggaatgttcaagcgaaaagccgagcaggacggaccttccaagatgtgccagcttcctgggatctcactgcagcagagcgctgaggcccagcagcacaatcagcagctggggcgccgcagcggagctggagtcctgggagctggggtagtacttcttgtccgcgattctcacgcttaagacctggttttctcttctcagtcgctccacctctgcagacgcgtcctgaagcttatggtttaatgtagtgatctctccctcaagctcctccactttcttttgtccttgggccttctctgcatccagggaagccattagggccatcacagtgtggttgcaggtggcggcctgggcctccacatcctgaaagcccttctgggcctcggtcagctcttgttgcaggagatgggtgacattgcgacactccatcactgcccgaaggccgtcccggcaggcctcgctgttggccttgatggtgaagataatcaagggcacccccagaatcacgatgatcaggagcaccagaattcctatccccagcagaagcttacagcgcttatccccgtcttccatgggcactctgcaatagtcatacgaagtagatgccatgaattccac

SEQ ID NO: 467840 - DNA, 1000 bp, Homo Sapiens; identical to SEQ ID NO: 337784

SEQ ID NO: 467841 - DNA, 1000 bp, Homo Sapiens; identical to SEQ ID NO: 337785

SEQ ID NO: 467842 - DNA, 1000 bp, Homo Sapiens; identical to SEQ ID NO: 158338

SEQ ID NO: 467843 - DNA, 1000 bp, Homo Sapiens; identical to SEQ ID NO: 158339

SEQ ID NO: 467844 - DNA, 1000 bp, Homo Sapiens; identical to SEQ ID NO: 337787

SEQ ID NO: 467845 - DNA, 1000 bp, Homo Sapiens; identical to SEQ ID NO: 158340

SEQ ID NO: 467846 - DNA, 1000 bp, Homo Sapiens
tttttttttcaaactgagaaaggttttacttttaagacaaaacaaatagcattaacacacatccaaatgccagtgcaggagttcactgggtttataaaagagaaaactaaactcaagtgtcaaataaaaactggagccgtcaagaatgactgcttgtggcaacacaggtgtaacatgtgcttgtctaaagtcgttctgtgtttgtggatatgtggaaatgcatgacgagggaaacgatgcaaggcaaaatggcaggtgctcaaagctttaagatccttttcttcacgcttgtgtgctcttgttttgcttttgagaattagggtaattcgcaggtcattttacaaagaactgtaatatcaaagaacacttccaaacggctaaaataggctcaaggtcactattaaagtgataaagggaggtccgtgggggaaaagtttgtgttctcaaaagccagatttcacaccatggcaggcactaaatctagttacatgtgcttgcagtagaaaaagaagacactgatcttaatagaggctggtctttttcatgatgcgcaggaactcttgctcactgacctctccatctccatctcgatcagcttcatcaatcatttcctgcagctcctcatcagtcaggttctcacccaactccttggccacgcgtttcagatttttgaacgaaatcttcccagtttcatcatcatcaaagagcttgaaagctttcaggatttcttctttagtatctttctcagacattttctgggtcatcacagttaaaaagtcaccaaagttcatttttcctgtcccttccttatcaatttcacttatcattttcttaatttcttctttcttgggttcaaagcccagggccctcattgccaccttcagttctttaacatctatggtgccagttccatccgcatcgaaaagatcaaaagcttcccggatctcctgcttttgctcttcagtaagctcaggcttagggctcattctttttcgctgag

SEQ ID NO: 467847 - DNA, 1000 bp, Homo Sapiens
tacagtctttacttttattgaaataccaaatattgactatgcaagctatactggtaaatgtgctctttgatgttgacagaggagggctgggctgcctgtggtttcattttcaattgccaggaaagaggtagaaatctcttgtcaaggttgctcgttctatggtgggcatctgggctttagcctgtggaacttcaaatgatttctgtaccttccgaaatatttccattaggtggcagcagcaagaatatttctggaagcatgtgatgagttccgtaatgaagatggagccccttgtgcggtctctccaggacacgttatgtggtgttgaagaacagaaagcaatgaagtccttctcctcgtggatcttgcaaacagaatctgcctccaggttctcagatgactgtgaagagatgactgccaaggatgctggagagtctctgacccagagttccccatgtttttcacctctgcaggcctggacaatgatgaccttgggtttgtcctttagactgaggcagttgcggttgttgaatatctggaagatggtgtcataaagcagcacatccggttttttctttttatgcgcagttccgcagattccctctaggatgccatgagacatgagtaccaagaacgtgctgtcagaggacttgtgctctggtctggcagcaaatgccctcagcactgactccatatccctggctgtgagattcttttcgtcaaccacagtgtagcccaggccttgaagcagccttttcatccccacgatgtcatagtgagccccattccttgcaggcaggtgatcaaactttgtattgcatatgatgagagccaggcgtctgcggtcctctctcttttttattggatagatctcatcatgattttttttacacagtctcaggaattcttcacgaggacaaagtttgagtatatttgtagattctgctgactcaggtggtccagcctcgatttgcagaagaggttttacactggtgatctt

SEQ ID NO: 467848 - DNA, 1000 bp, Homo Sapiens
ttttttttttttttttttttaacaaaaccaaaaaagccattttattgaaaattaaattcaaacttcaaattaatattacaatcatgagaaaaatgccaaataattcaatttacagttgcaacatacaatacaaatagtccctttgaagttaagagtaaactcatccacaatcatgacctgtggcacaaagcggaatttttacaatatgtgcatggaaagcaattcttgggcaatagcaattggaaaaaataaaaatgaaagcttgtatttacacaaaatgctacaaatatttttgttccacagaaacctaagaatggtaaagcatatccaaaagaaatggaattttattcagaatacctaagaaattattgtaagttatggttttggctgatatatttcaaagtactgcattaaaaagcaaacagttatttgtaaacatgaagtaaacacacatctaaaaaattctcacatagaaaatatttttaaatgcattcgttttctaaaaacaacaaattcaaggtttggaagaagtgtcttttattattgttctttcaaataccataggtataattattacttttgctaatgcttcgtgtttccatgtattaacctggattctgggccagtccctttcctcggaattgagggaatccttaaagctgtacacacatctcctcccttctgaatttatcacagatggtccctaatggtgtggacttctctgctcattttgaaagggctctggcaagtgagaggcagtgagaccgtctaaagagcaaacgatagttaatctgttgagtttctcagttctgggctgaatgttattccactaatctaaaaccaaagctgtggtacctgttctggaactctgatatgggttaaaatttgtgagacaactgaaatggataaaaatgtggctgcattgaaaagactgcaaattccagcaatgtttgtgctacaaagagaaccacgctattttaattcccaggaactagtacat

SEQ ID NO: 467849 - DNA, 1000 bp, Homo Sapiens; identical to SEQ ID NO: 246440

SEQ ID NO: 467850 - DNA, 1000 bp, Homo Sapiens
tacagttaaatagtacagaagacagtttactgtacaagcaagttgtgcgttaaaaacaaacaccaagcaaacgatagtgcaaagcagtttccacccagctccatcctctcgccagctctgggatggttttacatcagatgagtgcagcaggtgtcacacctcagcatgacaatatgtcacaaaagattggtacccactactgacaggctcacagtaacactatatcaaaacgtcttcctttcctcgtgcttcctacatcagtgtgtttgcctagtacaactttaacgcagccttgtaaataaggacctacttttaccagcccaggctgtctgtacccactttgggccttacagactcagtacggctgccgtcactttttgtcaggggatgggggatggggtaggaagagcaatttatttactatccctgcctctccaggatcaggaagggttagtaatctgggatgagactacaaagtgctgggcactgggaacccaaaggtgcctcccacgctgacctgggaccagctataaccagagaacaggagggaagaaactacaaggacaatggattcatagctgcttcctaagaaggcatggagaggccccttgggtgcagggagtcagcaactattttgaggagatggagactgtttttccagtgaggacaggccaagagaaaccgcagcaggagggaatggaataggatcaccagaaggactgcctaacctgccagtgtgtctctggtgtatggttctggccgttgtgacaggttgggtggggacagtgctctcacagagacaaccaatgaagagcattttgtagggcagatttctgcatccacagaggccgaggcagaaagttaaaataccgcatgctgctagcctttatgagttcccttacgccttttctaagcctttctagggccagagaactctgatgtgagaatccatgcagcctggcccttggcaagcgcccactttcccattttgcaaaattca

SEQ ID NO: 467851 - DNA, 1000 bp, Homo Sapiens
ttttttttttttaaaccagtcaccactaaggtgagtcctttctctgctaacaagcagccgaggatactaagtatcttcagctaattaatttgagcagtgttttaagaagagcaacacttgccaaattaaaactaccttccccatccaaaacaaaacaacaacaacaacaaaactttacccctttccaaactcgaaaaaaaaaggttggggggtgtgtaatatatcagatttcagtaggcagaaggattccagagggggctagggagaaagatttcagattatgtagtgaaatacaaagtttctttaaataaattgcagggaacatgaagttgggggataagaaacaatgacaaggcagtctctttcttgattactgcaactggaatgggggaggcgagtttatttttggaaatgggagtgcgcagagctaagcgaaatttatttctcctaataaggaaatggacaaagttgtcccacagctggcgcgcacctttttacccagatacagttagagaacatgtaggaagtttcaagtcgtgctgctttctcgccctcttaatttcagcctctttctcactccccttcctgccttcgccctctccctgcctcccttccggctacgagccagtcagagaggaaacaccaggaatccggagaaggtcgagtacttccagccccccatcaagtttccccgctccagcttgaggtatgctcggtcgcctttctccatttggattaggactccgttgctggcggcctcccgggtcacgtcctggtcaccagcgaaggctgaaatcaccggccacccgtttagcatgaggctcacctgtatggtttgtctgttgtagacttttaccacgtggaagttaaaactgtagatccctttgcgcggggcgatgaaagtgctgcgttctgaatcaaagttgttcccaatgttcactagtacctggtcgaagtagatgatcatggtgcgattactcatctcggacggctcgtggtt

SEQ ID NO: 467852 - DNA, 1000 bp, Homo Sapiens; identical to SEQ ID NO: 337789

SEQ ID NO: 467853 - DNA, 1000 bp, Homo Sapiens; identical to SEQ ID NO: 337790

SEQ ID NO: 467854 - DNA, 1000 bp, Homo Sapiens; identical to SEQ ID NO: 337791

SEQ ID NO: 467855 - DNA, 1000 bp, Homo Sapiens; identical to SEQ ID NO: 158341

SEQ ID NO: 467856 - DNA, 1000 bp, Homo Sapiens; identical to SEQ ID NO: 337793

SEQ ID NO: 467857 - DNA, 1000 bp, Homo Sapiens; identical to SEQ ID NO: 158342

SEQ ID NO: 467858 - DNA, 1000 bp, Homo Sapiens; identical to SEQ ID NO: 158344

SEQ ID NO: 467859 - DNA, 1000 bp, Homo Sapiens; identical to SEQ ID NO: 158346

SEQ ID NO: 467860 - DNA, 1000 bp, Homo Sapiens; identical to SEQ ID NO: 158348

SEQ ID NO: 467861 - DNA, 548 bp, Homo Sapiens
aagtttaagttatttatttaagccatctcctgccacaagcaaagggatgggagaccagtataccagtcatcatttgatacaagtaaagaaggttagcttaaggtcccatatactttttctggtccatgtgcagagtaacggtccaaaccagtgctgtggtccctggtgcccgggtagtggtccagattctctttattcatcttcgtagccagttggaagtggattcacatgagggttatggaatagagtatggttaccatctccccagggaaacggcttggtcctgatgcggagatgggggtaggcgatgaactcgggtctctcgtgctctccgtggtgcgacttcaggtacacattcagcatgctgactgccaccccggggagcgcgacgaagaaggtgagagtcttccacatgcgagctgagccctcttcgccatgggcgccactcgacataggccgccccagctgtgggcgggaccgacccagcagccgagaaaccgaggacacaccaactaccgccatttttgatctggactgccgcagcgccg

SEQ ID NO: 467862 - DNA, 444 bp, Homo Sapiens
tttttttttttttttttttcaaagtatttgttaattgtttatttatcaagaggaactatttcttagcccacatattcatgtgtcatagttcaggaacacaagtcagtgacaaacttctaggtaattcaacctgaagaaattctttatattccaagattactttacactctgaaagataccagccttcctcatctcctcaaaatctttcatgacatcgtagtttctgtagaaatctgcgtatgccttctttctttgatcagccacacgaaacttatacaaagctgcaacccccagggatagcacgaatgctacagccatatgatttcgcagacgcctggccagaaggccacgcatccgaggttttggcaaaacttcgggagccatggtagttactgtccttgatacgtatgctaacctcaacaccaacgtccttcctgactaaag

SEQ ID NO: 467863 - DNA, 1000 bp, Homo Sapiens; identical to SEQ ID NO: 158350

SEQ ID NO: 467864 - DNA, 1000 bp, Homo Sapiens; identical to SEQ ID NO: 158351

SEQ ID NO: 467865 - DNA, 1000 bp, Homo Sapiens; identical to SEQ ID NO: 337804

SEQ ID NO: 467866 - DNA, 1000 bp, Homo Sapiens; identical to SEQ ID NO: 337805

SEQ ID NO: 467867 - DNA, 1000 bp, Homo Sapiens
ctggttgaaaagataaatattatttataccagccacccgcctcacagccgacaccctcatcttctagtgccccccaaagccctgccctggctgtccagtccctctggacatgggcaggtcagtgggggctgcggccggtccacacctggagtgtaagcagcacgttgtcccaagagccacttgggcaggggtcttctcctggcttgcttagctagtggtcctgccccagaggccatccagggctacaagctctgccccagaggctgggactgggacacccctggctcttgctcacaggccactctgccccctccagcccccatcttctcacaaaagaggaaaaggagcaggaggtgactggtatggggtggttaagtgaggggaagctggcctggcctgcagggtactaaatgttcagggtgaaggcagcaaggcagggcattgctggtggcagtgccacagtgccagtaaggttctggaggcctgggggggtgactctagtgctgtggccgcaagtctgatgatgacacctgacttctgtctccagggttcctgagtgagggcccttggttcccagtggtgtcggaaggcatcaccgaggtccagaggcgtcatcgtggtgagtcagaggctgtcacgagttgcccatgatgccccagggcagcaaatggcctccccacggttgccgagggcagccccagggcccagtgggctggccttcttgtgctctgggagaagacagccttggagggacatgcgtgctgctgtaggtgtccagcgccccatttcaattcattcccatgtcccttctccagggaggattgggcagggaagccagaggccctgggcccggcccagtcctgtaggtgactttccactcatgagctagagtcctgcacggctgcagggggagagcggcccccccaggctgtcagtgccagctgctcctgggggagtgggcatgagacctaacaggtcacctccacaggcagggtggtca

SEQ ID NO: 467868 - DNA, 1000 bp, Homo Sapiens; identical to SEQ ID NO: 158353

SEQ ID NO: 467869 - DNA, 1000 bp, Homo Sapiens; identical to SEQ ID NO: 158354

SEQ ID NO: 467870 - DNA, 1000 bp, Homo Sapiens; identical to SEQ ID NO: 337808

SEQ ID NO: 467871 - DNA, 1000 bp, Homo Sapiens; identical to SEQ ID NO: 337809

SEQ ID NO: 467872 - DNA, 1000 bp, Homo Sapiens
aggttttaaatttaagatttattggagggttgggggaaaagtatagcacaaactgcttttcaaagactaggtttttaaaaactctaagcaaacaatttccacttcagattatacatattttaaaaatcagcattgattcgtgagcatatattttactataatgaagggaaatatggcataataaaattctgaaagcaatttttcccaattaaattatagtgttgaaacatctaatagaggaatatttaataggtaagttgacttgcttcttgcctttatgttcctggatactgaggacattcgtgtgtatttttcaaattcaaacaatcaaaacatttatttattctttttttttagtatacggataacaaaagtatatagcaacataataaaaatgcaagaaactagatctgttgatacagatcatctttctaactcttaatggtttgacaaaagatgttcatctctgtaacagctttggctttaagacttcccacatttcttcagtttgctgtttggctacagcatctccagagtagtcaagacagtttgcattccacatgccaatgccccgtaagcgatagttttgtatatatgttgcctttaaagaaatactctgagggttatcataccatacttgatgaaagtggccagcaggatctttatagttataataaggagcccgctgatctttatcccataggtttccagaaatagaactatttatttgcttcatgatcgttttgtagggcacctgacgtcctgcagcgtcactacaaggagccccccggaaagggacttttgcaatggtacaaacatgatcctcagacagattcaggcaggtataatcataaccataccaaggaacacccattacaagtttcttaggattaatgctcatcttgatgtagtcattatatccagttaatgtctgattatagggagcattggctgctgcaatacattctgaccagatctgactttgttcatcataagacat

SEQ ID NO: 467873 - DNA, 1000 bp, Homo Sapiens
tttttttttttttttcaagattaaatgtgtttattttgagttagttagtgaatacaatggtatattagataccagcactccaagctacacctatgtatttgcctctaactttcacacgttgtcagtttccttccctctaatattccaccactgggccttctatttctagcaaaatcatggttcaaattaaaaagaaaaaaaaatgaaagcaagattggtcaccgtattgtgcttccagtgcccccagaaggattttaattgtctcaaatagatgtttattgttttcattaaaggggggaaaaaaacatgatcactagtaatggcacaactagaagaggaaacagaatgcagattaaaagaagcattttaggctggactagttaatttcccctcagttaaaaatcgacataatatcacggatatagacttcaaggttaaattgttcaattcatgggccacacacttaagcgtattggctagtacatttttgcactgaaacagaagcaatacaagttttatgttctaccattacacttccagatttttcacttatgcatatacctgccaacctaatgattcttgcatgcattagagtttgcttttgtagagttaagtttattttccccatccctcccactcccataaatattgcgccaatgcgaactctgtgcccaattttatgagaatgttgcaaaggacagctctgtgccaccttagtacaggaatgtcctgtctccttcccaggctacagatggatcagtagtattgatctcatctcatcttacatgcaaacagacactgttcccttaatttccccatgccagaggcatacgagctggcaggtatgcatacaaaaatggaattaaaaagaaaaagaaagaaagaaaagaaagaaaaagctttcttgttaaaacctatcgtcctagaaggaatccattgctttgaattcacttaaagcctgtacaggcgaaatgtgtttcttctgagaacctcgtcgaac

SEQ ID NO: 467874 - DNA, 1000 bp, Homo Sapiens; identical to SEQ ID NO: 337810

SEQ ID NO: 467875 - DNA, 1000 bp, Homo Sapiens; identical to SEQ ID NO: 337811

SEQ ID NO: 467876 - DNA, 1000 bp, Homo Sapiens; identical to SEQ ID NO: 337812

SEQ ID NO: 467877 - DNA, 1000 bp, Homo Sapiens; identical to SEQ ID NO: 158355

SEQ ID NO: 467878 - DNA, 1000 bp, Homo Sapiens; identical to SEQ ID NO: 158356

SEQ ID NO: 467879 - DNA, 1000 bp, Homo Sapiens; identical to SEQ ID NO: 337815

SEQ ID NO: 467880 - DNA, 1000 bp, Homo Sapiens; identical to SEQ ID NO: 158357

SEQ ID NO: 467881 - DNA, 1000 bp, Homo Sapiens; identical to SEQ ID NO: 337816

SEQ ID NO: 467882 - DNA, 1000 bp, Homo Sapiens
ccaatgaaaacaataatttatttaaataatctcttcatattgtaaaatcaacattaagagcatgttgttttcataataaataaccccaaaatacctttcatttcaacaacaaagactttaggatacgataaaacaaatccaaatcagtagcttaatttaactgaaatgtttttaaaggaaaaaataaaaaggaggggttgctgaggtcactgctaaactgcagttttcacaactgggggtttacaaaaaagtctgaaaagatgagtatttttatacaaataaatcagtgggaaaatctgcacagacacctttatttacaaactctgtgtccaagtccaggctaataatcctgaataggttttaaaaaagataatttaaacacatttttgcagtgttcacatattaaaaaatcattttttcaacgtcaaaatgaggtcatccgcaaaggcacctaaacttttaaaaaaataaaaaataaaaaaactccactggtgatggatgaggagagagctgagggagcgctcctgggggagcgcggtgggggtaagataagggatgggggctccgagggctgggaactgcaggaaggaaagaagcggcggggccgcccgggtcaaggggccacgtgggggagggcgggcaggcgggaccgggaggtcaataactgcagcgtccgagctgagcccaggggagcgggcgaggagaaagaagcctcagagcgcccgggaagcctcgcgcgcctgggaggcttccatctcccgggacccagctctcagcccggggcgaggaaggcgccagacaggctcacccggaggggagggaaggcaagtccgaggcggggctcgaaacagccgagacccggggctcaggtcagaaatgcggccttttagggaggcctttgccaagctgctgtccggttcccccgagagaggggcccgtttggtggccccgggagtgagcagggcctgagacgggccactgcaggtcgcagcctgcagga

SEQ ID NO: 467883 - DNA, 1000 bp, Homo Sapiens; identical to SEQ ID NO: 337820

SEQ ID NO: 467884 - DNA, 1000 bp, Homo Sapiens
aaggggtgttgcttttattgcgggcctactgtgtgtgtgtcctgaactgtccccaggcatcctgccccccaggtaagcccaggcgtcctctcaggagatgctggtccttgcatgtgggcagcagggctcctggcatctggagtcctgggatgggcgggtcttcccggagctccgggaaccctaaaggggactctggtctcccaggtttcacaggagagacagacagaggaccaggggagcgagggaggccagcaggagcccccagtggcgatggaggctggaagccccagaggagtagccgtaatgggtcctgcaggagccacccagctggtccagcgggatgggctcctcctcgggagcctgtgtgaggttgctggcctgttccacagcctcgaagaccctcagcaggttgtcagccagtgcgcccttgacctccgcctccgtccagttcctcctgagcagctcagcgatcaggtctggatacttggagacgtcctccagcccctcagggacccttggaacaccatcaaagtccccaccaaaacccacggctctggctcctgccacctccttgatgtgatccagatggtcggccacttgggacaggttggccttgttggtgcaggaaatgtaattgttgtagaagttcaccatcaccaggctgtctgtctgtttcaccagcctcaggacgtcgtcaggcacgttgcgccggcttgcgcacacgctgtaggccgaggagtggctgaagatgaccggggctctggacagctgcagggtggccttcatggtggccacagacacgtgagccaagtcgatgaggacccccagacggttcagctccttcaccacacgctgcccaaagggtgacaagccttggctctggggctcgctgtctcccgtgtccaccagccagttgtcagcccagggcgtgttgcagctgtgggtgagggtcaggtaccgcatgcccagctgatagagtgcccgcaggacgcccaaactg

SEQ ID NO: 467885 - DNA, 1000 bp, Homo Sapiens; identical to SEQ ID NO: 157508

SEQ ID NO: 467886 - DNA, 1000 bp, Homo Sapiens
tttttttttttttttttttttttttttttgaggaggagaaagaccatttatttctccacccacagtgggactggtaggttttgaaaagagcaatcgctggcatccctttaaatcttggctgactcccaccgtggcagccaatcagcagaggcggagctggtgagttgcctgggcaacaggcccctggttggccgaagacaattagccaccccactgcccactcccaacgaaagggaaattgactctctgctgtccactctgctttaaaatacatcggcccaaactaggcctcctcctttcgctcctgaagtcagaagcgccagcctttggctctcaaaattgggagcgatttggtggagaggatggggtagggaggatgggagaacagcgcctttatctgggacagacagaaggcctggagatgggaagggagaaggagatcagagtccagagagatgaagaggcacagacacaaaatcaggaccctctagtccccgctcgtgctggccattcttttgtagaactgctcagtcatctgggggcttccaccccatgggcccacaattgcccaatcagtgggtggcagacatgggtgatgacacggaatgggtgaggcatctggggtacactgagtttcccgagtccctctttgccccccgagccctggcaggcccctaagggcttgccccgcatcctccagtttgcagacaaggctgtacagatgcaactgagacacagatggggatccacatgggggggtcatggggtctttctgtctcttctcttccagcctgggggcaagtacaggcacgtgggtgtgcgtgcatgagttcaacaggacatgtgtgtttgtgtgtgagggggcgggtctctgtctttttggtagggaggtttccagtactctctgcttggccctctcagggagctatgattcggggccagcctgacatgccatctctcttcatcccagctgccaccaggcaggtcccctgaatggctg

SEQ ID NO: 467887 - DNA, 1000 bp, Homo Sapiens
caatagaaatgccataatttattccattgtataaaaaagtcatccttatgtaacaaaatgtcttcttagaagaagaaatatattatttcaggtcataaataatcagcaaacatacaactgttggcaactaaaaaaaaacccaacactggtattttccatcagtgctgaaaacaaacctgcttaagatatatttacaggatagtacagtactcaaaaacaaaaattgaggtatttggttcttctaggagtagacaatgacatttgtgaaggcagacacctacacaaaaataaataaggtatattctcatatgtatatgtgtcgtcgggaataatactggtaggtatgtcaagcatgaagagattctacaaaaaacaggggcgagcaaaaagaaaccggatcacacactgagtcctttctcttctgccccattttgtcagatggacttgatgtacccactatatattggtcccgaatgtgctgagttcagcaaatgtcttgacgctaagtcatcaccataactgcttagaaacccagaggaactcgggtgaagttaaataaataaggaccagccctctcgagcccctcccagagttattgcatttctcctctcaaggagcatggagtcccaatgggatgtgaagagcctcacctcccgtggcctttcagcagctgggagaggtcgtaatggggctctgaaggtagctcagcgcactgttcgtggagtggacagggatggagacggggaagttgaacacggtggtggtggaggtgcctcggtcgagcacagccatggcggggctcccagcctctgccgaacagtgcggagccagcacctgggactcaaactgcagcagctggcccatgaagctgaagttgggagagatgatgcttcgcctctgcttcacaaactcaaaggcctcgtccagcttgactcgattagtcctcataaggtaagcaaggcagatggtggctgaccgggaaatgcctgcctggcagtgg

SEQ ID NO: 467888 - DNA, 1000 bp, Homo Sapiens
ttttttttttttttttttgcttttctccttttactatttttattttacactataaaaaacaagaacaacaacaacaaccagtaacatactgcttttcttcacattcacacgggtcttagaaaattattgccttttcccctggagaaataactaacagacaaaaagaaaaaaaaagtagtaccacgttgcaaaatctgcaaatcccagaagtccacagcttgaagacaacctccaggggcagggaggaaaacaattgtcacaagagacataagcacacagaaggacaggcagctgaggaaaccagtttgcaccgccactgacccaggatacctagcaagtacccttctcctcctggaatctactgctaccacctcgaaggtatgacttttttggtctatgatctgaagaactcttttcccaaaggaagagttgctctgagaagaggtggaatgagacaagttcaagtatgactaagaatcatgccaaagtccaaggtcagtgaagaacccatggcaaaaaaaatccagaaaagccaacatcttgctacttcaaccaactacctcattggacccaagagggtgtctacacaacatttcagggttcaaatcaggatgctgatcatgtccctacaaaccctgtagggttactttcccaactagacggtgatcagcttatgccccgaagcaacagagacagacattgaaactgccaaagttcaaaaaataaggtggaaattgtgcttccttcaaaatgaattggcttcataactgccttttctcctggtccagcaacttctttctcccacgttgctgcaggtatttattgccttatgcttgaaatgaaaaggcgaactctgaggtgcaaggactgggcagtcccaagagggcaggggtctggaagtacagtagtcagcacatgctgtgctcccgtaatggcttggccttccttcagtcccgagaacctaccctgaggtccgtctgaagttcatttgcaagcctgg

SEQ ID NO: 467889 - DNA, 1000 bp, Homo Sapiens; identical to SEQ ID NO: 337824

SEQ ID NO: 467890 - DNA, 1000 bp, Homo Sapiens; identical to SEQ ID NO: 158360

SEQ ID NO: 467891 - DNA, 1000 bp, Homo Sapiens; identical to SEQ ID NO: 158361

SEQ ID NO: 467892 - DNA, 1000 bp, Homo Sapiens; identical to SEQ ID NO: 158362

SEQ ID NO: 467893 - DNA, 1000 bp, Homo Sapiens; identical to SEQ ID NO: 337828

SEQ ID NO: 467894 - DNA, 1000 bp, Homo Sapiens; identical to SEQ ID NO: 158363

SEQ ID NO: 467895 - DNA, 1000 bp, Homo Sapiens
tttttttttttttttcagattttacagatttatttttaaaaaacaaaacaaaggttaaaaaagtccttcatttccaaccctgcctgggggtgtgggtggggaatagaataagctcagaaaggtgcctacctccttcctgcaaaggacacggcaggtcagaggcaggccctcgccctttctgccctgcctcctcctcaggtagctcaaattgctgctaggaagatttataggcaaagaagtgtgggagtgggaggccaagagctgccttcttcacatcaacagaaactccagctgttctttccccttagcagttctctgagcctcaccactgggactcccagggtgggcgggcaggcaggccaggaggctcagccctttgggctatgttgctcagaccaccgcagctttcttaatgctctttgtgaaccaggagggcggtcaggggaacttcacagtgcggggaggggtgtctggaaaggaaactctgaagcgccgtctctttctgaccttgcctctgcgctgaggctgccattcttggctattccccatcctgaggctgagtggagtccaggacaaagcactaagtggctgtttgctacaaaacacctggagatgccagagagtagcccttggcctatctgtcagtccaggctcccacacagtcacacagtcatacacacagcgttaaggcgtctgtgccagcaggcacggcccggctgggcccagcttctctctctccacctgcagagggtgtaggggggagaaccctggctgctgcagaaacaggctgaagggggagaagctgacaacggaagagttaaccaggcctggagaaagaagtgggaggaaggaaggcaagggctttctaggcctccatccaggcctgctggctgcccttgaagtaacccaactcaggttggggagccctgaccatataccccctggaaaatgggggacagaaagaggggaagagagcggggctagagtattgggactttgg

SEQ ID NO: 467896 - DNA, 1000 bp, Homo Sapiens; identical to SEQ ID NO: 337831

SEQ ID NO: 467897 - DNA, 1000 bp, Homo Sapiens
ttttttttttttttttttcggtttgaatcatctgcaactttattccagagcagaaataagtcattttctaacaataaatataaaaaaaataataaattaagattcgaaaaaaatgtccaacaaaacaaaatctttaacactgacagaatagaaacttatccaaaaggatgagagatggggccgactggggcatgggcaggacactcctgcagcaccggtccctgagtccccagctcacgaatgtttgacaccctctgtccccagccctggcggggccccctgccacacacacacattctctccacaaagtacaaaatatatatttaaaaacctcaacacaaccaagcatcttgcaaaggcccaggaaagcaagggtttggccagtcagggatgaggatggggcccgagggtctaaagaaggcactagagggacagggaccgctttgggtctcacccagtcaagttcacagtctgccctcttagtgtgaggaaatggggcttgaggtaccctgtttacttggcgctgggccaagccctccatctcctgagatggcctcatgtgggagaaggcggagggaaggtcggcttgggaatatcctatatgtctgtccgaaggctgtggcggggctcctgctccagggatgctgggacgtggcggtgcctgctaagtgctcagctgtgtgcgtctcgcagggaaagagggcccagcccagcatccctggtcatctcctcagttcaggccagggtgtcatccgagacccctcagcggaagttgcagggggaggaaagaactagaaataaataaagtccccagtggcccagcatggcacagcagggaggccactctgtttcttcaagtattcttggccgatggggctccaggccctgtcgaggctcagatggggatccccacagtgttcacctggtccttgagtcccagcaggctgtaggcgatgcgcttctggtggccgggcagccgcaccccaatcctcttgatgtc

SEQ ID NO: 467898 - DNA, 1000 bp, Homo Sapiens; identical to SEQ ID NO: 337832

SEQ ID NO: 467899 - DNA, 1000 bp, Homo Sapiens; identical to SEQ ID NO: 158364

SEQ ID NO: 467900 - DNA, 1000 bp, Homo Sapiens
ttttttttttttttttttgcagggttgtatacggcaactactttattattttcaaatgcaaactctttgcatttagtttgctattttacaattttacaaactaggtataaaagaccataaataaatgacataagttatgtgtacctaaagttcatgaagggaagaaaaataccttgacaaattaaaacaaaatagaaaatctatgtctaactccagaaatcactcaaagtttggaacgtgtgaaccgaacaatgttctgttaatttcttattcagtatgaactaaattataatatgccttatacattctaatttgaaccacagtccttgcatattccaacatacttagagtgatacaaaaaataaacgcactcttcagtgtgtatcaatgcttgatgttgtttggagaatgttaaataagtgaaaatattgcttctagaactttcctttatgggtcagaatttaagtgtcttcagacaaatattgaggctatacgggtgtacggattaatacacatatccttcacagattgaatacaagaggtctcagaatgcacacaccagcagtgtagcgagcacaacctttctttaaaataagaacgtttttcaacccaccagaacatttcactcgtaagattgctaaaaaataacttggggcctgcatacacaaggtgaagctacttgatttggtgcagcggggtagtttcccactgctctagagatcggcacatgagttagcattggagctcactcggccagggcttgcccacgggctcagacccagaccctgaagttggcctcctacccttacctctggaaaagatgaactgctcagaagagtcaacctcatttctttatacatatttttcaggcatcaatgcataggcacatcccttaaaaaatatattaaggtccccaaaaaggggtgaatcaactttgtcactctggcatagaacacaatgccacacaccctgtcagaatgtaataaatatttattgatga

SEQ ID NO: 467901 - DNA, 1000 bp, Homo Sapiens; identical to SEQ ID NO: 337834

SEQ ID NO: 467902 - DNA, 1000 bp, Homo Sapiens; identical to SEQ ID NO: 158366

SEQ ID NO: 467903 - DNA, 1000 bp, Homo Sapiens
ttataactaaagcgtttatttccattcaattcactaactgattgctctgcttgggtgtctgtgttggttcacaggagggagtctgtggccagatccctagactgagggcgtccccatggccaagacctttaggcccagcaaaggtctggtggggggaaggaggtgggagagaaatcacacactttctctccagggaagggaagaggcatgcttgcccgtgtctctgagcgcaccctctggagggcagggtatcacagtgaatgatccgggtcctggcctccgatgcagcctggtttaggctcccagagggaaaactgggttttgaccatctgagggcactcaggagcctcaaaggggcctatttgcctgggaagtactagatagattggggcaggagagtgggaagtgggcaaggacttccagccctgcagcctcagagcccacttcctcctcaatctgtccctttcatcaacagtcctggagtgggaagctcctccaccttggcgcctccccctccacacccaaatctcactccagtctctgaatggcccagatggccccatggcagtgggctttggtgaggcctggtggcaggtgggaggagggaagagtgtcaatgaaaaccgtataaaaaaatccagaaatgtgcatataaaatctcgcccttggtgtattgcctaagtcagtaagcagaaagcaccttcttcctggagaaggatcaagtcctcaaaaggtaggaaatgtcaaagtgtcacttcattgtcattaaaaaaaaccaaaaaacaaaaaacaacccaacaaacaaaccccctaaaccaaaaccaccctgtgaccaaaatacccccgagtccaggaattgctgtaaacaaacccagatgcaggatcaacccttctcagcggcagtcggagctgacggcagtcactgcagtatcagtcctcgaggcaggggctggcgggagtgggcaccaggagggccaggctgccaggctgtgcgcgtgat

SEQ ID NO: 467904 - DNA, 1000 bp, Homo Sapiens; identical to SEQ ID NO: 158367

SEQ ID NO: 467905 - DNA, 1000 bp, Homo Sapiens; identical to SEQ ID NO: 158368

SEQ ID NO: 467906 - DNA, 1000 bp, Homo Sapiens; identical to SEQ ID NO: 337838

SEQ ID NO: 467907 - DNA, 1000 bp, Homo Sapiens
ttttttttagttcatgatatttattactggagttgtttacagaaaagtcttttatccactgttaacttaggcataagaataattgtcctgtgtgacttcattttagaacttttactttttaaaaaatcataaaacggtctgtatctgagaagatactaatatcaatgctttaaaaagtgagaggagttgaagagggggctttcgttcatccctcagtagctgcgaccaaataaggtgtagtacttggcagggttcttgccacagacacatttggctccaggctgcagttcacagagtggtttgaaggggatgcaaaggcttttagctcccatggatggagcaccaggttcaagatcttgatccctggcagtggtctttttgatccagtcctcacagtcaatttccccacagaatggaatctgaacaatctttccagaatctagtatcttctgaaagtcttccattgtattagccacaaccatatgagtcttaaggtcttcagaagcccttgtgaaaagggtgacctggatgtcttccaaaatagcttgaagtttagtctctgcctcattttcagcaactgtcagcttttctccagtatctcgtctgacggctacaaactgacagctcttcatatcacgtggcccaacttcaagtctaatgggaactcccttgagctcccagtgattgaatttccaacctggagaataattatctcgtaaatcagctctaacgcggatgttaacactgagtaatcgccttcgataatcattgcattttgcaatcagcgcttctttgtcttcttcagaaagtgcattggtaatgccacaaggaataatcaccacctgaacacatgctacacggggtggtaatactaaacccatgttgtccccatgaaccatggtcataacaccaatagttcgagttgtcaggccccaggagttttgataggcaaattgcttctctcctggtatctttggatcttcaaaaacgatttcaaaca

SEQ ID NO: 467908 - DNA, 1000 bp, Homo Sapiens; identical to SEQ ID NO: 337839

SEQ ID NO: 467909 - DNA, 1000 bp, Homo Sapiens
gagctcggtattatatatttttttctcattaaaggtttaaaaccaaaagcggtttctctttgcagcaaatatacattaaaatagagtctctgtacagccaagggctctgggccctggcttgccccatgtccctgcgcctccctggccaaacccaaaaataaatatagtgttattgctctgcagggcatagaggcagtgctctcctaccccctgaggaggctcgttgggagctgatggggaagccctggccaccccaggggtccaggggctggagtctgcttggagttattgcttcaaggggggacactaatgcccaatgcaaatgatgagaggaggagcgaagggggcatgggcctttgctctccaagtcccactctgctttgaagagggggtaggattaagcagcagcaaaagcatcacccactgggagactctggcctccatccccttccctccctgagataggtttctgcctcccacgcatcccgtgcagccccctatggcttccgcaaggccccctacactctgggggcacgttatggcttgcaaggggcagcactgtgcccagagcctggacacacgttcccagcttctgacaccccctaggagggggaggagagggcgtggggcctgttcccaggggctgatggcattgccctggccctgccagcaggctgtggcactgcccagaccccagctccgccccagcccttggggctgaccccatgctaggcaggtcctgccagaacccccaccagtcccaccccttgcctcagtccatcatggcctcgagcatctccaagaacagcttgtgcatgggcaccttgccctccagcttcaccccatagaaatgggccagcactttgcccgctgtctggcggaggagcggtagcgtgagcagcagcctgcccgcccgccgccgctcagcaccccctccggggccagcccggccggcttcatactccagcagggcctcgtgcagagcttctcgcagctgctc

SEQ ID NO: 467910 - DNA, 1000 bp, Homo Sapiens; identical to SEQ ID NO: 337840

SEQ ID NO: 467911 - DNA, 1000 bp, Homo Sapiens; identical to SEQ ID NO: 337841

SEQ ID NO: 467912 - DNA, 1000 bp, Homo Sapiens; identical to SEQ ID NO: 337842

SEQ ID NO: 467913 - DNA, 1000 bp, Homo Sapiens; identical to SEQ ID NO: 337843

SEQ ID NO: 467914 - DNA, 1000 bp, Homo Sapiens; identical to SEQ ID NO: 161104

SEQ ID NO: 467915 - DNA, 1000 bp, Homo Sapiens; identical to SEQ ID NO: 337844

SEQ ID NO: 467916 - DNA, 1000 bp, Homo Sapiens
tgggggcaactgcccactttattagacaataggtggcccacaggtctcctcagggcccaccctcacagtagacacaccacacaggacaacagaaggaacctgctacccagtcctctgtccctgggattctggtcctgggacaggtgggaaagaggaaggtgggggctggcctcacagagcctcataaatacaaggtcactggccagggatgcaaaggagcgcagcagcagggactcggggaggatgacctgtcctagagtggcccatgtcacgcagcctcctgtgtgggagggggcctcggctcggcatccaggcggcacaggggactgtcatacaccatctgcaggttcaccttgtggcccaccagctcccggatattgttgatgccatatttgatcatcgttgggcgctccagggagaggccccaggcaatgaccgacacgttctcgggaagccccatgggcagcagcatctctggacggaagacccccgagtttccgacctccacccacttcttcaggccttggtggtagctgaacacctccatgctgggctctgtgtatgggttgtaggctggcttgaagcggagttgcgtgatacccagcttggtgaagaactcccgcagaacgcccatgaggtggcccaaggtgagaccatgatccgccaccacgccctcgatctggtggaactcagccaggtgcgtggcgtccagggtctcattccggaatacgcggtcgatggagaagtacttgaccggagtgaagggcttcttctgggcaaggcggtagagcgcacgggcgctggctgatgtggtgtgggttcgcagtaggtttttccgggcctcgtccagcttccagttatacttgtacccctgtgagccgtagccgccctgagagtgggtccgcttgacccgctggacatagtccattgggagctgcagggcctccgctggatctcgaaggaagaaggtgtcgtgctggtcacgggctgggtgctgctg

SEQ ID NO: 467917 - DNA, 1000 bp, Homo Sapiens; identical to SEQ ID NO: 337845

SEQ ID NO: 467918 - DNA, 1000 bp, Homo Sapiens; identical to SEQ ID NO: 337846

SEQ ID NO: 467919 - DNA, 1000 bp, Homo Sapiens; identical to SEQ ID NO: 160524

SEQ ID NO: 467920 - DNA, 1000 bp, Homo Sapiens; identical to SEQ ID NO: 337848

SEQ ID NO: 467921 - DNA, 1000 bp, Homo Sapiens
ttttttttttttttttttggcttgaataatggtgtttattttctttaaatacacttaaatatgaaacatcagatggtagttcattaaactggaagactataagctggacagtaatcagaaagtcagtactgatcatacgaatcaaattctgcataaaaaagaatcagaataattcacaagagttgcgattagcaaaggactcagagactacagttttcctcatctgctctgagtaatcagtcatatgacacctgccattccatgaccagcacacctttctcattcaccaaaaaacaaaaacaaaactaaacaaaaggattacatgggtcccctcctctccattccttggtgcgcagaggcatctgcagctagaagacatccatcaatgaaccagggactccttagctggtgtgaatggaaggttggtctggattcactgtggtgctgtgtaaaatggattttttttttaacacctgggaaaaaaacagtgacagcaacttggcaaagcagcatgctgttaaaaatgacagggatggggaacttggaacgctgaatcaaggattctttcggctgtggggcccctgggcagcccttttctcctttggaaagcggcaatgctttgcacatgctgttttgccacttgcacatggtctggtatgaaaggggcatctgtcctcacagctgcaggtgtctgggtgaaatagcttgtgcttctggcagcaggtctccagactttctttgcactcaaagcaactgcagtttttggggtgctggattagatctttgggacatggtgttttacagacacactcgcaacgatcttcgtcaaacatcatgtgtggcccacagagagctggttcctggagatgagagtggtcttctgttccagcaagtggattttcctcctgcaaaacacatttacatttgttgctatcccatagcatgtcaataggacagagtttcttggaatgggaacagcgatcttcttcagggatctgga

SEQ ID NO: 467922 - DNA, 1000 bp, Homo Sapiens
tttatttctgaaaaagtgtaaaaatcttacatttagaatagtacaataataattgccagtaaaatttacaatactccttgtaaagaatacgcagtaagtacaaaaaaatccacacgtctgttatgatacaaaacacaggttgaaataaatgataattttgactttttttcttgtgtaaacatgttaaccatttttccttttcatgaaaaagtacaccagacaagtgtcctcaaataaaaaagaattgcttcgctggcattcttcaagacctttactatttttgtattattcttttgaccattattttttaacgcctggacctgagaatctctacacctcaaaaaggcttagttgtttttcatctgccaaacgtcaagggagcctctagtgcctggacagggcggactcccttccccggcaccctcttcctccctaccccaggtcgggggttggggggctgtagcataggtcggctttgcataaatagagggacccgcagagccaaaaggcgcgcccgggctgttgacagttttgtccgagaattcgcagcggcgaaaatgggcgcgcgaggtcgagaggggccgcgcctggaggagcgaacaaaacaccgaaccaccaagacgagaaaaggagccgggattcctaccttcttcctcgagcgcgctaacatagcgttattaacaattggaaatcctagcagtaaagttctcgacactggacagggcagtcccttggtgcagagtccccaaggcggcggacgaggagactgaggaggcggcggcggccgcggcggccacgagggatcgggtgagcgcggccgccgggcccacggccgcctgcgccgcgcagcctcctccgctggatccgggagctggcggcgccgccaccggcgagggcgagggcgaggcctgagcggcggcggcggcctgcgcggcggcggcggcagcggcggccgggcccaagctgcccccgatgatgctctcgatggagaagggcgagc

SEQ ID NO: 467923 - DNA, 1000 bp, Homo Sapiens; identical to SEQ ID NO: 337851

SEQ ID NO: 467924 - DNA, 1000 bp, Homo Sapiens
ttttttttttttttttttgaagttcacatacatttattcaattgacaccaatgggaaataggcggcagacagatttttcttttcttccacacagaccatcagacgatttcacagagcttccccacagtggagaagtttaaatcaatgcacacccagtggacagagaacgccgagagcagcgcgctgtacagatatttacacaaaattataggaccccctgccacagggtgtgcccttgcccactccacccccacctctccagtccctggcccagacccttctcttccacccaatctcattgcctttagccacaataaatatcacagggcctgggacagggtggaacactgacagggttgctggccggagatggctggacccagccagccaagggaaaggaaagaaattcctttaaaagcacccaaacacaaaagagaaaggattttcctcagtggagtgggatccagggtttctgcagggaatataaagaccccctgcttcacctctccgttcagctccgcctgcgtagacactggtttaggcttcagaggaaacgaacttccttggagaacagcaaaaaaaaaaaaaaaaaaaaggttgaatttttcttttaagcacaaagcagataatagatgtctttaaattataatattggacaagcagggtctcaacgttggggaagaagtgagaggggaaaggcagaaagggagaccctctgttggtgtttctggcgggatccgtggagcctggccaggcatctctcccggaatgtgttccccgagaggcgcagaggcagggaaaaaaacgaagcccccacccccctgcttttatttctcaaactgtaaagaatcttggcctgcgacttcttcgcgtagccccgggcctgtcgccctgagcgatagagcccgcttagtcccaactatctgcgagattctgtgcgtggagcctgaagtgccgtgtcacgcgtgccggcccaaggtctggagacttcataaataga

SEQ ID NO: 467925 - DNA, 1000 bp, Homo Sapiens; identical to SEQ ID NO: 158369

SEQ ID NO: 467926 - DNA, 1000 bp, Homo Sapiens
ttttttttttttttcactgctcagacgtttattgtccaccgccctccctccctgagcccagaacaagctggtttgctccccgtggtctcctgggccccgccccagcctacacacagggacctcagaactatggacgtggcagggacccgtgcctgtgtctcggggaccacagggcctctgctaccgaggaagctcggggtcccaggtttggcccccacaaacttcaggctggggtgccccccagccccaagggccctgcctttcaccctcttccagccaggccttcacccacccaagatttgttcagggtggggagggtcctcggcagcctttcccctcccgtctgccgcagcaggcacccgttacctccctcccactctcacctcctctgcatgctccagtgcccacctgcaccccccacccctgcttcctgacctctgtgcccagcctcccgttagcccgctgcttgccggtaagggccggatgcctggtggtttgatttcgacacccagcccttccacccacacccacctcccccggccagcggatctcaggcctgaaaccaaccctcaaggtcctcatagacttggctgcggggtaggtgtgggtagcggtcacagatggcacagaaacgttcccgccagtcggtgaacagtcgcacgcggagcctgtcacgccaggcaaagaagcgttggtatcggctctcattcatgccagtgaggaaagccgccagctctcgggctgagccaaagtcatccacatgcacgaaggcgtcagccggcacgaaggcctcataggtggcccgtgggggccccagcaccactggcacagtgccagccaccagtgcgttgcgccagaatttctccgtaatgtagtcgcggtgctgagagttctcaaaggacaggtagaagcggtactgggccacggtgggcaccaggcagctggcgcacagtggccgtccattggcacggccaaagacatccacccgcagatgaggcgc

SEQ ID NO: 467927 - DNA, 1000 bp, Homo Sapiens; identical to SEQ ID NO: 158372

SEQ ID NO: 467928 - DNA, 1000 bp, Homo Sapiens
ttaacgaagaagtattttattattttgctgcaaagctgttgcttcactgtataaaaatagcaccagcaaatgcagtgtatcgcaaaattaagatagtggtgttcctcatctgacactgtacaagcaacaaaacctcttcacttccagttatttccaatggaaagatcattaagtatttcatcccaaatccaggtatggatacatgcaagttacaatattatataaggcttaagaataacaatgttatctttgaattatgtaatttttataactagtttttaccatggataatttcatgaattctgaacactagagcctagtctaaaaatcataggatattgtgaaaaagacgcatattatatttatctataatcattagaaagttaaagggcattttctttcattagcagtgttaacagtagtttttttttccccatcggtaatactaaaagtttctattctaagtcttctatccaccactaatttaagacaactctgctggcttgcgttatttcatactagtttatttaggagttccattttcactcctcaatagattttatgtatttctcatatgcttcttcactcataagttcatctagttctgaagggttactcagtgtcatcttgatcagccaaccatcttcataacaagatttgtttacaagtcctggattttctgcaagagcttcattaatttcagttacttctcctgataaaggagaatagagttcactagcagctttcacactttccaaagcaccaaactcatcttgtttgttcaattttgtcccaacttcagggagactacaataaacaacatctcccaacgcttcctgtgcaaaattgctgattcccactgttccaatgccattttctgttgttacccattcgtgtttctctgtgaatttacgcaccgagagcagagcgggtccagtgcgcagcgtacggacggcgcccacccccagctgccagggcctcggcgggcagggcgcggcgg

SEQ ID NO: 467929 - DNA, 1000 bp, Homo Sapiens; identical to SEQ ID NO: 337856

SEQ ID NO: 467930 - DNA, 1000 bp, Homo Sapiens; identical to SEQ ID NO: 337857

SEQ ID NO: 467931 - DNA, 1000 bp, Homo Sapiens; identical to SEQ ID NO: 158374

SEQ ID NO: 467932 - DNA, 1000 bp, Homo Sapiens
tcaccattttaacacattgaagaagaaaaatgatatgagcatctcaatagttaagataaaaatggataaaatctaactttactgattattttaaaatatacttagcaaactcagactagaaacatcacatttattgatgaaacattagagacctaccctttgcaaccaagatagttctaaggatgcctcactgttctgctcaacattatagtggaggttttagccagtgcaggaagatattttaaaacagaaaaataaatcaataatgggtgtaaggttttaataggaagaagcaaattatcagaattattactagacataagataattatgtaaaaataaattacattcttatatattggtaataaaaattagaaatacaactttttttattttttgctttagaaaatataactttttaaaaagatgccatctacaatagcaatgacaaatcaaaaaagaggaaggatacctaggaataaatctaacaaaatcagtgccaaggtttctttttttaatatactttaagttctagggtacatgtgcacaacgtgcaggtttgttacatatgaatacatgtgccaggttggttggctgcaccattaactcgtcatttacattaggtatttctcctaacactatccctctcccagccacccccccaacagtccaggcgtgtgacgttccccgccctgtgtccaagtgttctcattgttcaattcccacctatgagtgagaacatgcggtgtttggttttctgttcttatagtgaaggtttttataaaaaaaattctaaaacatcactgaaagatttaaaatgacgtaaataaatgggaagatgaaccatgcttactggcaagaacactaggtattgtaaaaatacagattcttccccaaattagttttaaatttactgcaattttctttttctttttttttgagatggagtctcgctctgtcgcccaggctagagtgcagtggcacgatctcggctcactgca

SEQ ID NO: 467933 - DNA, 1000 bp, Homo Sapiens
ttttttttttttttttttttttttggcagtggcaggtagattttattggcctgggacacacaggggataccctcacccacgatggggtggggggtgtggtgttgaagatataatctgatggtcacttgtggtagaatcgcgggttctggctgtgttggatgaaggggagccgagggccaggttggctggtagctgcaaagcccgactttcctgctggctgcatctgcacagggagctggggggaagcaaggagtccaggggctggatgcagagcctgggggtgcatggggcgcagagaggatgagtcggagaagccagtctgctggttagcatgttccatctgcttttgcaaggacagggcaccaccaggctggaggaaacctgtctgagtgggctgaaagtggccatgcacagcatagggctgtggctgtggctgagataggtactgcactgcagggaatgccgaaggagctctgagctgctgactaggactataagctggctgtgtgggcccatagtgaggtgggggctgagcagtcccataggcaccaccaggactgccttggaattgtccatgctctggtgtccctgcaaaagcagctgctgagcccacgtagtgccgggtcgtaagcacttggggtccaaacatttgtttggctctgtcagctgccatgagggtgcctgggcgattgtgtcctccagggctcccctgcatgctgaggagatgagttcctgtgtgaacagtcaggctctgctggtatgcagctgatgttagggtggtcaggtcactctgttcctttcgcctccgtttttcttcctcatgtaaaactttcttgagctgcaggaaaagctggtgcttctcttcctgtagagccaaaagcttctcctccaacttcagaatttgttccttggtctcctctaatgacattctctcttccatctcctttttcttccttctctcctgttcttccttcatcttctgttccatcatcttatccac

SEQ ID NO: 467934 - DNA, 736 bp, Homo Sapiens
cagagttttaaaatgagtttattaaagaaggttcttaggaaggcaacaacttttgtccttaaaaaaaagttatggtttttcatgctgtataataaaggtgatgtaagaggctacagagttacaagtttctttctactggaattctctggtatagcacagtgtagtcatttctgcaattctagaataaataaaaagtctcttctatgcttctcttcaaaagcaatgaataacagaagatggtgtaaaaaagtcatattttttctattcattctgtagtattggagccagtatttttaccatcacaggctacaattttcactttatccactttaataagttctgtcacctctctgaattcaacatcattcagtacaaaagtccacacattatcgcagaatctgtacgtatttagagagcccctgaaattgactctgttcctgaccctctgagccagtgctgcatttatagccttatcaaactgaagtagaacttgaagggcaagttggggggtgatctgttgagactgtatgagctcatctaggctctcctgaagactgtttcccaaagtagtatttctgtataactgatatgccatggcttaggaggaagaatttgtttttcttattcaagcttgcattgatgtcctgtggggaaggcgcttccctccgcggagcggacagaagccgccacgagcccggcaggaggttcctacttctccgaccacctctccagctcg

SEQ ID NO: 467935 - DNA, 1000 bp, Homo Sapiens; identical to SEQ ID NO: 337861

SEQ ID NO: 467936 - DNA, 1000 bp, Homo Sapiens; identical to SEQ ID NO: 158376

SEQ ID NO: 467937 - DNA, 1000 bp, Homo Sapiens; identical to SEQ ID NO: 158378

SEQ ID NO: 467938 - DNA, 1000 bp, Homo Sapiens
ccactagtactcaacattcattgtatttattttataaacagtatggttcaaaaaaacacaaaccggaaaacctttatttaaaactagtccaactaactggatggggctcactccatcccatcccacccccgatctttctatatatatggagctggaaccctatcagacagcgagcattcacgtacactttgtctttcctgttgaacatgaataaacgtctttgaacataaatgaacttctctgaaccaaaagaaacaaatgaagttttacaagatacaggcactttatgttcccagttttaaaaataagccaagtgaaaaatatttaataaaaataactggagcagagaagctttaggagttataccattagttcaaatgacttacactcaatgcaaatagacagcatcaaacaggaaaacaaacaaaaatttaactgaggttaatggtcgtatttgtaaaaaaaagatatccaatttaccaaaattggagaaaaatggccatttgaatccaacttaaagatacgccaataatgtgcattacatctgcgtaactatgcagctgagtaacacctgaaagctctgcaagagtgtgtggttagtgagaaaagcaaaaggtgcttttattccacagtatctgattaaacaaaacaaagcaatttacaaaaaaagtaccaaatgatactttaaaataaatagttcatcattttgatgaatatatacatgtaaagtccacttcctggggatttagctatctaaaagtggcatatcactatccagaggtgcaggagcaagttcacataaataaaacagtgtagcttcactagcttcagcttcagtcaatggctccaggcgaacaagcttactttgggttggttctgggtctaggctgctatccagaagctcatcaacttctatgggtttatctacagaggacaaaacttctgatgatgctgttgtactcgcctgttcaacagaagaagcagggttcccatcgaggaa

SEQ ID NO: 467939 - DNA, 1000 bp, Homo Sapiens; identical to SEQ ID NO: 158379

SEQ ID NO: 467940 - DNA, 1000 bp, Homo Sapiens
ttttttttttttttttttttgagctttttcatttaatttttattttagagtcatttgcttccccatcccaaattaactatgcaaattaattgttttgaagatgccatgcccaaatgtggaggtgactcagagcttggaaactcagaagctctaaggtgagcctccagacagggaaagtctgcaacatggtgactgagagggtagtagaaattcacttgctatttaactctctcttgagatttattcttggaggacagagcaaaagtccactcttcagcagctctcctagggtcattccttcacaacgtatattccgtttccagttctttgcgttccttccttttccttcgacttcaaattcatttggtgttaaccaagttccatcctcattccgaatgcacttcactgaggatccgtgtttcattttcttcttatataaaatccctttcgcctcaccacaggtcacggggagcttagaacagtgaaaatccacagtgtcacttttgggttttcctcttcggtgaatatttttctgaaatctcctttttgagcttgaacagatatctttctcctttttcttttctttcgatctggactttcgggcacatttagttcttgccttttggaccctcatcatgacctctgagttccaggttgagtcgtctttcctttgagtcaccttatccaccacttggagcttctcttggatgccatgcccaggtgaggctgccccttgtgtgacccttcgtggtgtactaggcgtcttctgggacctctttccttcattcatttctgaagtgccatcaatgatctcctctgatctcgactttcgggcacattcagttctcgccttttgggcccttgtctctaccgtggagttacaagttgagtcatctttcttttgaggaacctgatccacccttttgagcttcttttggattccgtgtctagatgaggctgtccctcttgggaggctttttttcttatgtctcctttttgg

SEQ ID NO: 467941 - DNA, 1000 bp, Homo Sapiens
ttttttttttttttttttttttttttttttttttttttttttttttttttttttccaagaacttccttattctctttattcacacctgcacaacccctgcaaggggaaaggccaagagccaaggacccacacacactccccaggcacctacatacatgcatgcagagaatacatgttccctgcctcacagacacatggtcacacatggacacagatgtacacattacacacgttccttgagcagaactccaactctggggtgaaatcagaggtacaagcacctttcagctgcaaatttgaaatacagggtctcacagaaatgggctccaaacagaacttccagctgagatccaaccatagggatctactgtcctgcctggtttctatccacaccagcaagacagaattataggtggaatctgccgaagccctcctgggtcctctacaggtttggagctcctggacgcctgtccactggaatcactgaggccaagaacccaggctttggggatccatccttcccaccccgtctcagcctcagccagagccccagtgccagggccccagccaccagtcccaggaaagaaaggattcccaaagacgccagcacagctacctgctccacagagtccctgtgatcaagtagccgagggtgtggttggagggagggccttggaggagcagggctgtccacctgaggctccacctctggctgcgtgtgtagctggccccatgctggtatctcctttggtatggtcccagtgctcggagttccccaggcctccgggctccaggtgctccaggtgccagcatctagaaagtcccgggcactgactcgtacagcatggggcagcccagccacagcatctgtgatcacctcctccagtccagctggctccaccgtggaccaggctggatgctgcgccggacggtactgcaaacggaacttgagcaggaagtggggctggcacggccaggaggcagggtatgtccagctggc

SEQ ID NO: 467942 - DNA, 1000 bp, Homo Sapiens
tttttttttttttgaatcactgcgttttactgagtgcacaggtccacctggcgtccgaactcgtccccgtggcagcagggatccccagaaccttccacggccatcgcggccgcaggaccccacacccgaagtcccccgcaaacccgcactggcgcattcttacggctctggcatcaacctgtccgtgtgagtaagttaatatctcagctaatctgttagaaaactagagttcattccctgggcgtctatccctagaaaatggacggtgcacaaagttgagattgaagtgtgcggggtaacacatccaccaaaaaaaggcctggtcactacggcacaaggacacatacaaaatggtcagaagtgtacgtcggtactgaaggcattatgaaatgttctttggagcatgaacaaaagtgcagacagccagaggcaacggcgcaaatggggaagctgcagccaccgtcacggccagaggatggcagactgcaatggcgtggggcgcgggcatggcgggcacacgtgggccgtgtggatcccgggcagagggatggcgtccagcgggaccaccagctctgggcgcctcagtgcgagacccctccgtgagacccctcctgccctgcgcgtgtctctggagcccgtcccttgggcccctcgcccgccccacctgttcgcagggtccagggcgtccgtacctggcacagccagggggcatggggcgacctcagggagttcctgtccacatgcattaaggcaacgactttgtaaaacccaggcggagttggcgtgtggcgatggcgatgtgcacgtgcctgcctggtagccccggggaccggcccctccttgctggcgcctggccgagagtcagacgctgaggacctctcaggacggggcccctggccagagccagtctcctcggccagccaggggcaccacggcaagtgtccaagcccagagcacactcaactccaccccacaaacgccttttaaaactctgaagagg

SEQ ID NO: 467943 - DNA, 1000 bp, Homo Sapiens
tatcctagaagagattagcggaaccatttatatagtgtaaagtcatgcaaaccatgctgaaaaggaagcactttgttgtggtgacatggggaggaagaggctgtgggaagcccctgcctgggtggggccaccacgcacacgcatgcatttgatgcagccattggtgtccccgctggtaagcgtcgggtgtaagagtaagtgaactatacaaagtctgtctacattacaaggaggggtcagccagtgacctcttttaaatgggcttattggaaggggtccatactgaatcagaaatcccatcccctgtggacgacagaggcatggagccgctgggcgtgaaggggtccgtgtctgtgtccgtctcaccctcggcgaggtaccgcttctccctcatccagctcgaccccccattggggccgaacacataatcatctctgtcctgggagatgctgaagccacttggagacctctccagctcctcgtggttgaccgacatcagggacagaggtgtgtcactgtctcgcgtgatgctacgtctctgccggggggagattcggtccgagtaggggccctgcaggtcagcctgggagtggcagctcactcgggagtcgagaagagtcaagataggcaggaccgtgggcctctccacatacgttgttgctgaggaaggaggagttgcctgaacctttccagaactgggtccccctcggggcaggttcacagggtcatgtgcaaaaaacccataggggctgactttgtcaatggtcacctggtggaagctgtagggtggttccggggggcctgtctcagaatagttgcagatgatggttttcaaatcggaatacctgttgtcctccttcttctctgcttcagctggcgaggaggtgcccttggttgggtaatactccgtgacctgcacctgcaaccgttccatgtgttgcatgtgcatatccacgaggaagtccagcttcttccccatgtcctgaacctgtctttcaac

SEQ ID NO: 467944 - DNA, 1000 bp, Homo Sapiens; identical to SEQ ID NO: 337867

SEQ ID NO: 467945 - DNA, 1000 bp, Homo Sapiens; identical to SEQ ID NO: 337868

SEQ ID NO: 467946 - DNA, 1000 bp, Homo Sapiens; identical to SEQ ID NO: 337869

SEQ ID NO: 467947 - DNA, 1000 bp, Homo Sapiens; identical to SEQ ID NO: 337870

SEQ ID NO: 467948 - DNA, 1000 bp, Homo Sapiens; identical to SEQ ID NO: 337871

SEQ ID NO: 467949 - DNA, 688 bp, Homo Sapiens; identical to SEQ ID NO: 337872

SEQ ID NO: 467950 - DNA, 1000 bp, Homo Sapiens; identical to SEQ ID NO: 337873

SEQ ID NO: 467951 - DNA, 1000 bp, Homo Sapiens; identical to SEQ ID NO: 158380

SEQ ID NO: 467952 - DNA, 1000 bp, Homo Sapiens; identical to SEQ ID NO: 337874

SEQ ID NO: 467953 - DNA, 1000 bp, Homo Sapiens; identical to SEQ ID NO: 337875

SEQ ID NO: 467954 - DNA, 1000 bp, Homo Sapiens; identical to SEQ ID NO: 158381

SEQ ID NO: 467955 - DNA, 1000 bp, Homo Sapiens; identical to SEQ ID NO: 158382

SEQ ID NO: 467956 - DNA, 1000 bp, Homo Sapiens; identical to SEQ ID NO: 337880

SEQ ID NO: 467957 - DNA, 1000 bp, Homo Sapiens; identical to SEQ ID NO: 337881

SEQ ID NO: 467958 - DNA, 433 bp, Homo Sapiens
ttttttttttttttttcagattcttcatgtttttatttctctcagaactttaaaatgtgaacattcgataatctagccagtctttacttccaggtaacttcttcactgggttgcaattcccttttaaataacatactcttgttccggaaggcagttagccgttcatcactctttctgtctaaataacatccaatgacaaatcccatagggacaagaacatgaacccagtggtcccgcacaatctgaagtaagttcaccatgatagctgcagcctcagcgcctacagcgaccccgagaccaagggcaacagggaactcaacccgcgccagtggaagctgcgacctcgggacctgccattcgccgcgcccgcacggagcagaggggtgacgccagcaaatcatactactttttcctcctcagggttgactcctct

SEQ ID NO: 467959 - DNA, 541 bp, Homo Sapiens
ttttttttttttttttaatgattaatagatgatttatttaggcaggaatacatatagtcatcattgccagacttaatatgagaggtgaaatgttcgatccaattttccttcctggataagtttttctttcctatccctctcagttttgataatataataaatgaagatgaggggcccaaatccacacagagctcccatgagtgagtttttaggagtgggtctgaaattaggatagacatttattgttcttgcataggcccaacgaagcaaggcaggattttcgatgagccctcggcggttgggatcgttgtactgaagcaggtactctcgtttcagctgggctcttatggccaaccgctcggcttgcgcccgccgggtttccggagatatgttgtattcggctgggtcgagggtctcaggcagagtgcgcaggctcgacggcttatactttgggaacgacatcttggcgaaccagggcacaattgcgcctgcgcgattctgaggccctttgtctatgctgaccttcagcttcaggaagtgc

SEQ ID NO: 467960 - DNA, 1000 bp, Homo Sapiens; identical to SEQ ID NO: 158385

SEQ ID NO: 467961 - DNA, 1000 bp, Homo Sapiens; identical to SEQ ID NO: 158386

SEQ ID NO: 467962 - DNA, 899 bp, Homo Sapiens; identical to SEQ ID NO: 158387

SEQ ID NO: 467963 - DNA, 750 bp, Homo Sapiens; identical to SEQ ID NO: 337887

SEQ ID NO: 467964 - DNA, 1000 bp, Homo Sapiens; identical to SEQ ID NO: 158388

SEQ ID NO: 467965 - DNA, 1000 bp, Homo Sapiens; identical to SEQ ID NO: 337889

SEQ ID NO: 467966 - DNA, 1000 bp, Homo Sapiens; identical to SEQ ID NO: 158389

SEQ ID NO: 467967 - DNA, 1000 bp, Homo Sapiens; identical to SEQ ID NO: 337892

SEQ ID NO: 467968 - DNA, 1000 bp, Homo Sapiens; identical to SEQ ID NO: 158391

SEQ ID NO: 467969 - DNA, 1000 bp, Homo Sapiens; identical to SEQ ID NO: 337895

SEQ ID NO: 467970 - DNA, 1000 bp, Homo Sapiens; identical to SEQ ID NO: 158392

SEQ ID NO: 467971 - DNA, 1000 bp, Homo Sapiens
ttttttttttttttttgtatttcaaccaggtattttattggtctggcaactgcaaaatatacaaatttctgaaaggcatctcctgtttgaaagctagcatagctttatatcccaggtcattaattcagacaaatacacagaacacagagaagtcataagtcacacataggaggctcccaaaccaattaacaatgaaacccaatctctacagctttctattgtttaggctccttatacatattaaataaataaatagcacatctgctatcaaaataataaaaaaataaatttcaagtattacaaagaaaaatatcattggtgtggttccaaacagtttttcttctctctcaaaatgaagagctttgcccgtggtctcaggacagaataaggaggggggaaactcacccaaaaacaaataggcaaagttaaaaatattggtccccgttattttgtggggtggagagttggaggaatcagtagacgccaaaagttcatgactgtagctcaaacccaacccccgcccccggcccccgtccaatgtcccctcaaaaggcaggtcactggcttgcaaagtaggcagtgttctcctttctatagtatctccctccctgtccagattcatgttacctctctccctatctaggcccttcgcaaactaaaagtcccgtgttagaccaaggcttctgtatttaggtattgattttaggtagtcagaggggagaggggaccacagctatcaagcccctatctgtatcaaacttcagagttgatgttcaaagaatgaggcctgcgagggggacacgagaaactattctcaagagcaaagcaacaggccttccatgtcaaatcgaaaaatacaaccaagttaagcacaatcatgcacccgtgcacgtccaccccctacccacatattctgatgagactcaacatccagggagagagagaaaactgcgcgagcctggagctgcacgggaatgcggacagagacatcctctccagc

SEQ ID NO: 467972 - DNA, 1000 bp, Homo Sapiens; identical to SEQ ID NO: 158393

SEQ ID NO: 467973 - DNA, 1000 bp, Homo Sapiens
tttttttttttttttttttgaattaattgatgaggtttatttgattgtctttcttataaaatacattaaaaatactgcttttaactgtaggcacacaattaaaacaaatgtaaacctatgtttaatttaaaatatattaaaatgattaattaaaggtcttttattattttacacatcaaatttcatgcaatcagtactccactgaaggagaaaagattatgaaaaaacaatgaaagcacaggtagaaaataaacaacacaaaagactaattctgattttttttctgtgtccttaataccctgtgctgtctttgacaacaaagatgccttacttatgtgattcagaggcccggaagtgaaaaaatacaagtagttaatgaataatgcatatgttcatagcaatggtgaaattatactgtttcctaatggataccatttttctttatcgagtgggacactacagagtcggatgttaattgctcccacaaatacagttttactcttcacaataagcattaagacatgtccttggagctctgtgacttcatcatatactacaatttcattgtaagtggggtccgtacattttggaacagattttgttttcctcctcagaacttcactgggatatggtaaaagataaaattcaacatgtgcactgggcgcagagccatctgggagatgaatgtttttcatgtgtttcactagtatggtcagcttcacatcctcgtaggatatgactaactgcaccttaggcttcttgtctggaaacttcttctcacctaggtacacaggtgatgattcaactgtttgttgcacagcctcagagaggaaaaagctaagtacacaatcactgtttgtaacttcatgtgatacatttaatatctgttccatgtaatgatttagatctctgaatcttctgtgatctgaatttgtaaaaggtaggtgccaccaatgaggaaactctgggagagtcagtgatgcaaactgcttctgaagtt

SEQ ID NO: 467974 - DNA, 1000 bp, Homo Sapiens; identical to SEQ ID NO: 337897

SEQ ID NO: 467975 - DNA, 1000 bp, Homo Sapiens; identical to SEQ ID NO: 337899

SEQ ID NO: 467976 - DNA, 1000 bp, Homo Sapiens
tttttttttttttttttttttttttttttttagccacctacagatttattaaactttatttcctctgagtctctgggcagtcagcagggatgtaaggcgaagtggcagtagctgaaggggcctgagcagagctggtgctgggaggggccggcatggacaggaagaagaggaggagatttaaatatccagggctgaaagccagttaatagttctccttcatctgtttttgtattttgtgtagcatctcctgcatccgccgcagctcctcatctttctctcggataagcttctcagtttctggatctgtccctggtgggacagcagggatggggaagtcggtaccactttcccgagtcagtttgttgcgattccgttccttcaccaccaggcgggtcatgctctggatgcactgtgcccggtagttctcataatgtgtctcccgtgtcacatccttcaggtcctgcatgtgggtacgtaccagcattgtcctcagcttcacaaagtcgcagtgccctgggttttccacttccacgatgccccaggggtagagtcgaccccgaactcgccgccctctggcctctactacagtgttgctgccaattactgcaaatgggatgctttcctttagggcttggtcctgcaatttgaagtcctcatcctcatcagagtcacagtctgggaattgatagatcttgattccaaaatgctcaatctcctcccggattttgcgtttcttgtggtccacttcgggaggtgtcagtgtgtctgccttagccaggataggcacgatgttgacccgctgatgcagggccttcatgaattcaacatccaatggccggagcccatggccgaagggtgagatgaagtacaggcagcagtgcaccctgttgtcttggatgttctttcggttcaggccactctcgtctcggaaatactgctcaaactgctgatcaatgtattctgccacaggcttccagcactctgtgttgttgactgcatc

SEQ ID NO: 467977 - DNA, 1000 bp, Homo Sapiens
ttttttttttttttttttttttttttccacaaatccgttctgacatacggataaacttttattgacataccaaagagaaaccaatattcactgaaggctgccgaatccgtatttctaagagtaaaggtgtttaattgactctccacacttaaagcactttgtatgaaatatagctacaaatatacataaagaattcagatcacaaaactctctaggacattggctgggcgcggtggcccaagcctgtaatcccagcactttgggaggctgaggcaggcggatcacaaggtcaggagatcaagaccatcctggctaacacggtcaaaccccgtctctactaaaaatacaaaaaattagccggatgtggtggcgggtgcctgtagtcccagctactcgggaggctgaggcaggagaatggcgtgaacctgggaggcagagcttgcagtgagccgagaccgcgccactgcactccagcctgggcaacagagcaagattctgtctcaaaaaaaaaaaaaacctctccaggaaatcaatagtcatcatataatactggaactacagttaaaaaaaaaaaaaaagcaatcttctaggattcctaactgtagtttaaagtacagatcatttgtaccaactttctatagcaagttgtaataggcaactgtaagcaaacagtatcaatctgtataacttgtaaaaattcatctgaagttgtttggagctgtacgacaatggatgttattcttccagttctcccagcagctctacaaaatcagtgatataccatttggcgttatccttgacttgttgcctgatcacatttcctccaaatccaatgaaagcatcagcaggaggacaggcttccatatctgtggcaccatctccaatcatgattattttcttaaaatgaaatttttcctttaaaagtttaatcacttttccttttccaccagattcagctgttggctgcgtctcatcaaaacctgcatattcaccgttaaag

SEQ ID NO: 467978 - DNA, 1000 bp, Homo Sapiens; identical to SEQ ID NO: 337900

SEQ ID NO: 467979 - DNA, 1000 bp, Homo Sapiens; identical to SEQ ID NO: 337901

SEQ ID NO: 467980 - DNA, 1000 bp, Homo Sapiens; identical to SEQ ID NO: 158395

SEQ ID NO: 467981 - DNA, 1000 bp, Homo Sapiens
ttttttttttttttttttttttttttttttcaaatttcaacagccatttattttgtgcatcatttaattcatgtatgggttctatccactttcatcagttaacattcttgttgacaaaccaatttacatcaacttgctatagaacagatgaaaggtatacatgggggaaaaatcaagtagaaacctagagttattttatgttagctcagttattgaacataacagacacagaagtatacacaaagaactgtagtcagaataacaggacttcagaataaaaagcagaaaataaaataccggtctttattttacaatatgtataattatataatttattaaaattaatttaacacaatatacaaaatattaacagtagtcacttttagattcgataagcacttcaaatacagaaatgttaaaatggcaaaactatactatgcaactttcaattcaatgaatctagctcactagctcaggctgaacattcactctctgaagcacttcttcaggcatgcaaaagacaggattaacaggtttaatctgttcttctcccaaaagtgacaatccagcaattccaaataaggtatgaaaaggatccaccatatctcctggcctgtctgcaaatccccccgtttcttcatcttgacatgctaaaatgaaattacgcagtttctctctatcaatccaatgaagtcttccaattatctttagggaagccaggacccaccatgagtagcatacatctggtaacttctccggccttccattgagcccgcctgagggtaattgtcgttcacaaagccaccagccaagtaaatcagaatttacttgatgcaactgacttgtaatagccagaaatcctgtgcaacaatagatctgcccagcatgggattcagaacctggtctgcaaccaaatccaccgtcaaagttcatacaggataaaacaaattcgattgccttttccacattaatagcatcaagcttccccaacaaagccaaa

SEQ ID NO: 467982 - DNA, 1000 bp, Homo Sapiens; identical to SEQ ID NO: 337902

SEQ ID NO: 467983 - DNA, 768 bp, Homo Sapiens
tttttttttttgaaggggcagatggctgtttattgatccttcagtcttgtttcaattagatcatacttttgccagcgagagagggaaacagaggaaaggatctagagaacgcctgagacagggcacgagggtcaggctgctggaggcatgggggaggctcatctccactgggacccccacagctgcttctaacacaggattttgtggctgcttcaggctgttgcttttttttggtatctcctaatcgcaaaagagcatccagcaacaaccaggattccaagcgccgtggccacaccgacttcaaccttggccttttccacctgtttacagcgggacttgccatatctcagctgggcgacaaagtgctcacagttcctgctcacaatactgtacttcatcttctgaccaaccatctccttcgcagaactgatgatcacctccacgggccgtggttggtactcatggtccaagctgttgttgacccgatagcaacagcctcccaccacatcttccaggcgcccccgtttcacctctgcactgttgctcaggactgagaagacactggaggagccagccccggggtactcacttggaggagccagatggatcacgtagccatctcctatatacagggcccagtgctcatagccaaggcggaaaatctcaatcaggtctccaggtttgggctcttggtgtggcgaagccatctcgaagccaagaggaggtctggtgctcctcttgtttgtggatcagcttttatgctgaagg

SEQ ID NO: 467984 - DNA, 1000 bp, Homo Sapiens; identical to SEQ ID NO: 337903

SEQ ID NO: 467985 - DNA, 1000 bp, Homo Sapiens; identical to SEQ ID NO: 158396

SEQ ID NO: 467986 - DNA, 1000 bp, Homo Sapiens; identical to SEQ ID NO: 337905

SEQ ID NO: 467987 - DNA, 1000 bp, Homo Sapiens; identical to SEQ ID NO: 337906

SEQ ID NO: 467988 - DNA, 1000 bp, Homo Sapiens; identical to SEQ ID NO: 160810

SEQ ID NO: 467989 - DNA, 1000 bp, Homo Sapiens; identical to SEQ ID NO: 337908

SEQ ID NO: 467990 - DNA, 1000 bp, Homo Sapiens
ttttttttttttttttttttttttttttttgtctcttttgtaattttaattgaagcaatcctatttttttttaactctctcttataagcaccaaattttaatatctaagtcaatttttggggaaagaaacaccatcaagatcttccctccagcaaaacaacgatgttcactcctccaaatatccaaattgaagatctaccaaaacaaaaacaaaaacaaaagcccacagagaaataaaaaggaacaaaaatcacattctaatggggggggtcagtgcatttagcagtcttcgctgtgctgtctaaccatccttcagctgactttcaaaaaaaaaacaccctaagctcatcaaaatatacattttccatttgcttttttaaattaaaaataattattaaaaaaaggaaaactttaaggaattcacaatcaattgcctgactcattttgatgtcatgtacagcatatggaggtcaggaaggctatttgcagcacatgtgattaggggctactgatcttcagggtttagctttcttccaaacagtgtaaaatacccacaattccaagtatgaagggacacagacgatctcctttgaaaattccacaggacaatacaggcgccccagctgttcttcatagagcgacagtgcttctgtcagattgacacagttcccctgtgtaaaatatttcccatcctgtttcaacactttcattgagaggtcaagaatcagtctgagaaactcccatgtggaatcttcttctggagacgtggagattggaacagctgtcaaatcattaatcacataatcaaattctctcccttctttggcgtacctcttcagtaccgggatacagtcttctattagaacctgatagcagtctcctttaagattgtctaagacatcgccacacgtttttcgcatgtatttcttacacccatcaatcaccatttggtcaatctctaccatagtgaccatctttggttttagtttgactatttcac

SEQ ID NO: 467991 - DNA, 1000 bp, Homo Sapiens; identical to SEQ ID NO: 337909

SEQ ID NO: 467992 - DNA, 1000 bp, Homo Sapiens; identical to SEQ ID NO: 337910

SEQ ID NO: 467993 - DNA, 1000 bp, Homo Sapiens; identical to SEQ ID NO: 337911

SEQ ID NO: 467994 - DNA, 1000 bp, Homo Sapiens; identical to SEQ ID NO: 158400

SEQ ID NO: 467995 - DNA, 1000 bp, Homo Sapiens; identical to SEQ ID NO: 344905

SEQ ID NO: 467996 - DNA, 574 bp, Homo Sapiens
ttttttttttttttttttttttttttttagatgaactcatttatttgacatattaaattagacaaagaaatatatatgtaaccagataaaaacaatcacattctcatactacttgaacacatagcagtggtcaaaaataatggattgtaaaatggaccccaggatttaatgcaaaaaccaccccatacgagaaaagtttcaggcttctaacttcactgaatccagtactaaacgtgcttctttatattcctcagcttcttccaagtctttttcattttctagtatccgttgaagatccaaatatgcggcttccaacctgcgctggcaatctgggatcatcatcctggattcttgtaggatctctgcctgctttttaatgtcataattttcaccgtcttcagctctcattttttcaatcttttcttcttgttgttttgcctctttttcatacatcactttttctttgaccaaccgcttcaccacgccggtcttgatcttgatctgtctcacgcgaggatcggccatggtccctcgagcgcgcgagaaggaggggcggagagccggggtaaccgtc

SEQ ID NO: 467997 - DNA, 1000 bp, Homo Sapiens
ttcaaaaataagtaaaattaagatttctttaccaaccatatcagacacctaacagttgttaagaacatctgataaacagcagactgaggaaagtttggttatggcgcccggagagggggctctgcctgccttcccccgccccacccccacccttccagggctcagggcagcccccagaacatctgtgcctctctctaggtccaggggagggcccacctctgacctccgatgtccacgggactctcctcagctcagaacgacgtcttttatttaaaaatagcttttattttaaactcaccaattctctctcacacacactcacactcacgcacagatacacacacaccctgtcaccaacagtctttgtttttccaaaagttctgccttgtctctgaccagccagagctgggcaggctgaatggatcctcacagctctccaggatcgggtggagatgtcccgagggccctgcccagagtgtcccggaacaggccatggtcccccggtccctacacaaagaaggggtgggcttggctcctggggtcttcttccctgtccagccagtggctggctcctggcctccttctccagggtccaggctcatctccgtggccctcgaaggggggccacccccctcaccttcaagcagctgccccccaggtcacgacggccaccccccttgcgctggttgctgaggcagaaggtgcagatggagcgcggctggcggccgccgtcggcggcggcggggacggcgcccttggcactgcccgcggcacggaagcacggctgcccgtcgtcggccgagtcgcccagcagcagcacgttggccaggtgcgcgatgtagctggacgccaggcgcagcgtctcgatcttggacagcttgcggtccaccggctcggtggggatgagcgtgcgcagcgccgtgaaggccgtgttcacgctctgagtgcggtcccgctcccgcgcgttggccgcctgccgctgtcgcaccaccaccacggg

SEQ ID NO: 467998 - DNA, 1000 bp, Homo Sapiens; identical to SEQ ID NO: 246444

SEQ ID NO: 467999 - DNA, 1000 bp, Homo Sapiens; identical to SEQ ID NO: 158402

SEQ ID NO: 468000 - DNA, 1000 bp, Homo Sapiens; identical to SEQ ID NO: 158403

SEQ ID NO: 468001 - DNA, 1000 bp, Homo Sapiens; identical to SEQ ID NO: 337917

SEQ ID NO: 468002 - DNA, 1000 bp, Homo Sapiens; identical to SEQ ID NO: 246445

SEQ ID NO: 468003 - DNA, 1000 bp, Homo Sapiens; identical to SEQ ID NO: 344030

SEQ ID NO: 468004 - DNA, 1000 bp, Homo Sapiens
ccccgggtaccgagctcgaattccaaattttcagctgtattttctgatctggttacataaatgttctttgatttaaattaagccaaagttggagctaaacagattttctgcaaccatttcatctttaagatgaagttaaagatttgcatttgaaatctcccattattgaattggaagtagcagttccagttaatgtccagcatcctctgaatgccaatggtctttgagtaaacatatgaaccttcatcgcttttagttgtttaagacaccacttcacatgatcagtaagtaacaacaacaacctcttggtaaatgcacatgaatgcaaattcctgttttatatatttgggtagaaggatagaacatattgaaaataacagataagtatttacaaattctcaccttatttttcccctttacattcaatggctaagtgtggggattcatctgtaaatgctcccagaaatggcacaaaattgtgctataatggaaccaaacaaccacagtgtttgtttggggttttgatttttctccaataaaaggtacttatttagacagtaaaattttttagtgacaataaaaatttataacataaagagcttttgtgtgtccacattagccacaaactaaatagggcaagtactttatgtctgtgtgtacacatttacacacacgcacacacacaaaactggaccatgtttccagggttcagtggaggaaaaacttttttcattgttaagtgtaatgttttcaaatagatgaatcagaaaattttacatagatgtaagaccattttgtatgaacggtatcaatcatgtgcattgagggataagtagggtaaatggtgtttaaacagcattctaaagaaaggattaaagcattctaaaggcccatgggctactttttcccaaatttcagagctgggagtccccagcaggggatccacagagcaggcaagaaggaacctgaaataaacttcagaggaaaaaccgcatgggga

SEQ ID NO: 468005 - DNA, 1000 bp, Homo Sapiens; identical to SEQ ID NO: 337920

SEQ ID NO: 468006 - DNA, 1000 bp, Homo Sapiens; identical to SEQ ID NO: 158405

SEQ ID NO: 468007 - DNA, 1000 bp, Homo Sapiens
ttttttttttttttttttgtggaagaattctttttaattaaataaattaatattatttttatcagaataaattgttaaatattgctgtgatgaggcccaggggtccagagttcctgctgcagaaggcttcgctccagccgcggagggacctgggctgtgtctgggggagggtggagcagcattgggtgtggaacagaatagttgagggctctgagagattttttttcccccacggatgcctgcaggaaacccaggaaaagtaccctcctcagcagaaaagacaagctcagcatcctgccagggagcccgcagcttggaaacggtccagtcctcccagcaatctgacttgcagcgggagggtggtgtgcacacggggctcacttgcacgtgtacatctccgtgcgctcgctgcacgtgttgcacttgacatagcagcaccagtggaacttacagttgcactgccacacgcgggcgtactggtgggtgttgtagccacgcccacagcacatgaggtcacagccgctggcctggggagccgtcttgttgcaggcgcggccctgggtgcccacactgccggtcaccgggtcctcctcgcagtagttgggcgacttctcgatgtacaccaggtccgtgtccatgggcttgcggtacgacagtggcttcttgatcttcaggaaggtgggccgcttgttgcggctggcacgcacaggctccacgtgaacggcctcgttgtacttgtccttgagcacgtagcccagctcccgaaactgtggcagtgtggtccagcacgtcttggtggtgcacgagcctgacacgccgtggcacttacattccagcttcatgttctcctccaggatctttcggcctgcctcgttgttgtgcaagttcatgagagtccgggcattctgcttgatctcccgggcatccacaaagaccttggcgaagccgatgccgtagcggatgtcggcagagcagccaccccacttccagccctcgtccc

SEQ ID NO: 468008 - DNA, 1000 bp, Homo Sapiens
tgcctggaaactggagagctccctctgccagccccagggtctgccgagttcacttgacgaggccgggaactgcaggggcgggctggggctcactcagcatttatttcatacagctgcttaaaaagctagttttaaaatagagatcattatatatatacatatatatttatatatataaaatatataaagaggaattgagaagtgccaccccaaagaaaaagctatgttttataaatatttctgtagcttccacatcccaaaggaagaaaaagcaaaaaacaaaagaaaacatttacaacccaagctagtgattccatgtggtgggcccagcaggctcagaccccagggtgggccagggggtcccgcagaacattctgaagaaggcgggcagaccccttcccggaggctggtctctgtggccctgaaaggtcaagtctgtatcagtctcaccgatcccaagccccgctccttacaccagcctgtgggcactccagagcctcaggctgccaagttatttttaatcttgtcggtttcctttgatgtcctgccctccttccagggtggccagaccttctgttcctggtggcttccaagtgaaggcaaagcacaagccgcctcccatgcctggcatctggaattcacaagcagagctccatggagtgtctccaggcccctggccccagttgctgagggtccttgagcagagtcctcgctcctgcgtggggcggagggcagggcctcacttgcagacatagcgctccacggtacgctcacacctgcggcaggtgacgtagcagcaccagtggtacttacagtggcaccgctcgaccacgcggtctgtgtaggggttgtagccacgcccgcagcacataaggtcgcagctgtcgcttccgttggatgtcttgttgcactgcctgtcttgtgtcccgtgggagcccaccttctcattcttcatgcagaagtcaggtgagctctgcagatagacgagttccgagtcctt

SEQ ID NO: 468009 - DNA, 1000 bp, Homo Sapiens; identical to SEQ ID NO: 337924

SEQ ID NO: 468010 - DNA, 1000 bp, Homo Sapiens
ttctaaattgacagtttattttctaagaatcaatatattttcttcctttgaaataaatacaaaccagtttgaaaggtgggggaatctatgggaaagagaagggaaatggggacagcccccagtcttttttttttttttttttagtaccaaatgactctggcgcgacccggaaacgcagttacaaatgagaataatttaaattctccgataattacagtatttacaacagcaggggagggagtcacctagtgcccctcttccaggctggacagatgcccactcacctcacgaccggtaggggccccaggcctctaggcagttatggattctcctggcatgagcaggtagaggtggtgggatggcctgttttacgcagtgtcctaactttggcccaccaccccgccctacaatgctgtgaggtctctggagctttttctgacctgtgggccctccctctccttgcgctgaactgccattggcccttggagtgttctgtacagtccagctgcacttagggcaggagggacctcccccacccagcttcccctgagactggccccaagaccagaaatgagtcagtgcagaggccggtgccactccaggacagtgagcaaaggggaggagagaagtcacagggcactataggttgggctgtgttgagcagtatcaatcactatcgctggtctcactgctctgctcgccttgcaccttgctgcggtgctgcagagccctgtggtaggcgatctgtactgacttgcggatgttggacttgcggccctccagcatcttctccttgtctaggtcctggttcacacccagaggaaccagcttggtcctgggcagccactgccaggttcgtttgttgtcaaagaagaggacgaggtagagatgctctcgggcttcctgggtcatctgctccccaagtttcagcacctccagtgggggcacagggatgggaaccccatggtggaacataccttctcggggcatctttggatca

SEQ ID NO: 468011 - DNA, 1000 bp, Homo Sapiens; identical to SEQ ID NO: 337925

SEQ ID NO: 468012 - DNA, 1000 bp, Homo Sapiens; identical to SEQ ID NO: 337927

SEQ ID NO: 468013 - DNA, 1000 bp, Homo Sapiens
gccagaaaaatccgacttttatttcttaaatactgtgaaggaagaggggggaaacggtcccctgatgaggaagggccatagagcaaagagctaaggatcatcagcaaaggcccgctgggcattggggaagcgctggggactgtagttggggtcttcctgcagtcgtttttgtatatcagaccggagctgctgcctgtagctctcctgaacctctggtgcctccaggtcccggctcaggctctcggggctcgtcaggggccgagctccggctgccttagctgcccggctcacagcctctgagagaagcagctgggggccctcaccctgcatcgtcttgcgtctcttggcaggcataccactgaggtaggcatcactcagagggggctgcggtttcaccttccgctggctctgaatgtcctgctggataatagggacccattctggggggactgcagctgcccaaggttctgtctcagctgaagctccatcctgttcatcccgggagcccccctcaggagcaggaggtggacctcgggacatggcctcttctgctgttgttccaggggctggggaagcattctcccgctgaggctcaggggaagctctttctgctccctgaacttccattggctcctcaggaagtggctgggggggatcaccaaccctgcgaacgtatctgagaatggcatcagggcctacaggcatgtgctccagtaccacctgaagcctcagtcccatcatagtggtcagccagctcaccaaggagggattcaccccacgagacatacgacgaattcggccattgataacagcagcaagctccatctgctgtccccccaagcagtgcaggtttagggccaggcattcaaacaggccttggttacacaactccagcaaccgggccccaaatccactatctgtgcaatgcagcacatgcgcagcaatgctattaaactgctcttggagaaattccaggtttgtccggatgatgtccacacct

SEQ ID NO: 468014 - DNA, 1000 bp, Homo Sapiens; identical to SEQ ID NO: 337928

SEQ ID NO: 468015 - DNA, 1000 bp, Homo Sapiens; identical to SEQ ID NO: 335811

SEQ ID NO: 468016 - DNA, 1000 bp, Homo Sapiens
ttttttttttttttttaatacaaattgttaatgaaaataagctttattacatcaagtaataaatacatacaaagatgcaaacagttttagtcattttcttccagatgtttttatcaacttacaataaacgcagaactgagatctacttacagtcttagtatgaaagtgttcgggggtccttgttaggtttggtgggttgctctttcttctgtatttataacttgtgcatttttaaaaattgactttgaagcactaatagtcatgcaaatgcttaagcaaaaaagaagttacattaagcagaacctacattgtatggcaaatgggaaccggctactaagtaaagcgtgctgtcaatatgcgttcaaaacaaaatccctacagtggtattagcttatgaaaaggaacaaagaacaccatgggtaacaaatgtatacaaaagagaagattaaagggagacaatggtgtcttggaggcaaactacagtttgctgtaagataactttccgtgcatcttttaaatcaatgcttaaaaaacaaaaaaaacctgggcagttcctaactacttaaaatgcaaatcctaattaactgcaaaatcttttctcaatctttgagactgtaggttcagagccaagtgaaccatgggaggaaaaacgaaactgtaaccattttgaaaacaagggtttcatctgaacaggggagatgaactgtaacttctcatcttgtaaaaagatggaaatccttcaaaaccaacaaggcagctaggatctggcattccgttccgtttctgccaagcactcccgaaccagtcctctagcgtgaatgatgccgcgcttcagcctctccatggcactcttgctccctgcgtacgtgggtctgatctccttccccagctcttcaatgatggccagcagctccgcgtatttgctttggggcacctggctgttcccagttccctgggtgtagcctagggacggtggcccgtagtcactgagcagctggcg

SEQ ID NO: 468017 - DNA, 1000 bp, Homo Sapiens; identical to SEQ ID NO: 337929

SEQ ID NO: 468018 - DNA, 1000 bp, Homo Sapiens
ttttttttttttttttttttttttttttttttttttttttttagagagaagacattttattgagcctgctacataaatagctacagaaatctgggaggactgaagggagtggctgccatctctctctgcacagatcactaaggaatccatggggagggcattaggggagggcttggtcctccagagggagagaggacaccctgaatgctatctggcatgaggaggatgatgagagagagagagaaagatgagagagactgacagcctaggtgtcatggggaggtatagatgggagccaaacaggtcacagcatttggaagtcactgggtcagagcctgtatcacatcctttaccagcatggtgccaatcaccattttctcgctgttgacagtcagctgggcagctccagctggccgggcatccagggtcagcagaacgaggcttccaccagtcagtgtcctccctgcaaacctgtactcatcagatgtcccacaaggaacacgacccaggttggcagtggcagtcactttctgcaccacaatgtggtcactccgacaggtgtctggcagcatgagtttctctgtgatctcattcatgcccatcagctttccctgttccttcttaaactcattttcactcatgaacacaggggccatcagctccccaacaggtggctgaatggagacgtagaactgtcgggtctgggtgcacagctggaagttggctgcctgggttgagtcacagaaattaatgcccattacagcagtggcagattctccaggtgccagggactcaatttcgggaaattcttggatgctgatgccagcaggcagtttgggagtgcccacatgcaggcccttgatgggggtatcagagctgttggagaagtggatgtgcacggacaccatgtggggatccccggagaaaggttggcggctgaaggtgtagtccacagccagcccctcgccagctacccggtgcagcagctcctgccgcccaa

SEQ ID NO: 468019 - DNA, 1000 bp, Homo Sapiens; identical to SEQ ID NO: 337930

SEQ ID NO: 468020 - DNA, 1000 bp, Homo Sapiens; identical to SEQ ID NO: 337931

SEQ ID NO: 468021 - DNA, 1000 bp, Homo Sapiens; identical to SEQ ID NO: 158406

SEQ ID NO: 468022 - DNA, 1000 bp, Homo Sapiens; identical to SEQ ID NO: 158407

SEQ ID NO: 468023 - DNA, 1000 bp, Homo Sapiens; identical to SEQ ID NO: 158408

SEQ ID NO: 468024 - DNA, 1000 bp, Homo Sapiens; identical to SEQ ID NO: 337935

SEQ ID NO: 468025 - DNA, 1000 bp, Homo Sapiens; identical to SEQ ID NO: 337936

SEQ ID NO: 468026 - DNA, 1000 bp, Homo Sapiens
ttttgaaaaatataaaattttaataaaggctacatctcttaattacaataattattgtaccaagtaattttccttaaatgaactctttataatgcataatttacagtataagtagaacaaaatgtcatgacaaaagtcattgagtacaagacttgtaataaaaaggcataaaatatatttatacataaacccctttcaaaaaacaagggaaagcttgagccctcaatatagggcgacacacggagcgggtgaccgtgcaggtacaggtactgtactgatttaaagtcaagcactagagatagtggattaatactcttttgccgtacactatatacagatgtatagtacaagtaacaatggcaaacagaatgtacagattaacttaacacaaaaacccgaacatcaaaatgaaggtgtgtggaggaaaggtgctgctgggtctccctacaactgttcatttctttgtggggcagggggtagttcctgaatggctgtggtccaatgactaatgtaaaacaaaaacagaaacaaaaaaaacaaggaactgtcatttccacgaaagcacagcggcagtgattctagcaggcctcagggccctgggcctggggaggctacatgagggggagcctcagtcacaggatcaacctggggcccgaaggagcagggttccctgcctctccctctgcaacagatcatcccatccaacacaacccccaaaatgttgatgatgacgcaacatggtcaaccctcaagacctttaagacaaaacagagcagcataggaaaaaaaaaaacaaaacgcaccaatttctgcatgtgtcaatggtagggcaccattttaaaaagtctgtctaaaacagtctgtcttcacttggagggacgtagtgcaaagcataattcctctgttagtgaagaaaccatgaacgcactcctagctcaactcctaagtttagtcagaacaattaaaacttcctgtctcccccttccaagtttaaagcagc

SEQ ID NO: 468027 - DNA, 1000 bp, Homo Sapiens; identical to SEQ ID NO: 337939

SEQ ID NO: 468028 - DNA, 1000 bp, Homo Sapiens
ttttttttttgacttttgaactttttattttagtaaaatcagaataaacagagcacatgcggtgccagcatctaaaactaatacaataagcaattactgaacttttacagtgactcgaggttcaatgattacattcagcaattccattctttatttactgaagaatactgctggctggtaaaaccgaatgttaagtcactgacagaaataaccatgtttgaggactgtaaatataccagacaatcactgaaaatcaaacacagcaaaacacataacaaaactcaagagaaactttgtggatgtggaccttcctatcagtgttcaaaattgtttcattaatatcttaagacaagtatatcaaaaccttggcatgttttagtttcaagttgacaattttgtcttaaattttgtcagaaaattacagctacattgccaatgccgggtctgcttaatttgactcaagtttaacagacttaacattaaaagctcacactaccccaaaatatattatttcacatacggtgacattcaacattcaagtgccagtgttttttgtactgtcttttggtcaagtttctttaaactttcaaagaatcatttttaggcttacaaaaataaatatttgtcaaaatgttcaataaatattacacaactagcagcaaaaagtatctaaaatctgttgtgtgcaaatagttttcttctcaactaccattccatggtccccaataaaatttaggaatctacttcttcactggctgcattcaacaatctccaagagacgaaataagattggaaggtcgaggacacccacacaagacatatatatataaaattctctgaatgtgcaacaaaatactttgtaaaaagttatgggagaaatgtacaagagtctaaacctacactaattgaaatagcaccttaacaaatgacctcaatactgtcaagtgccctacttaaaattttagaacaaggcacaataacttgaaaatctattgcactt

SEQ ID NO: 468029 - DNA, 1000 bp, Homo Sapiens; identical to SEQ ID NO: 158412

SEQ ID NO: 468030 - DNA, 1000 bp, Homo Sapiens; identical to SEQ ID NO: 337941

SEQ ID NO: 468031 - DNA, 1000 bp, Homo Sapiens; identical to SEQ ID NO: 337942

SEQ ID NO: 468032 - DNA, 1000 bp, Homo Sapiens; identical to SEQ ID NO: 337943

SEQ ID NO: 468033 - DNA, 1000 bp, Homo Sapiens; identical to SEQ ID NO: 158413

SEQ ID NO: 468034 - DNA, 1000 bp, Homo Sapiens; identical to SEQ ID NO: 337945

SEQ ID NO: 468035 - DNA, 1000 bp, Homo Sapiens; identical to SEQ ID NO: 158414

SEQ ID NO: 468036 - DNA, 1000 bp, Homo Sapiens; identical to SEQ ID NO: 337947

SEQ ID NO: 468037 - DNA, 1000 bp, Homo Sapiens; identical to SEQ ID NO: 158415

SEQ ID NO: 468038 - DNA, 1000 bp, Homo Sapiens; identical to SEQ ID NO: 158416

SEQ ID NO: 468039 - DNA, 1000 bp, Homo Sapiens
ttttttttttttttttttgattccatttgttttatccagaagaaaaacattcaaagtaaaatgtgaacatttaattacctttaaatcatatatgaaataatttacatgctatacacttccaaacacactgaacataaattcaactttataagacatatacacagtctgcttttgccaacatataccctgtaggtcacttaagatgtaactgatttctcagtccacctgtgagcatataaacacacaaatatatgtctgaagttgaagattaagataataaaccagagttgaatacaagaagtcagccacagaagattctaaaaccacaatcagtgactggaacaccaaggcacaaaaacttccctttgtagtcacagagattaagtttccattcccagtgcttaaatatggaagcaggattggttaatcacatactatattttatagtgcatttctgttgctgtttaaaaaggaatattttttaaattacataatgtattacagaaaagcattggaaaaataaacaggataagataagctctcatacaataaagttttttttggtctgaaaaagatgtttatattcaaaactaatataatagaggtgtaacagaaagtagcatgaggaacactatgcaaattgcctaatactcgaattgtacttcatgccaccatgttatttaaattttcaattttaaagccagttgggtgatattgctaattccaagtgatagttttggggtttttatgttttgtttcttgttttttggtaatttaaagatatgtactagtacacagaataaacagtaaatataacatggcaaaatgaaatctttcccagagtttatgttgcttttgttaaacagtaactttgtactagaatctctttttttttctatatttaacaagaagaaaaataatgctccacatagaaatgacttcaaaattcatgcaaccatgcacaacctaaactatctgtacttcccttttttatttaccc

SEQ ID NO: 468040 - DNA, 1000 bp, Homo Sapiens; identical to SEQ ID NO: 158417

SEQ ID NO: 468041 - DNA, 1000 bp, Homo Sapiens; identical to SEQ ID NO: 337951

SEQ ID NO: 468042 - DNA, 1000 bp, Homo Sapiens
ataaacaaaactttttattacagtgcacttattgtagttgaaaacatgcagcaccatttgaaacaaagaagattcagaaacatggaaataagttttgtatctaaacataaatggatggtaaaaattaaagttttcattttttaaggaaaagcatattcattcttgtcaaacatttacagtaatccgggttaaaaagctatagttttcatgattctgttaagtctattcttcaaagtatgctatgtgaggttgacctagagaacacttgaccacatctacttctccacctccattctttgcccgttgaaagtgaatgttaattaaatcctccacaatttcttcatccatttgaatgccttccattcctgtcagaagcactgtcctcttagatgttcctgaaaatatctgatactttttcaagtgtatttctgtgtatggagaaacagtaactctatggcaggtttgatttatataaagagggtattctttctttttcaaaatcttgtcagccactccaatctccacaaacgtgatgactgcactcccggactgtctgtcatagtccacgcggtccacctctccgcctccatttcggaactttgaaaagctcagctctagtttgtctctcatttgatcttcacgcagtgtgtcaggaatttcagtaacattgattttcattttagaaacttctacataaacctggaatctgactcctgaatttaatggaactggcttggccgtaacctccagatttacatcttttatctgtacatgatgtttactcatgcttaccacattttgagcaacttcttctttttcaaaggtgataagtgcttgtcctttttgtatctcataaggaactttcgagctcacttgaaacgaacaggagatatttgacaactggctgtcattctcaggagtttcaactgataagaatttcatctttgtttcaggaatatcctctttaatctggaattctttggtagcctcttgtaactcc

SEQ ID NO: 468043 - DNA, 1000 bp, Homo Sapiens
ttttcctttttataagattttttttctttgtttttgtttaatatgaaaattacttgaaaagacaagggccaaccccgccaggcagctcggccggccgcggccgcacgatcctaacattccaggtgtaagttacagagctcaagttcatctacaaaaaaagtaataaaaataaaatttaaaatggcaccttcaacagaacacaacaaaaccttagggcccggcctccgggcaaaaggccccgcagcacaggggcacggggtggcccctcatctccgctccagccaaaaagtaaacacaaagctaaaaacgacaactcctcggcattctcggaataagttagccgcgcttcttcctctcctcccccagtgtccgccaaggagcgcgtttctcttcaggtgagggcgggaggtggggcactaccaaactgaggggcgggcggcgggctggctgggaaggggccgtgtgggcgggcgaggggcggggggcggccgcaggtgggggcggcccctagtcctcgatgacgatgggctcgtcgttgacgggcgcaggtggcggtggccgcggcggcagggcctggctctggcgcagggcgatgggcttgtagggccggcgggcagcacgcttggtttccgaggatgagagcagcttgcggatcttcctggtctcctctttgggcatgtagaacacgtcacccggggcgtcgatccagttcatccgccgccgcttgactgggggcagggagcccccccggatcaggcgcactttggtggggtaggacttcccgttgagcaggaggttccggcttggtcccatgtgcctggtctgtccgtggtttgccagacccctactgggcatcaagaggcgcttcttcatgttgccgtccaccccgttgtgctgctcgtagctgcgcttgcccaggatggtgggggagccgttgttgatgacgggggccaccttggcgggcgtcaggctgctgagcacgctggacacgcttttcacg

SEQ ID NO: 468044 - DNA, 1000 bp, Homo Sapiens; identical to SEQ ID NO: 337952

SEQ ID NO: 468045 - DNA, 1000 bp, Homo Sapiens
tttttttttttttttttttttttttgccttagagagggcagttttattgtctcagaggggcagggctgagggagggagctgaggagcaacatccccccaggccccaaggacacacacactctgtccttcccatgggccatggctctgggagcgacccacagaagggagaggaggctcaaactgcccccaggccccagggttctcaggtcagggagttagggaggaacatgaaagtgacatgcttcttagatacatcagcggctgtaaccacagggctgagggggcctccttgctctggagggggtcttcgtccatccttggtgggggggggtgcccagccccttttcaggcctaagaacagtctctaagagggtcaggagaactgggcagccgctaggacagcgtactacaccccggacaggcaggtgagccacaggcttgtcacagaccacatacacacacacgcacacacacgcgcacacacacacacacacacacaaagagtgcaattgagagccttgggccaggacgctagaagatagggatgtagttgtcgattttggcgcggtggcgctgggcgatacattcagcgatccacacgatgttgcgacactcctgctccttgagcttcacgaaggcatagaagacaccaaagtggaactggttcaggaaggccaacttgttcagctttacctcgtgctcaaagaatcggtcctccagcgtcttgtctccagggttgctacctgcaccctcgaagagcagcttgtactccgggtagtaatcggccacgttcttgacctgttcatagtcgtcagcccgagccagctgcgccaggccctcagggtagagccgcccacagtgtggaaagagcttggcacggtcctctttggacagctctgtgccgaaagaattgatggtgatgatgaaggcgcggcggtctgcttcaaactccaggatggggcacatggcatcagccgtagtcccgcccagtagggtgcag

SEQ ID NO: 468046 - DNA, 1000 bp, Homo Sapiens; identical to SEQ ID NO: 337953

SEQ ID NO: 468047 - DNA, 1000 bp, Homo Sapiens; identical to SEQ ID NO: 337954

SEQ ID NO: 468048 - DNA, 1000 bp, Homo Sapiens
agcaatacatgtttatcatagaaatttaagaacctaagtaatacaaagaaagtaaggattacctttaattgagaacctaagtaatacaaagaaagtaaggattacctttaatcaataaacaaagataaacttttggagggagcatataccattccagtcactaagtaaggttttaatattcagattccagaattctgatcaatcaatggctatgtttcacacttctttaaattaaaaaattttctatctttacatattttagtgactgaattaccatggcgtaattgagagtttggatttattatggtacattccgatttctatttaatacataaggtacctgattaaaattttagcctatttggttaaatactaacaatacaggttgctattactcttgtcttactaccaattagacatttctcagaatgctaaagcaagaaggaaccttaaaaacttatctggccgcgcccagtggctcatgcctgtaatcccagcactttggaggacaaggcgggcggatcacgaggtcaggagatggagaccatcctggctaacatggtgaaaccccgcctctactaaaaatacaaaaaattagctgggtgtggtggcgtgtgcctgtagtcccagctacttgggaggctgaggcaggagaatcccttgaacccaggaggcggagattacagtgagccgagattgcgccactgcactccagcctgggcgaaagagcgagactccgtctcaaaaaaaaaaaaaaaaaaattgttttccttctcatgttacaaatgtagatgcgatgtgtttctttcaagcttttgtttccaatgacattagtttaggttttcttttgtttagctctcacttgattgcagtcttctttctttcaggtcagactgtttttccatctttcggccaatggtacaaaaaaaaaggaaactgaagagaggagatagcatatgccagagaagtagaaagagccattgtatgtctgggtataatc

SEQ ID NO: 468049 - DNA, 1000 bp, Homo Sapiens
tttttttttttttttttttttttacttcaacataaagtaccctttaatacacgaagtacatcctttaaacagccaagagaaaggaggttgtacaatagagacgtcatgtttgctttctaaacatttgtttgactcctgacacaatggttttgctttggggtaacatgaaggttgccaaacttcaaagtaaaaaaaaagatattttctgacaaagcaaatgttcagttcagagttgcctgatgctgtcagcattccaagcaaactcaataggaagaggtgaagtcttcttcactgtataaccatcggcgtggctgcggtctactgcttcacatcccattctccagggaaaggaaaagtgctcgctatgatgcattgtttaaccaatgagtggtgagatgtgcctctttacctgagggcttccagactatagttcagccaccttgctctctgggtcatatgtagtcctgaagcatgtaccatgttatggaaagccaagtttcaagaattaaaaatgcagagtcagtcacaatcctgggtgctgtgaggaaggctataaggcattcgaacaaattttttttttttttgagacagggtcttgctctgtcacacaggctagagtgcaatggcgcaatctcggctcactgcaacctctgcctcccaggcttaagcaatccctcccacctcagcctcccaagtagccggaatcacaggcagaagccaccgcgaccagctaattttagtatttttttgcagagacggcatttgccatgttgcccaggctcgtcttgaactcctgagctcaagcgatctacccacctcggcctcccaaagtgctaggattacaggcgtgagccaccacgcccggccaaacaaaagattaataaaaacaatgtctacacagttcgtggcagggcgtaaaaaggtaataaattttcaaccgtgagaggggttccccatcacctagggattgggctgccttcctggagtgggggctgacatg

SEQ ID NO: 468050 - DNA, 1000 bp, Homo Sapiens; identical to SEQ ID NO: 337955

SEQ ID NO: 468051 - DNA, 1000 bp, Homo Sapiens
ctcacaatgcaggcgctccagctctgacacgtgcacttctttattggaaaagaataaagcagtcactgatgtggcaggggcaggacacgagcagctgccgtcctcctcccagcgtgcctggcatggtcgcaggggagcgggtgcctggagtcccggtgacaccacggggcacactgagggagctgaggagccggggccgcgcagcctcctggatgctcagcggatcgtgtacttgtcccacttcttttcagggtcgtagggttcccagcggctggcgggaaagatgtgcttgttcttctcgtaccagctcctcagcaccaccttgcctgcatgggactcatccttctccacagtggcgtcactgagcaaccgcacatcgtcatgaacatcaaagttgaagagtggtccactcttcccccgtgccttggtgacgatgaagtcgtagaagctgtgatggtgagggatgatcaagtcctccttgatgtacatgagctgctccacccctgcggacctcagctcactgaagtctttccgaaggatctcgagcgccttctgcaggaactgctgcatggtgttgccctttctcatcttgactgtccgccggtgcccagagccatcccagtagctgaaggtgatctcgatctcctcactcttgatcttctcctgcttggcttcccactcctgccgcagctcttcccgaagccgattctcctcctcctcacggtctcgatcaggcaagaagcttgtgtcaacgtctgggttcttccccagttttctcttcttcgtggtgatctcttccctttccatctcctcctcatacatggccgcctcctcttcctcctcgcctccctcttcttcctcctccagggtgaaggacaggctggagatcttccgcttggcttccttcttacgctccttctctcgaagcttctccagcttcatctgcagctccttggactgctccttcttggccagctgcttctcccgctccttcaccaga

SEQ ID NO: 468052 - DNA, 1000 bp, Homo Sapiens; identical to SEQ ID NO: 158418

SEQ ID NO: 468053 - DNA, 1000 bp, Homo Sapiens; identical to SEQ ID NO: 337957

SEQ ID NO: 468054 - DNA, 1000 bp, Homo Sapiens; identical to SEQ ID NO: 158419

SEQ ID NO: 468055 - DNA, 1000 bp, Homo Sapiens; identical to SEQ ID NO: 158420

SEQ ID NO: 468056 - DNA, 599 bp, Homo Sapiens; identical to SEQ ID NO: 337961

SEQ ID NO: 468057 - DNA, 1000 bp, Homo Sapiens; identical to SEQ ID NO: 337962

SEQ ID NO: 468058 - DNA, 1000 bp, Homo Sapiens
cacagttactattttaagatgttgatgaaaggcttgtgcggaatgcgaccccagacagagggaagggggccagccaggcaggctggagggggcggattgccactgccttgttcaaactacaagttccataaagccagcccctaagggtgtacccagagtggagtcttcctccaacccctaggctgtggctcaaccaatgactggagactgaatgagaaaacatttattccgtctccaaacagcatcccaggccgggcatctcccccacgattttataatacactcggcacagacagagtctgggagccatggggcacccctgccctccccaggcttcctaagtaacaactgcagaatatttacataaagctgggtgttgtcaggcaaagcccttccctgctgccaggggtgggagcaaggaggaagtgccatgagcaccagccccgccctcacaccacgggaggcagcccagaggccaccggcacagggtggtggcccccagatcatacagcagtgggcacaggggaagcaaacctgagtgaggacacaagagcctggtccggctccgctgcacagggcaggtgtgatggcccccacgagtctttggcagagaacgcagataatagcggctcccacggcctgacccgggccggggggaagctgaggcacttgtcagtagcacatgggcacctgctggcttctagccactgcaggcggggctgaggtcattaaaagcgaggaaaaacactagctaaaaaccctttcctaaaagtgccctggaggagtgagcggctgactgaagccctctgggcacaggcacttggggtgtggctctgccagcccccgccaggctatgaggctccttagctgtgtgtcagctgcacaggatggaacaggtgaaagagaggggctggcagttccaggaggctcatgggaaagtccagggcagaggggagggccctctctgtcccccttcccacgctaaccgccgctcagtaca

SEQ ID NO: 468059 - DNA, 1000 bp, Homo Sapiens; identical to SEQ ID NO: 158421

SEQ ID NO: 468060 - DNA, 1000 bp, Homo Sapiens; identical to SEQ ID NO: 158422

SEQ ID NO: 468061 - DNA, 1000 bp, Homo Sapiens; identical to SEQ ID NO: 158423

SEQ ID NO: 468062 - DNA, 1000 bp, Homo Sapiens; identical to SEQ ID NO: 337965

SEQ ID NO: 468063 - DNA, 1000 bp, Homo Sapiens; identical to SEQ ID NO: 337966

SEQ ID NO: 468064 - DNA, 1000 bp, Homo Sapiens; identical to SEQ ID NO: 337967

SEQ ID NO: 468065 - DNA, 1000 bp, Homo Sapiens
tttttttttttttttttttttttttttttttttcattcatgtatttattccacagtcaaaataaatcaaaatttaaagctataacatttttaaaagataaaggagaatttgtggcacagctgcattaacaaaacagacaccagtctaaagtgcaacactaaacaggtattctctgttcccacggtggaataattacacataagatttcactaaagataggagatgaggcaaataaccctttgaaattacctgcccaacaaatagaggcaggctacattaatttaacattttactgcaaaatggaaaaaatccccgaggtgactaactcaaactcctcatttcatgcacatgaccttggcttctgtgttctttccatagccacatccaaatccagaaaggctcctgcaccccatgctcaaaaatgcaacctcaagtccctgaggtcctcagcacagactgacattaacaagcctgtgttcagccttcatccagaacctccagggaaatcaggagcacaaacacagagcaaagcaccatttctttaaacaatggctttaactgtcgaatgagctctgacaagccatatgcatttcataaacaaaccaaaacatcatcttcatatcttcctatttttcttgcaaaaatgttaagccatccaagtaaaaaaaaaaattttaatttaacaatgaaaaaggaacttcaaagggtttatgccaaaaaacaaaccagtcctctgcagcctaactcatttgtttttgggctgcgaagccatgtagagggcgatcaggcagtagatggtccctcccacagtcagcgccatggtggtccggtaaagcatttggtcaggcaggcctcgtttcaggtagacgggcacaccatcagctttctggaaaaacttttgtagctctggaactttgtttttcccagcataatcatacactgtggaatcggaggtcagtttagttggtgtggcaaatatgataggtggtgcttctgtgga

SEQ ID NO: 468066 - DNA, 1000 bp, Homo Sapiens; identical to SEQ ID NO: 337968

SEQ ID NO: 468067 - DNA, 1000 bp, Homo Sapiens; identical to SEQ ID NO: 337970

SEQ ID NO: 468068 - DNA, 1000 bp, Homo Sapiens
gcatgctcgctaagcggaaggaagttgtagattgcttccttcatgtcactttctttttagatattgtacagccagtttctcagaataaaagtttggtttgtaagttctgatccactgcagtccttcctgcatcagataccacagaaaggctgggcccattgccccctcctggtcttgggactgaggactcttcctgcccagattcagagtccgaaggccaggaggctggaaaagaaacgactgtcctcccgtgggacaaactgccaccttggccgtcgtgtcctcgtttggggagcctcagatccgaatgacataggcgtcgctgtggcttaggtgtcgcacccacttgtgggggttggcattgccgcatggcctgaaggccagcctgaggaatcggacctggaggccagagcacgtgtgccggggaagctcgaaggagagactggcagggcccagccccagaggagaggccgaggtggagagcccatggctgggaggtcctgggggccctgggacgtccatctggaaaaggcctgagagttgagagcctccttgcacccgaggcaggtcccagcgaagggctccctctgccagctcagccttctgctctgggctgctcagctcctgagacaggctgaccacccctcgaggcagggggaggtgcagcctgacattgagggcttggctctttgagagcaggtcacatcgcaactttagataaacctggagccggcctgagcctcggtcccactgcacagaggggaagagccggaaggggagcggtgaggggaggtcatcggagagttggtaccgcatcacagtcagctcgccctgaggtggttgcaagcggaggattcgatgagactcaaattcgtccagattcacagagctgtgaaacgagacttcatcgacccggattcctggcccataacctctcagctctgacttccccacacaaaactcttccgtcaagccaatgcgcatctcagagccgctagga

SEQ ID NO: 468069 - DNA, 1000 bp, Homo Sapiens; identical to SEQ ID NO: 158424

SEQ ID NO: 468070 - DNA, 1000 bp, Homo Sapiens; identical to SEQ ID NO: 337972

SEQ ID NO: 468071 - DNA, 1000 bp, Homo Sapiens; identical to SEQ ID NO: 337973

SEQ ID NO: 468072 - DNA, 1000 bp, Homo Sapiens; identical to SEQ ID NO: 337974

SEQ ID NO: 468073 - DNA, 1000 bp, Homo Sapiens; identical to SEQ ID NO: 158425

SEQ ID NO: 468074 - DNA, 1000 bp, Homo Sapiens; identical to SEQ ID NO: 158426

SEQ ID NO: 468075 - DNA, 1000 bp, Homo Sapiens; identical to SEQ ID NO: 158427

SEQ ID NO: 468076 - DNA, 1000 bp, Homo Sapiens; identical to SEQ ID NO: 337976

SEQ ID NO: 468077 - DNA, 1000 bp, Homo Sapiens; identical to SEQ ID NO: 246447

SEQ ID NO: 468078 - DNA, 1000 bp, Homo Sapiens; identical to SEQ ID NO: 158428

SEQ ID NO: 468079 - DNA, 1000 bp, Homo Sapiens; identical to SEQ ID NO: 337979

SEQ ID NO: 468080 - DNA, 1000 bp, Homo Sapiens; identical to SEQ ID NO: 246448

SEQ ID NO: 468081 - DNA, 1000 bp, Homo Sapiens; identical to SEQ ID NO: 158430

SEQ ID NO: 468082 - DNA, 1000 bp, Homo Sapiens
gaattcctttttttttttcaatagtaagtgatttaatataaaatatacaaatttctcagtatgaggactttcacagaaaaggaaggagacaacaatgaaaatgaattttcttaaaaaataacattcccttattttgtccctgctactcaacactcaaaaacaagtctgtacaaaactaggaacacagaaaaggaccagagaggatgttacactgtaaagtcttaggacctactctaaacttctgtcctcatcaagaccctcacctagagacctgagggttcccaggtccactggagaaagtaagtagtctccgatcatcacccttgcttcaccgaagatggcctcaggtcactcgctgtcaaacttaatagaattgacctggacagagattgagcctccccggtagctgccccgcttcttcttggttttctcatgccgaaaggacttgcctttggtgaacttcaaaacctgattggctcgctctccccagtctccggctgcacctcgcttggcatcaaaggagttgtccgcaactcgtgaatccacctcaatttcctcctccctgacccttcggaatggggatgatgcccttttttctcctttcttcctttttggaaatgtgttaggggtctgaagctttatcttcttggcctgaggagtctctgcctccttggcagcctcattctgcttccgcttctttaatgaacctgatttggaaactaccactgccgcctttttcttttcttcttcctcctcctcactgttcttagctgcttttccattctgggcagtcagtgcagaggtgccattggccttgggggcttgtggtcttggagagcccttgcccttgagcttctcttcctcttcctcactggagtcatcagaagaagaactgttgctgctctcagcctttcctttctttgcagaggctggcttggaaggggctgcacctcctgctaccttctgtggcttcttcttaactgcagacttagatgtcttc

SEQ ID NO: 468083 - DNA, 1000 bp, Homo Sapiens
tttgttaacatagggcaaagagagtttatttgtccagtcagacagtctaaggcaacactcaaataaggctgcagagaccgcaatcggaacagtgacatttttagacagccataaggtgactcgagaacccagacaacgaatgcatccttttttgttttgttttgttttgttttttcaaacaactggaacaatgacaggctggcataggagagcattaacaataaacaacaaaagaacaaaatcccttcccacccccaccaaagaccgcggcagttaaattaagtacaaaaaactcattacaaaaatagcctcacagagaagcaggttccaatcaagtcagaaaaatattggaacttaacatattataacccatttgtgactctaatcaatggaattagagagatttagtccaagtgacgcatggagacattacagtagcacaaccctgtggcaggttcaacccttcttggaaaaccatgtatttaaatgatctttatttttagcccaaagaacatttgttagtgttggattttcatcctcagtgcaacagacataggttttgagaaggtacacaggttactgacgatgactctcaaatgaaatatcacatccaacagaagcatagggaagacagaaaagggagacaatgttacacagtttcagtggtatcaatacacctaatggtcagaagttcagtacagtgcacagccacggcatcttaatgttgtcaaaatacttcccctgtggttggccatgtctataggggccttgtctaatacccaccctccccctgtacctcggacccctcgtattttgcacctgtacaaatgtcgaacacctgggaaggctggccctccaaggagctatccttctccttgagctgcatctgaattaaacatctcatcaagtccaaaatgcaactgagaattgtgcagaatgactttcagaaaagagggtgataatagataaatccctaataaaggggaccaacgtatctggg

SEQ ID NO: 468084 - DNA, 1000 bp, Homo Sapiens; identical to SEQ ID NO: 337983

SEQ ID NO: 468085 - DNA, 1000 bp, Homo Sapiens; identical to SEQ ID NO: 465090

SEQ ID NO: 468086 - DNA, 1000 bp, Homo Sapiens; identical to SEQ ID NO: 337985

SEQ ID NO: 468087 - DNA, 1000 bp, Homo Sapiens; identical to SEQ ID NO: 337986

SEQ ID NO: 468088 - DNA, 1000 bp, Homo Sapiens; identical to SEQ ID NO: 158432

SEQ ID NO: 468089 - DNA, 1000 bp, Homo Sapiens; identical to SEQ ID NO: 337988

SEQ ID NO: 468090 - DNA, 1000 bp, Homo Sapiens
tttttttgtttttttttttttttttttttttttttttttatattcttcctttattggctgtccttgtataatacaaatcttcaagtttagatacaaaaaaaatctggaaataaaagatagaaaagtacccgccaggcaccccttccccttcttcccggacccctccccagcgggcaccgacatgaggtaactgcgcatcttctcctcctcctccctccccgcctcctgggcccccaacttggcgctagcccccatgagaccttggcccaaggaagacatgggccccaaagttggagggtgatggaggtgagtacagcattggcagtgaacgcagcgtgtggtcagagggcagcccttagcttgtgctgtgcatggggggaggagacgaccagatttggggtgggcactggtgtggggcccaggagagcccctaagcaagtgtcccccctccatcctgtccaacactggaaggtgggggtcaacagaaactgggaaatggagtgtgaaccaagggcattcagtgggattgtggccaacccctgtgtctggggttggggaagggggcattgccagcctaagtccggcagtgaaatggttcccttagccaggctgggtccgtccctgaattccatcctgttgcaacctgggcgtcacaatgttggttctgtagtggttgtcggggtggttgagggaggggggtgttgagagggtgttgaggggcgcagccccagggagcagggttaggggagaggttgtgcctccacccccaggcgtggggcacctggagatgatggagtgggtggggcggctcggactacagttcaatctcgaatgtcttttgcaggtcaccagaaaaggggttggagggtttctctacagtggctttgccttctaatgccgcccactgggcctcaaaggggtccaactctggagctggggcaggcgctggctcagggggccagggggccccattggggcgagggcgggcctggctcccagg

SEQ ID NO: 468091 - DNA, 1000 bp, Homo Sapiens; identical to SEQ ID NO: 337989

SEQ ID NO: 468092 - DNA, 1000 bp, Homo Sapiens; identical to SEQ ID NO: 158433

SEQ ID NO: 468093 - DNA, 1000 bp, Homo Sapiens; identical to SEQ ID NO: 337991

SEQ ID NO: 468094 - DNA, 1000 bp, Homo Sapiens; identical to SEQ ID NO: 158434

SEQ ID NO: 468095 - DNA, 1000 bp, Homo Sapiens; identical to SEQ ID NO: 158435

SEQ ID NO: 468096 - DNA, 1000 bp, Homo Sapiens; identical to SEQ ID NO: 337993

SEQ ID NO: 468097 - DNA, 1000 bp, Homo Sapiens; identical to SEQ ID NO: 337994

SEQ ID NO: 468098 - DNA, 1000 bp, Homo Sapiens
tgttgtgatgtcttttaagtaaaaattgggaaatttatatttattataacaaatgatggccaaatgatggccacaaaagccattgcttgtaaataattataattcatactgtaatgacatttcctatgaaaagaattacaatatatgtcatggaatccaccactagtcttcctcctggaaataaaaatcaaacggatcaatctgcttcagtatattaggtaagaaaaaataatggtgtctaactgcagagtgcattgtgttgatttggatttcgcataaagttgcccatataaaaacttttctaatgtggattgaaattctgattatacaactatgaaaaaaattggaagtattattattctcagtgaattctaatttgatttgaaggcctttggaagaatccctctcctacattctgctttagtccttaagatccagttagaggctgcttgtagtcatcctcattgcttgagaagactaggcttttctatttagcaaccaatccaggaactagatttcaccacactaaccacatcttccttctctgtgtcatacttgtatgtttttggtcctgaaaagaagtaaatgtagccatttaattctacagcagcatcgatttggccatttactcctgaaaattcttcttcagtattctttggatagtctttttccattttccttttcctttcgtcgtagctgtagtattcatctcccacaaagaaaagggtcttctgtggctccctgaggtagacagcagcatctatttgctgcacgtgccttggaaatccaaagtcataaatagtccgaggaggaccttgcatttggaatcctcttgttatccagtagtggggacctttgaagaagtaagcagtgcccctctcagccacttcgtaagctgcatccacattggacatgagctgggggaaggagctggtaatagtgctgggccgaattcctgtccgcaagtgaacctgccgtctccagaaaatccggtccttga

SEQ ID NO: 468099 - DNA, 1000 bp, Homo Sapiens; identical to SEQ ID NO: 158437

SEQ ID NO: 468100 - DNA, 1000 bp, Homo Sapiens; identical to SEQ ID NO: 158438

SEQ ID NO: 468101 - DNA, 1000 bp, Homo Sapiens; identical to SEQ ID NO: 337997

SEQ ID NO: 468102 - DNA, 1000 bp, Homo Sapiens; identical to SEQ ID NO: 337998

SEQ ID NO: 468103 - DNA, 1000 bp, Homo Sapiens; identical to SEQ ID NO: 158439

SEQ ID NO: 468104 - DNA, 1000 bp, Homo Sapiens; identical to SEQ ID NO: 338000

SEQ ID NO: 468105 - DNA, 1000 bp, Homo Sapiens; identical to SEQ ID NO: 338001

SEQ ID NO: 468106 - DNA, 1000 bp, Homo Sapiens; identical to SEQ ID NO: 158440

SEQ ID NO: 468107 - DNA, 1000 bp, Homo Sapiens
ttttttttttttttctaatcatccacgtgccagcacatggaagaaactgttcttttttctcatttgaagaggtatatttttcaactgccttttggtagcttctggaagctttggaaaaggtgtgttctacatggacgatgaagtctcaagttttctctcagtgctatcttactttctgcagctcctgtctcagccaggatggcagaggctgacccagtttgtgcagcagctttgagagttccacgttgtgatctcgatagtagcttgacagaaatgtcctgctatcagaatccattggagggtattttcttcctttgctctttccaaggcattttgttttaccttcttccagtaactgacaccagaaacctttatgagaatcaaacgttaaagcttctgagtaattataatgaggcaagactcctagaaacttctgtacttcatccatcactgtagcaggatcagttcttagttgttgcccatcaataattagcaactgaaatggggggaaataaacaagccatctctcgatgtggctggcataccaccccgggaccaaacatctcttctgcaaggctctgagctccgagggtgcacggggccctgctgagatcacttcgtagaagctaaacttcagagctgcagggtcttcatgtgatcgctgatgctggtaccaggagtatgctcggtctgaagggtcaatgagaatggtgataatcttggctttgggaaccagagaagcagctcttttaggggcttcctctgagtggaagtaattggcactcttctcaaacaaaaagtcggtagtgacattagatgggactgggaagaaatccatataccaatcaatccccctgtggtagttatttctattaaagaactgtacctcctcaaaggtttttgggctgggggagttactaaggatggaaggatgcataaccaggaacaaatacaaagcagtggtaccagttttctggggtcctattaccaagaattttgg

SEQ ID NO: 468108 - DNA, 1000 bp, Homo Sapiens; identical to SEQ ID NO: 158441

SEQ ID NO: 468109 - DNA, 1000 bp, Homo Sapiens; identical to SEQ ID NO: 158442

SEQ ID NO: 468110 - DNA, 1000 bp, Homo Sapiens; identical to SEQ ID NO: 338003

SEQ ID NO: 468111 - DNA, 1000 bp, Homo Sapiens
ctttttaggactattcaaagtaacaaactttttttgttgttttttttgttttttacatttttgctctggtcataaatatacagagaaaaagagggagagaaaaatgaacaagtcatccaaagtatggagataaaacagtattcctaaggcacgtggcagtctttgaaaatacagaagctctagccaacttaaattatttgttgtttttcctcgctcagtccacaaaactgtacagtgacacaaatgttgtgttgcaggtagatcttccaagttgttcctcggtccacaccgctgcattagccgggcgcacacttcttttttttacctctgtttccaggcgagatcctaaaatgtggttagttagttgctcaaagcctctattttaaaatacacttggaattcaactaaagataatttcttttttaaagaaattgtggggtgaggggttgcgagtcattagaaaaggttggtaagagtcgtttgtgaggggctgtgaggctcatggccctccaggttgccaggcacagaagttaagacggacgtcacagttggcagggtggggctagtcaagtctgtcagggtggtgggcgtgctggaggggctgagcgaggcgttggagagctccgaggccgggcccgatggcgtccctgtctgcagcgccgcgtctgtcgacttgtccacgcccgtgttttcctgccgtaagaggttgcgcctgaacttggctcgggcgttctggaaccagacctggaggacccgcttggtgaggcccgtcttttgcgcgagctgcttcaagtccttggcgtcggggttgtggttaatggcaaagtaagacttcatggtccgaagctggtggtgcttgaaggacgtgcgcatgcgcttggtcttctggctgctcgggtatggctggtcacggtccaggtgctctgcgtcgttttcgttgcagcttagcgcagcgttgtaggccgccagatccgcaccggggcccgggctcttacgtttc

SEQ ID NO: 468112 - DNA, 1000 bp, Homo Sapiens; identical to SEQ ID NO: 338004

SEQ ID NO: 468113 - DNA, 1000 bp, Homo Sapiens; identical to SEQ ID NO: 158443

SEQ ID NO: 468114 - DNA, 1000 bp, Homo Sapiens
tactgcaaatgactttaatcattaaatagcttctatgccacactctgattaagccgactgaggtccctgggatctgggtcactggaccgagctgctcgctcggtggctccactgccaggtccgggcgcgctccccacagcgctcagttctggcccagacagggcctgacatccgccgcctgcagtcccggggtggccgtcaccgttccacggccagcgcctctgcctgctcgtccgggaaggcgatgtcgaagatctcccggtagtgttccacgaagtgcacctccaggccctcggtgatgaaggctgccaggtcgtagaagtccttcttgttctcggctggcaggacgatgcacgtcacccctgcgcgcttggccgcaatggtcttctccttgatgccaccaacaggcaggatcttgcccgtgagggagacttcgccagtcatggccagattctgccggacaggcctgcccatggccagggacagcagggccgtgacgatggtgcagcctgcgcttgggccgtccttgggggtggcgccctcgggcacatgcaggtggatgtgtgaggtcaccaggtagtcattggcgggggcgtgctgcatgaggaaggctctggcgaaggtgtaggctatgcgggcgctctccttcatcacctcccccagctggcctgtcacctccaggctgccatccttgtcacccttggcatccttgtcctgtggccgtctcagggatgtctccacaaacagcgtggagcctcccattgcggtccaggccagccccatgaccacgccgggcggtgtcacgtcatacatgcgctccacggtgaacacgggcttccccacgaagtcctgcaggttctcgggcgtcacctccacggactcggcctcgccgctgacaatcttgtaggccgatttccgtaacaccttctccacttgcttctgcaggttgcggacaccgctctcgcggcagtactgcttgatgagcagcgtcagcacgtcc

SEQ ID NO: 468115 - DNA, 1000 bp, Homo Sapiens; identical to SEQ ID NO: 338006

SEQ ID NO: 468116 - DNA, 1000 bp, Homo Sapiens; identical to SEQ ID NO: 309581

SEQ ID NO: 468117 - DNA, 1000 bp, Homo Sapiens; identical to SEQ ID NO: 338008

SEQ ID NO: 468118 - DNA, 1000 bp, Homo Sapiens; identical to SEQ ID NO: 338009

SEQ ID NO: 468119 - DNA, 1000 bp, Homo Sapiens; identical to SEQ ID NO: 338010

SEQ ID NO: 468120 - DNA, 1000 bp, Homo Sapiens; identical to SEQ ID NO: 338011

SEQ ID NO: 468121 - DNA, 1000 bp, Homo Sapiens
ttttttttttttttttcagtgcttgacttcttttatttagagaaaaatcaccactccaagaaaagaaaaacagccaacagaaacccagacacaggcaggggcagcacttgacgggccagctcccacctgcagctgaaagggctggaagggcaagggggcaggggtgggaagacagggtgtgcccgggatggggagtcccctctgctgcttctcacagctcctcagctgggcctggaggcgctggctggggcagagggaactctgggaagccatggaaacccacaggcaggacaggcgaccccctgggaagtgagaggagccaagtggagcccagcagtggcagaaacatccgcgctgggacttgtgggcagggtctggcccctgctgcggatcaaataccggtgctatctgcaggggtcacggcggggataccttttgctcgttcattctttttaaagccctgggcactgacccatggtccttggttaatttcactaaagcttcaatcctgtacttggaaaacctggggagggtttcaggagtcttcctctggagcctgggcctgaagaagggtggcgcctcagccaggtggggcaagaaagacccattccaggtccccaccccatccaaggctccccagcccacaggcaggggtcagaggggcgggactgggcaagccgcagcctggggcagtgaggacaggcggcccccgcaagcaggaggcaggctcggcccaaggcatgaaaagtggacgctgggctcctcaggctccccaggggagatgggaaagagtccaagccactgaaaggaaatgcggcagggctggggagcggctggcgggagctggcggccttcatgccccaaggagctttttgaccatgtagccagggaggctgtagaggaagagccccaacatgagcagccccaacagcgccagcacgatcttgatgatgagccacttgtaccgggtgcagatgaggtacttgatggacttgagagg

SEQ ID NO: 468122 - DNA, 1000 bp, Homo Sapiens; identical to SEQ ID NO: 158445

SEQ ID NO: 468123 - DNA, 1000 bp, Homo Sapiens
ttttttttaagtagaattgcaattttatttttctccagagaagtttttcttcagtccttaacaactccgctccttatatgggctttggtggaggtcatggggcagcacctgcaggtctacgttggggtggaggtgttcggtccttgcctgcttcatgagctcaattcctcaccactgtgctgtgaatggcacaactcacatggtaatgtagcttcacatccagcctgggaagtacacaggcgtcaaggatgctcatttcagaaacatcgctgactgctgcggcctctacgtttcaaatgatgaatttcttagtagccttgtcattgggcacacaacaaccacagttcatacagcaaatgggctgcagtgaacagtgcacacctggttgtggacctctttggcacgaccattgcttcttctttgttatcttggaggtgcaggcccaagaaagatgaagtaaaaatcttaatttgagggtgactaaatgaatccttcaagaccacttaccccaaatccacattctgcaagacagttcaagaagaaaggcaaagtagccatctatctcaaggggctatgggctccacaatacttagcacttgtcccccaagtgtaaacacttcccatggcgtgcttcttccgtctcccaggttaggcacaacgatgccaaggtgctgtcatcgacactcccatcctttaagaatttcaggccagttgtggtggctcatgcctgtaatctcaccagtttgggaggccaaggcagggggatcacttgagcccaggagtttaagaccagtctggacagcatagtaaaaccccacctctataaaaaattttaaaaattagctgagagttgtggtgcacacctgtggccccagttatttgggaggctgaggcagcggggtcaagacttcagtgagccatgactgtacgactgcactcctccagcctggacaagagttaagaccctatctccatttaaaaaaaaaaaaaaaaagcattt

SEQ ID NO: 468124 - DNA, 1000 bp, Homo Sapiens; identical to SEQ ID NO: 338013

SEQ ID NO: 468125 - DNA, 1000 bp, Homo Sapiens; identical to SEQ ID NO: 158447

SEQ ID NO: 468126 - DNA, 1000 bp, Homo Sapiens; identical to SEQ ID NO: 338014

SEQ ID NO: 468127 - DNA, 1000 bp, Homo Sapiens
tttttttttttttttttttttttttttttttttttttttattgaaaccacaagccagtttatttatcaatgatgtcagtactcaaagttgtccagttaaaatctacttcctcttgaaaaacaaaaatacactgaaggaagatgcaaagagctaaaagtggtatcatgattccacagcagtgattgtaagacagtgagccacagggcaaatgggaaaacgtgaaaagaaacaagtatcaggaccaaattagagaagatatgagtagggccatcactagaggtgaaaatggagaaacctaagaaaaccagtgttggcatgaattatgcaagtggaaaatacatctgtagagggacgagatagaaggacctagatctaactccaagtgcttgattggagaagagagggagaaagagaatttatagaattaactgtatagaagcctaaaaaataagattatcagcctagtcatgtaaagtctagaagttcctttatttgctcatcacctttcctttttctataagactattaagcagaaggtcagtaacagaaaatttaccctttcctctcctctcttggtttaaattttataaggaatctgaagaggctatggatcagttggcattacagtgggaagagcttattgaagcaaggttgacaataggtcttgtcattctgctccctgaaaatgcccttcgacaactgtgtcaggcagaaagcacacacaaagtgctcaggatggaacttgtaccccatggcactgatacaacggccagtgatgggctgcccacacccatggcagagcgttccccggcggtgatggtaatggagctcacagaatggacgtccatccagttcaaagaaggagccagtagaaaaactggtgaagcagtccccacaaacaaagcactctgggtgccagacagtgtccatggctgaaaggtagttttccaacactgggcgattgcagccaccacacttgggtgagaacatggctaagaaa

SEQ ID NO: 468128 - DNA, 1000 bp, Homo Sapiens
ttttttttttttttttttttttttttgacgctgccggagtcagttttattagggaagaggggctccctgccccacccctccccacaccctccttccgggaggtctgtcagccccaactgtagaagtagattttctgccaggtgggcaagtaatccatgagcggccttgtgaccaggccaacgccagggacgtggtcggccagcaactggagcaggaagaggatcctggcctcggagaagcggtcgtagaaaggagagcgcagcaggtagtagagcagcaggatggtccggcgccgcagctcccgccgctccctccgggtcaggccctttctgtcactcaggaggctcaggctggtcacgtccacaacaccagccaagagccagggtttccacgacctctgaccccacaggcccaggctgagcaagtgcagcagcggccgggcaatgtacaaaaactctgcgatggtctcctgcagccccaggggggtgggggtcgcactcagctcctcgtgatgctgctgctgccgtccctcccgctgctggggagctccccagtgcctggagtgcagggacggcgtgttctggagggttcgcaccacccggtttgaccgcttccccacgtaggactgctcatggttgccagggctgtggtcaccatccgggggctgtgcctgggtctctctgtccagtggaacgatagggggtgaagtctggaggccagccttgaaccagagcagcaggagcatccgcagtacagccttggccagctggatgagggcgatgacaagccagcggcccacttcaccccacaccttggcagctcccatctccatgaacacctccacgcactccagcacgctcagccatgtcagcagcttctgctgggacagcgacacaggcaactttttccgaagctccttccgtaggatcccgtcattgagcagcacaagcaggttagaggcagagtacaccagctctgacagctcgtgcgaatcggcgaa

SEQ ID NO: 468129 - DNA, 1000 bp, Homo Sapiens; identical to SEQ ID NO: 158448

SEQ ID NO: 468130 - DNA, 1000 bp, Homo Sapiens; identical to SEQ ID NO: 338015

SEQ ID NO: 468131 - DNA, 1000 bp, Homo Sapiens; identical to SEQ ID NO: 158450

SEQ ID NO: 468132 - DNA, 1000 bp, Homo Sapiens; identical to SEQ ID NO: 338017

SEQ ID NO: 468133 - DNA, 1000 bp, Homo Sapiens
gatataggtattattaatatatgcttaagggaaacattttcatccagtgtaactcatggaaattcaatttccttcttctgtgagaatttggaatttgttagactgtgtccatttccagcacaattttctagtagttcaaagtgtaattttacatattagagaacaatttgagtgatttaaattccacagtgcccaatctattggtgtgaaggtacatttattataacaggtgaaaatcacaacaaggagaaactaaaaaaacaacaacaaccctgttttgagcctacccttaagttgattttgatgtccattttcctgccaccatcctgttttatattatatgggctttgtgactaaggacaaactggactgatatcagatcaaatagaaattagcgctttttaaacaaataaatcaattactttgcagaaattaaaaagaaatagatgagcttaggatgtttagggtaattttgatagatttattttctttccttttagcttctctaagatttcactttgtatctaaataaaacatcagaatctggatactgaataccaaacaacaagcggctgtagtttagtcctatgggcttatcatcaattatttctaaatcaaaataagttaaaagtataaccaacaattgttttatttccataagtgcaaaaaatcggcctggacatttgctggttccagttccaaacggcattaggtaacacttcagctttttccctcttttgaaaaaggtggttttcttcttaccatcttctataaaacgatcatatctaaactcctctggagcttcaaagatttcagggtcaccatgtaggactggaggaaagatggctaccaagtctccctttcgcacacagtagtccccggtctctgaactgagagtcaaatcctcctcaacaaaacgaatggtggttgaatatgaggacagtcgtaaagcttcaaaaatgctgctttctaggcagattaggctgtccaattgttctct

SEQ ID NO: 468134 - DNA, 1000 bp, Homo Sapiens
ttttttttttttgatttcagaaaatgttttattaatcaagagcatagacactgctttggcgaagggaggggggctgtgagtggtcacacagacttgaggtagaaaagggttggggatggcaggatgaacaaacacctgagcacaacaggcatggtaggtagtttaaatacataaaaactttccaacacagggaaagcttttatttagatagaaacaaaaaggaaggaaaagaaggaagaaaagagagagacagagaaagagagaaagtgtttcccttggaactaaacaggaagtgcagcgacaaaaagaaaaataaaataaaaccaccacgattcgaagaacaaagggcagcctttcatcttcctgcgtctggttctctttctcaggcaagaaaagaattgattccttattgcattttaattagagaagacggcgtcggggcggatcatatggagggacaagagagaaagagccagatagggaaatggagatagggctgaggttctaaattcgctccaaaagggtggaagagtgcgtctttgagcccttgggttcgacagtccctccttcttgcatgttgccgccaagggccgccctcggttgggctgggggtggatatatatatatttctctttctcttaatgtattaaaaaaaatcaaaggacattgcacgtgcgatccaagtgtgtggttgcagccgacgacctgccggcgctcagcagaagctccgcgggatgcgtagcaccagtcgccggagcccagagcctggcgttcgccgctgccttcctctcctcccggggcttcaggagtggctggcctggccaggtcctcggcgcgggcctcggctcactggtttaactccagcgcccagacttgctgcggccagccggtgcgtcctttaatcctcttctcgactgggcccagggcaggaggaaaaccttcgtgctgctgcagctcccttttccgcttgctctcacggccgccatccgccttcttgagt

SEQ ID NO: 468135 - DNA, 1000 bp, Homo Sapiens
gccaagcgccgtctcgctcgccccgccctcgggcccgcccggcccgcccgcccgctgcctcggcgctaggccttcttgcacttgcccttcttctcacgctgctggaacttgcgcagccgccgcgcccacgtgtcccgccactggatcaccaggctgcttttatcggccacgatgccgctctggtccggagagtcctccgcgttgcccagcagcaggtacttcttgaggggcttgattttgggacacttgcaggcgatgtcccgcgagcggatccacaggctctggtcaccgcggcggatgcggctcgtgccctgcttatacacggagatgatgttcaccgtgaacttccaccagtcccccgccttgtccgccttcaggatgtggatctggacggcatagtccttcttgcagtactttttcatgttaatcttcagcttccccttggaggccttgcagtaggaatcgcagtcttcaggctcctccacgctgctggctgcagtcgtcggcggcgctacagggatctttatgcagggggcgatgggagagcggctctgctggtagcctttggcgcagcggttgcaggtgatacccgtcacgccgtccttgcagggacactggccggtggtttggttgcaggttttgccagcagcacccacagggtggcaatcacaggctttgcaggccttccggtgggtgatgggcttgcccatgtcgcggtagtagccctccttgcagtaatggcagtggcggccggcggtgttgtggcgacagttgaggcagacacctccgctcttgcgccccgaaagcttgtagagctccatgttgaagcggcagcgccgggcatgcaggttgcagttacaggccacgcactcgttggcttcgcgggctgtggcgcgctgccagggccggtcgtagtggaagggcttgcagcggtcgcactccgggccggccgtgttgtgcctgcagtcgcacaccaggctgtcggtgcggtcgcgcacgc

SEQ ID NO: 468136 - DNA, 1000 bp, Homo Sapiens; identical to SEQ ID NO: 158451

SEQ ID NO: 468137 - DNA, 1000 bp, Homo Sapiens; identical to SEQ ID NO: 338019

SEQ ID NO: 468138 - DNA, 1000 bp, Homo Sapiens; identical to SEQ ID NO: 338020

SEQ ID NO: 468139 - DNA, 1000 bp, Homo Sapiens; identical to SEQ ID NO: 338021

SEQ ID NO: 468140 - DNA, 1000 bp, Homo Sapiens; identical to SEQ ID NO: 158452

SEQ ID NO: 468141 - DNA, 1000 bp, Homo Sapiens; identical to SEQ ID NO: 338022

SEQ ID NO: 468142 - DNA, 1000 bp, Homo Sapiens; identical to SEQ ID NO: 158453

SEQ ID NO: 468143 - DNA, 793 bp, Homo Sapiens; identical to SEQ ID NO: 338024

SEQ ID NO: 468144 - DNA, 1000 bp, Homo Sapiens; identical to SEQ ID NO: 338025

SEQ ID NO: 468145 - DNA, 1000 bp, Homo Sapiens
ttttttttttttttttttttttttttttttttttttttttttttcacgcttagaaatgtaatcgggggatctagaaattctacacaatgagaagctcaaaaacagccccaaagctgccaacaaccagagccgactggggcccaccccagcccagcccggcccggcccacccagggctaagttgggaccccccagtccctttccaggacgaatgggcccaactatgccgcctgcagcctggcccgcatcccaggccggaatcgttcatagaaaaccagccccggctcagggcgcagcctcagccaggcgggccaggccctcacgcagctcactcagctcaaacagcctgacgtccagcagctgcgctgcccggcccacctcagcccgcgcccgctcccgctctgcccgtgcctcctccaggctgcgctccatcgcccgcagctggtgctccaactccgcattgcgggtctccaggtcctgcaccttctgctgagtctcctcacgctcggcagcctccagggcctcgcggggccccccagtctgactcttcagggtctgaatctcctggtccttggtttgcaccagagcttccagctgttccagcgactggccctggcccagcccctccttctcaccggtgggggtcacctctgaagctgcctgagcctccagctcagccacccgctgccgcagccgctcggcctctgcacgctgagcctccagctgctgcctccactgggctgcggcggcgttggcctctcgcagggcgcctgccagcttgttgttgctgtcctgcagtgcgaaaaactcggcctcccactgtacctcgcccacggagccctcagacaacatcttctttagccgctcgcgctctgtggggccgggggcatcagcgctctggctgcggaacagtttttcctcgccggggccgttggcactgacgagagggctcgggggcacctggtgggaggcgagccccagggctggactggtgagctccc

SEQ ID NO: 468146 - DNA, 1000 bp, Homo Sapiens; identical to SEQ ID NO: 338027

SEQ ID NO: 468147 - DNA, 1000 bp, Homo Sapiens; identical to SEQ ID NO: 338028

SEQ ID NO: 468148 - DNA, 1000 bp, Homo Sapiens
tataaaaatataaaagtttatttttcttagtggttctatccatgcagtcattcagggattcaggttccttttcatttcttgctccaccttccccttgggtatgaccaaagctggatcataggcatgtgttatgttccagctcataggcaaggaaaggatgtgggggagcccccacccagaccccgtgttggcatatgtcacttctgaccacattctgttgtcaagaactcagtccatgctgcacctggatgcaagggagctgagatggtgcccaaatgcagtgttttttcttttcttttttttttttttttgctttttattagtttgtttatttttgagataaggtctcattctgttacccagcctggagtgcagtggtgcaatcagaggtccctgcagcttcgaactcctgggctcaaccgatcctcccacctcagcctcccaagtggctcggactacaggtgtgtgccatcatgcccagctaattgtttttgtttttgatgttttatttttgtagtgaggggtcttgctatattgcccaggctggtctcaaactcctagctctaagtgatccttccaccttggcctgccaaagtgctgggattacaggcgtgagccactgtgctggggtccaaattcagttctgttacagcggaacagattttggcaggcagctgccactctcaatttcatgtattttcctttgctccaccttccatccgtgtcttccccatgggggccaagcccttctctataggggtccttcaatcccagctctgcctggctgggtgtcctcaggtaagtgactcagcctctctgagtcctcagtgtcttcatccatcaagagggctaatccaggactggggtgcaacctgcatgagcatccctctagcctggctggcagcccccagccagacgtgtggttcaggccagaacctgtggcctggggggccccagaaggcccagctcctcaggtgtgggcaggaagtgcttctcatac

SEQ ID NO: 468149 - DNA, 1000 bp, Homo Sapiens; identical to SEQ ID NO: 338029

SEQ ID NO: 468150 - DNA, 1000 bp, Homo Sapiens
ggagaagctcaggtgtcatttttattctgtggttttaaaatgaaataatcttggttagtcacttacaactttgacgactttaaccacctgatgaaacctaccagtttctgcagcctcaggtctccataagggtcttcttaaattggctcctctcatttcaccaccagcttttggggcccaaggtcctaaggttgtgttcttgaagccaaattcccacattaatccatgttaaccacatgtggttaaacccctgtttaccatatacagatctatcaggcttggtgctacagagatgaggaagacagtccaggcctcccgggggcttagagcttgggggtgagagtgggggtggcagacgttaacaaaatctcccatgcagtgtgatcagcattggcactgcgctgctgtcaccaaggttgatggcctcggattcccctctgcatccaccggtgggacagctggggttgcaggattgagaggaaccctgccagctgctctgcatcccaaggctctgaggctgagggagtcacgtgcgagatgttaggtccaaaccagcccgccctaagtagcaagaatctagaacctgaaggaagctggtgcagtgtccatcaaatcagtttccacaaagctactccccgtctgcagctcagtttctgtgagacttgcccgaggtcttttagaggcttaaaatggttggctggtgtcggattccctgagaagcagcagttaggaagcgtggttcctccagcacttagatggttttctgaaattgctcaagtatttcttcataatcatgttcatcatcatctagatcctgcctttggggcttagcgggcctgtggcccttcctgtgggcaggaatcttgctgtacgtactggagccatccttgatgaactctggcaaggtcttcgccttgggtttgggcagccgaacgtgttgctgcaatcctaagacttgagaagacttgacgcctccctcactgctgtgtctcctctgctt

SEQ ID NO: 468151 - DNA, 1000 bp, Homo Sapiens
tcgagttttttttttttttttttttcttttttatttaattttttaataaaccataaaatttaaatattcaaatgaaaagaaacaaaaatagattatttaagccagcatgaatttctggttttactcttcctctagggcattgtaggcttgacttacctgggattagagtaataaagctatgatgctggtacaataatgaatgaggaagtaaaaatgggcaatgtcttcataaaatttactttcaaatctagatcagaagttcactcaagcctactgcaaaggcctgacactggttttgtctgtataaaactactctggctttttaccacactttcttcatcacagcttagtgttccctgcattctgatccttttgctcactaaagctcacttcaatctgtcaaaacatcaagggggaaaatccccaaaatgaaccgacgaataaacactcttaatgtgaacaatcatattcagaccagcctcttgtgcaaaaatacaagtcagtggattttttatccttacataactcaaatattgctatttttttcctgcctttactaaaatggcactttcgtttacatcaaccaattattttctacttgcttctaagtttctgagattgtatgctgtactggctattctttttgattaagctttacaatttccattccagaatatctggtctttgaccaactttatctaattttgtgaagaaatgtgctattaatcagtgaaaatcgcaaaaggaaaaagaaaaggaagcaatgaacaatagtagaatctcacttcagcatttgtataattttttataagaaaaacatycatttttattatgggatctaaaaccatgatcgtgtctgatactgtaagccttttagcgtactcaaatgggtcaacattcaatatggacagccagctagctcacaagaaatgaaatgtaatgcacaaatatgtttgactggtaaaatcccagaggcttggtaataaagtgcagcaaactt

SEQ ID NO: 468152 - DNA, 1000 bp, Homo Sapiens; identical to SEQ ID NO: 158454

SEQ ID NO: 468153 - DNA, 979 bp, Homo Sapiens; identical to SEQ ID NO: 338032

SEQ ID NO: 468154 - DNA, 1000 bp, Homo Sapiens
tcaggtttggcacataaattttatttaactttcacattgacacaatcaggaaaccattctgagaaaaggtagaggccgccttgaagcgaagcctggctccctcctccaccccgggctcggcggcaccatgcaggctcaggctggcactcatcccaggaaactgtcccagttctcagcggtcctggctgtggacggtatctgaaatggtcgctgcggcttgccctgcaccagggcctaccttgttgccaggaagccgcactgctggaggctacctgggcgctgggttttattgctggtgaacttggttacccaccttccagtcacatggtccaggatggtggtgtgatcagaaatggctctggcagtgcccattttgctgagatgaaaggaatcgaaatgtataaactacactgaattctgtgatgctggcaggttgcccctgctcgtcttcagccccaacatgggagctccctggagaagacaggtggagattcactgctgtccacccaggtaaggcaagtcagaactgatgcgccgggatccacagcagcctgagctccaagcccaaccagcgcccccattcctgggccatggtccttttaaggccctcaaagacactccccttctcaggtagaaaaagcctcccctcccctcaccttctaaaatcgtatgtcttgtgctgaatgaaataggcgcttggcagacacaggttcagaagcatggaccagcattacacaggcatggattctggaaagatggacccctggacaccacaccaccctctggccatcgctgactgtctacaggaacaaaatagtcacagaaagaatgctttgcctccacaattgtcgcagcaccaagatgaaggccagaggtgccgttttactcctcagatctgatgctgcaaaagtctctgcgatttcagcagcccccttgcttctctgtccctcctcagagtcctgggtgctgttcctgcaacccaccagtgatgggtgaagcc

SEQ ID NO: 468155 - DNA, 1000 bp, Homo Sapiens; identical to SEQ ID NO: 338033

SEQ ID NO: 468156 - DNA, 1000 bp, Homo Sapiens; identical to SEQ ID NO: 338034

SEQ ID NO: 468157 - DNA, 1000 bp, Homo Sapiens
ttttttctgccgtgactctggagagtaagtcactgtagaagattgtttattttattatcatcagaggccatttcattaaccagctgttctattgacaactgaatagcattcttgactagagaagaggctgtttcaattaagagtgtttcatattgttctgaagttctatcctcaaaaccattatcattagcaaaaacccctacttgctcattttcagctgaaattaagaattgcttagggacatttttagattttgtaacatcaaattcactgatttcagtgtctgtaataataatagcaattggctccattcttttgctttcttctgatttggatttctcttcagtgatcccattttctttaaaatctgattcttggctcaattcagtatcttttggcttagtttcttcagctacaatctctgtactttcatagtcttttccatttggtgcactttctagggtactgttactggcttcttccacaatttgttgatctggaattgcaggtaaaggaggaacatcagaaagtactggctgctgatggtctgtttctgaagtttcaagtgggcttgcttgctggggttgaacatcttgtttttccttgatcgtttcaatttcttcaaggattagagttcccgtttgaatagcagaatgcccattatctaatccaagttctactgaaatcactttctctccagaagttatgctattgctcacatttgattcacagacctcatcaccatctttccgtgagatgccttcacttagatcctgggttgacttagcctttgttgcctgatcattcaatggggtctgtgtttgtatatccaaaatttcagcttcttcctggactttgatgctgcagtctgagtcttctataattttggaatgattactcctttttggccctcttgggaattttatgcagggaatcttaagtctagattttgcctttttcttagaaagatcagcatcctcagcatttattgcaggttgca

SEQ ID NO: 468158 - DNA, 1000 bp, Homo Sapiens; identical to SEQ ID NO: 158455

SEQ ID NO: 468159 - DNA, 1000 bp, Homo Sapiens; identical to SEQ ID NO: 338037

SEQ ID NO: 468160 - DNA, 1000 bp, Homo Sapiens; identical to SEQ ID NO: 338038

SEQ ID NO: 468161 - DNA, 1000 bp, Homo Sapiens; identical to SEQ ID NO: 158456

SEQ ID NO: 468162 - DNA, 1000 bp, Homo Sapiens; identical to SEQ ID NO: 338040

SEQ ID NO: 468163 - DNA, 1000 bp, Homo Sapiens; identical to SEQ ID NO: 338042

SEQ ID NO: 468164 - DNA, 1000 bp, Homo Sapiens; identical to SEQ ID NO: 158457

SEQ ID NO: 468165 - DNA, 1000 bp, Homo Sapiens; identical to SEQ ID NO: 158458

SEQ ID NO: 468166 - DNA, 1000 bp, Homo Sapiens
tttttttttttttttattcaaataaaattttaatgatttcagttcctgaaaatgtagtgtcattaaaggtcatttcctgctaaatttcaaattacagatttgtgggccattcctgagcagaagcatcatttctactaaatattcagcttgttaactaaggtaactgacagtatcatggcaggaggtgagaaggagcaatgatcagctcatagctaagaaaagggaaaaaaacaataaccaaagcaaaaaacaaaatagctacagatattagtaaaataataatacaatcccaaacatccacctcttaaattactacaaaaacaataccaataaagttatagcaaatacagtcttcacagatttgagtaactttatttgcattttatagtgatttcttaaggcctatatccaatgaaaccattttaaaagctctatgaggagtggaattttagatgtctattacacttgtcttttaaaagaaaaatgcttaaatttcagaatgagcaagattcacttttgtaggtagaggccctgcttcttcatgatcttcagttttagatctaacaaccacaagagaagaagctggatatctgtttagcttttgttcattcataaactccaagtcaccatagatactcagcttctcagagggaacatactgctccacagctgtagcaacagttgcacaacaaatccaaagcaataccatcaccgagaggacaagagttgtagttaaaatccacccagagttaagagagaggcatcttaaaaagccatcactttctccatcttcaagaaaattcctgtgcgcttgtgaatttctcatttgcagataggacattttgcttagagatgattctctcaaatttgtaggctcctgctccaaatgtggtgcgtactggatttctggcttagactggaatataactatttttccgtcatcggcttgaagataaaaagtccatgaagaggttatgaagctctgtgcggagtccatcat

SEQ ID NO: 468167 - DNA, 1000 bp, Homo Sapiens; identical to SEQ ID NO: 338044

SEQ ID NO: 468168 - DNA, 1000 bp, Homo Sapiens
tttttttttttttttttttttttttttgaattttaatgcttttatttactatgaactctacaattttgagtaagatgtgagcaggtgttaatggattttttactttgccaatatttgtacatttcttctcaagtataaatgctttcctgtgcaatagggtgtgagcattgtcgaagcttggccacgttgttcacactggtagttttctccagtatgaattatcttacctacaatcaagtgtgacaatcatttaaaggctttttcacattcttcacatttctaggatttttcagcagaatgattttctttaaagttttaggtactgtcaaaagcattagcgcctctctcaggtttgtagtttctctccagtaggaataatcttatatctattaagaattgagggttttcttaggctttggcacattattcatacttgtaagatttctctccagtatgagttatcttatctgtggtgaggtgcgaggaccgattaaaggctttgccaaatttttcccatttgtagggttgctctccagtatgaattctcttatgtttagttagggttgaggaccagaaaaatgctttgccacattcttcacatttgtagggttttactccagtatgaattaccttatgtttagtaaaagttgaggaccgattaaaagctttgccacattcttcacatttgtagagtttctctccagcatgaattatttcatgtgtagtaagggttgagagttgcttaggagatttgttatattcttcacatttgtaaggtttctcttcagtataaattttcctatgattagtaagggttgaggaccaattaaaggtttttccacattctttacatttgtaggacttctctctatgataaatgcttttgtgttgggttttatgtgaaagcatgcaaaataatttgacacgttttttacatttgaaagatttcttttcagtatgtcttatcttaggtctgtttgaatttaaaaatttatagaag

SEQ ID NO: 468169 - DNA, 561 bp, Homo Sapiens
tttttttttttttttctgagtttttgcatttaaaattatttaaagtcttggttgttcaggtcctagggttccaagtccccagtcacctgaggactcagacatcaggaattcagtccccagcccagagatcaacgaaagaaagacaacttttcttggagccaggcctcagtgaggtcatcagtggtgcggatttcgaacacctttgtgagctctgctgtctgcaccagcctgtttttactccctgcatacatcatctgttgttccggcttgcagcccacagggctggagaagatgaaacacaaagggtaggacactcggccatcgtcatgcacgtacttgtagctgtaaaccacgaacctgggctgtctctccggcaactccattttgagctcctctggggaaatgttctgaaattcttcctccagcaccaccatctgccggtctttgtccaccttcattatgatggctgcattgtctgtctcttttcggaagcggaatttcctcagcttttctgttagctctgggtctacctcgcacaccaccagggagtcagacatgatt

SEQ ID NO: 468170 - DNA, 1000 bp, Homo Sapiens
ccagttcactctttatttcctcatatcagctttaaacggctctggaggaagcaccgggtttcttggcctgtctattgtgaatcttctccaggtttgctctggaaaggcctggggtggccgcgtcctgtcctgccccatcctccttcactggggcagttccaggacgatcttgcctatgttcttgttggcctccatgtacttatgggcctcctggatttcggtcactgggtagattctgtccagaaccggcagcagacgttgggggccctccgtggagaagtgaggcagaatttgctccgtgaaagcattcaccagcatttgcttgtacttattgtccctagacctcagcaaactggtgatcagacttcctcgcttaaaaagtagctttgaaaacaggggcccattgatgtcacctcctcccatcagaccatagagaacccatcgaccatcaagagccaggcagttgacgttcttctcccagtaggatccgcctatgcagtctagaataagattaactccagcacctttggtgaatttcagcgttgcttcagagaaatcctcttttttgtaattgaatccagcagctgctccaagcttttctgccatttgaagcttcttctgggagccagctgtgaccagaggaatagctccagccatccgggtgagttggatagcagctgtgcccacaccactcagtcctgcatggattagcacatagtctccagcctgaacatttcccacaagatgtaacagctggaaggcggtgagccaggcctctgggatggctgcagcctgggtcagggtcaatccctctgggataggcatgaggagcccttcggggacagtgacgtactgagcctggcccccaccggggagcagagccatggctgtgtccccgatcttccagtgtccctggcagccaggccccagctctgccacatgtccagatgcctcaagtcccaaaatgttgctggctcctggaggtgggtcatactggcct

SEQ ID NO: 468171 - DNA, 1000 bp, Homo Sapiens
ttttttttttttttttttcaatgtactgtcattcttttaatgatgtttcagaacaaagaaaatgtcacagagttatatgcggtttttatctggtatggggaacaagaaacagttaccaacagaaaatatttccacagccccaaaatagcttacttacaaatatttgcaaaattcattcttatagtactcatgtagttttgtacttgaattgacagtctagagatgaaaaattaaaattgagcttttttattagaaagacaacagtacataatttaccccttgctaaaggtattcaataaaaaagtggagatatttttattcccaggtaattgtcacatacagtctttcttctctacttctgcttcattctctttgtgtcactttagtatgtgtacctcctgggtgctctctgtacattttttctcctctatacaagtctgtgccatggcttctgctgtcatttcttctgctttgctcttcaccaggatttcgctgtgcccgtttccttgtctccctttgcttgtaactaccaggacttctgctccggcttctccggctcctttcctccctgccgtggcttctgctgctcccctcctttctttcagagcctctcttctctgggctatgtttatgggttctggactttttgtcagaatcagaatggctccatttgctgtcctccctagaactctcgtgttttaagaacctgggcttttccttggctttttcccggttatggtgactgctagaaagttcttcatgaagctttctcttcttagacttgtccttctcttcagaatcactgttgttatgccctgaacacttgtttttctttcttttcttcctttgtatttttttttctttattgttactctcactctcactactgctttctgaagtctcagtagaggaagaggaggaggaggaggaagatgaggaagaagaggacttatgttttttgtgtttacttctgctcttctgaaactttttcttttttcta

SEQ ID NO: 468172 - DNA, 1000 bp, Homo Sapiens
ttttttttttttttttttttaactgttctctagaaatatatttattcatgcaaacatgtctaagtcactctacgtatttttatacaacataagattgtttatgatcttatgaccatttttgtttatttttaatttttttgccagagagggctttcagtaaatgttttatttagaacattctttgaaaaatttgaagtgcaaagccacaaaaagcaatggatttaaatatataatgcgtagtagagttaggattatcacactagctctttttaaatctcactgctgttagtagtttcttttaattcttccatcactaattcctgttggggtttttcagcacttttcctataaagcaaggtttccccatgagggttttgaaatgtagattcctggacaagctgattagatgtgtttatgagcacatggcttttagcttttagggtataagcttccataggctttgctcttttttggcagagctggagctggaaagcttcttggaaaccacggcggaaattctcgttgaagaaaccataaatgatgggattgacactgctgttgccgaatgccagccagtgtgcaaaagggtagatgtagatgttgatgatctgcagttcatttggagaaaggtcagcgtagtctgagagcatcattagagtccacaggggcagccatgagagaataaaaagcagggccacaatcaggagcatcttaatgatcttctgctttttcctggacaccacgtgccactgctcctggttcttcctgcctgtgtgaggaactgcagccctgaagagtgaaattccaatccttccatacatgatgacaatgagggagaggggagccaggtagatgttggcaaacagcacagtggtgtagatcttcctcatttcctgatttggccagtcttcccggcaccagtagactggactggttttattctgggagttgagtctcactcggtaatatttttcttcttgcacatgtaacattactgcag

SEQ ID NO: 468173 - DNA, 1000 bp, Homo Sapiens; identical to SEQ ID NO: 158459

SEQ ID NO: 468174 - DNA, 1000 bp, Homo Sapiens; identical to SEQ ID NO: 158460

SEQ ID NO: 468175 - DNA, 1000 bp, Homo Sapiens
tttttttttttttttttttttttttttttttgcatgacagagtctttacttttaaatgattatcgatacaccaagtaatacatgtaacaagttcttgaattctatcatctagtaattttgattaagagaaactaaaagcagcccaaacaattccactagtattcactgttctaaccattagcaagaatggactactttaaggctggctgctgcttcacacaggttacaaagaactatttactactttttcatagataaagcccctgaccttcaagaaagtgttagggaaaaaaattatttaatcccttcctttcttcaaagaattgttatgtggttttttttttttttaaactagatctaagaaagaaaaagtcaacactgatatacatgttgcttgagccaaaagacataggaaaaaaagacaacatataaccattaaattcctaagaaatatgaggtaaaaagatgaaatctttagataatttctaagtctgtacaaaaaagctagatttgctactctccaaaaagtggaaggacctattatataatatatggaaataatttaatgccatatcataagaatgtaactagagctgtgctaagcttcatattcgtgagggcatctaaaatgccactccacagcacaggtgcttctctcttctatccatttatgcggtagttttcatggatttctggccgaatgtcacagacaaaagccaagaggttgtccaagacttcatccctgttctgccggaagtatgtctggaggatggtcatcttctcctgggtctccttctccacttcagtgctgcaactgccacgggatcccaatgccgcagcttccttggccttgaattctttctccctctgcaggcggtactgttcaatttcagcctgagcttcttctttggcctgcttcagcctccggttctttcttttgcgggcctcggacaccttctcggctgcccgcttctcggcctgcagcagctgctgaatcccc

SEQ ID NO: 468176 - DNA, 1000 bp, Homo Sapiens; identical to SEQ ID NO: 158464

SEQ ID NO: 468177 - DNA, 1000 bp, Homo Sapiens; identical to SEQ ID NO: 338051

SEQ ID NO: 468178 - DNA, 1000 bp, Homo Sapiens; identical to SEQ ID NO: 158465

SEQ ID NO: 468179 - DNA, 1000 bp, Homo Sapiens; identical to SEQ ID NO: 158466

SEQ ID NO: 468180 - DNA, 1000 bp, Homo Sapiens; identical to SEQ ID NO: 158467

SEQ ID NO: 468181 - DNA, 1000 bp, Homo Sapiens
ttttttttttttttttttttttttaaggagttacaataaaaatctttatttaggtttggtcagtacaggtaagatatactggagtcacagagcaatatgcattaacaggatacaacagttcataaaaactgagtaactatgcacacaaatttcttaaacagtcacctaaagagaaaatgcacagatgtatggtggaaaaaactgtatctaacactgaaactactacaggactccatcaatgagtccaacttttagtgataaaaaactactgtactgggcaaacttggcagtcataaacccacatctactctaacaagtctgaatggtgcataagtacagtaacagcatgagtacgaatgcccttacacagcacagattctaaacagacagatttatacagacatcattgtgttgtattttaaggaaaaatttccatttacaatttcacattaactcatataaaaataacttgaccctacacaaaatgtccttttagcaacattcaaagtaattaactgttacaatttccaaagcggcagaagtattgaagcaaaaaaaaaaaaaaaaaaaaaaaaagaaaagaaaaaaaaaacaaagaaaaaaaacaacaaaaaaaaaccaaaacgtacacccacaaaaaggcaaattgtgacaaaagtatgcattaattttctggacagtatcctctcccaaattaaatgacactgtataaaaatttgctgaaaaaatattacaaaactgaaccctgtacatttacacttgagtccaagccattctgaacgtggcgggaacccacagttcgattacctttcccactcactgctttctcctcttgagggtcatgactggagtctgtgtcatttgattggtgtgtgagagagttttcactgcccgtgggagagtctacactttcataccccgcactgagttgatttacgtaaccactacctcctctgccagttctctcctctgagctgttggaggacttattaccattccc

SEQ ID NO: 468182 - DNA, 1000 bp, Homo Sapiens; identical to SEQ ID NO: 338054

SEQ ID NO: 468183 - DNA, 799 bp, Homo Sapiens; identical to SEQ ID NO: 158469

SEQ ID NO: 468184 - DNA, 1000 bp, Homo Sapiens; identical to SEQ ID NO: 158470

SEQ ID NO: 468185 - DNA, 1000 bp, Homo Sapiens; identical to SEQ ID NO: 158471

SEQ ID NO: 468186 - DNA, 1000 bp, Homo Sapiens; identical to SEQ ID NO: 338058

SEQ ID NO: 468187 - DNA, 1000 bp, Homo Sapiens
cacagcagtgagctctttattttaggctgggtgggggcagcatgtgacagtcaagagggctgacccttgggctgcacggacctagataagatgcccagggtcccggaatgttcacagcccacagccaaggtgagcaaggggcagggaatgtcctgggctcagagcccgagaccctgcaggggtgtccctgcccatcagcaaacagcataccctgacaccagctgcaccccaggccccagccggcccttgttcctgacccagacaagaaactagttcatggggctacaactccccttctaggggtcagaggggagagaaactggactgccgtctccactgctggccggctcatggccccctcttccctgatgctccccaggagctgccccagccagatgttcatcgctgagcctgcacccaccgaagcccaaagcttcccttcttggcctctctgaggctacacaggagagcagggcctggttcctcctggagctgattcagccccattctgtcggggcagaggtgccaaccccaagctccagggtcagatgtgaggtgaggaaggtgaagagctggagagcacaccacagtggacaagcccccaccatgtgcagagcagcgtgaggctccaggatggtcctcagtagatcccatggctccaggtgtaggagagacagccctgggaggcgaggccaggccctgcagggaccctgggctctagctgtactacttggccaggcctccccggggcagcagctccacgtagctcagggcactctgcagtgatgtgaggcagtagccctcctctccgatcaggtacccctcgtggatgaactcctccagggccgcgcactccgacaccagctgagggaggccgctcctcagcaccacgaaggacaggatgggcagcaggtcatcggcaccaatggcagctgcagcgatgggcgggggccggcctggggtgtggcctctggggtggggcagtagtcttccgcacaga

SEQ ID NO: 468188 - DNA, 1000 bp, Homo Sapiens; identical to SEQ ID NO: 338059

SEQ ID NO: 468189 - DNA, 1000 bp, Homo Sapiens
gcgcttctcttagactttatttctggatctaggggaaagggacaaaaaatgaaaaaccaactggtaaggttgggtcaacgtgccacaagggggcactgtgtacagggagagtctaggtggcattggaccgctgggtctgagggaggaggggctgggacctggacctctgggtctggggaaggaggggttgggggcttggacctctgagtctgagggaggaggggttgggggcctggacccctgggtctgagggaggaggggctggggggtctggactcctgggtctgagggaggaggggctggactcctgggtctgagggaggaggggctggggggtctggactcctgggtctgagggaggaggggctggggatctgtacccttggtttgagggaggaggggctgggggcctggactcctgggcctgagggaggaggggctgggaacagatattcctgaattccttccgcaggatgtatttgggggtcaatttcatgggttcccagtccccagagttaactggcctggacggttttctctatccactcagtgaatttgcagaggttggtgtagacacctggcacgccaacttggccacacggggcttttccgaaagacacaaggccctgcaagtacccgttgcagatcaggggccccccagagtcaccgttgcaggagtccttctggtcttgccctccgccggcgcagaacatgctggggtggtacagcgggtcatagagcttactgcagacctcctcagacaccaccgacacgttcacgcactgcagcacggtaggcattctgccgttcgccagcagaccccagccagaaacgaggcaagagttccccgcggtagggcactgcgaagcaatgctgatgctccggatggtgtcagactcggacacggattcgtccaacttgatgagcatgaggtcgttagcgagcaagggtctgttgtactctgggtgccgtacggagaggctggcctccaccatctggc

SEQ ID NO: 468190 - DNA, 1000 bp, Homo Sapiens; identical to SEQ ID NO: 338060

SEQ ID NO: 468191 - DNA, 1000 bp, Homo Sapiens; identical to SEQ ID NO: 158472

SEQ ID NO: 468192 - DNA, 1000 bp, Homo Sapiens; identical to SEQ ID NO: 338062

SEQ ID NO: 468193 - DNA, 1000 bp, Homo Sapiens; identical to SEQ ID NO: 158473

SEQ ID NO: 468194 - DNA, 1000 bp, Homo Sapiens; identical to SEQ ID NO: 158474

SEQ ID NO: 468195 - DNA, 1000 bp, Homo Sapiens
ttttttttttttttttttcagtttcagatgattatttaatttgtaaatattgtacaaattttaatagcttaaattgtatatacagccaaataaaaacttgcattaacaattggtggggtttgtgtcacagaatcgatcaaatcagtgtcgggctccttgctgtggctgtacacttgaaaatggaatggaatctccaggagtgagggtttccatggaagccagcactatccttggggacaccactgaccattaacagattaggaagatgtgcccattttacacacagagaagcagcccagagttcagtgccctgcttcagggcagagaccaagttggggagtcaggaactgaaagctgtcttagccagtttgggggcagggtggggtctcaggcctttggcccctgtgactccaagtataaggcatatatgaaggctagtgagctggggttgggatgggatggcagggtgaaaggtcagcatattcctgcctgcaaacccctccccagccttgattgcaggtcagaaggctgcagggggatgtccctatgctggctgtgagttcccagccactcccttgtggtcaggccagcaagtctggtctgcaatggaacagtgaccaagaacgtgcctcctacctctctatcagagcccggggctaacgtgggcactctgtgccccagtgccagcactgtactttgaacagaagatctccaagacccatgcccgagtcatctgtgttctccatcacctgcaccaaacaagatctggcctagagcaaaggcttgggggtatttgcaacagtgagcttcggagggccaaggaaacaaagtgcccagtggctctgccctgtgctaccttcccctaaactggggttgggctactgcttccaccaaataacaactagaatttgaattgctgagcccaaggaaagaaaaacaaaacaggccaaggtggaccaggcacatggctcatgcctataatcccaacgctttgggaggc

SEQ ID NO: 468196 - DNA, 1000 bp, Homo Sapiens
cccgggtgaacaaaaaccacacggtctctatggaaatgtggagagactgagagcgaggtgtggcagaagcaggctcggagccggaggaggtggctatcggctttattctcagggagagatggcgctgtgcggtcaatgatgcagctgttatgtgacctgtcggggagggaagggacgagggaagggagcagaaaacgagttttctaagaaaggaatctaacgagtgcacggcgtgtctggttagcatgaaacagaggtttagcattgctgctttctcttcaaagcctccaccaggtcattcttcagagcttcttgttttgatttgtctgcaaaagtctgcacagacctcagcccattgacgatatcctttgtttttccaaagtagatctcgttcagcgtacttctgattttattttccatgtcctctaccaggcgcccgatgttggctatgtgtggggagcagtcactcacagtttcatccttctccatctgtctggtaaggctgcctccgaggttcatggtgccagagccagatttgttggtctgcagccacagcatcaccgtggaggtcaacttgtaatgggcggtgcgaccgctggatttctcctgcacttctaccacgtggatggaatcccagcagcctttgatcttctttgatccatctccagccttctttatgaggatcactccagcaaagccatgatccagatcccagaggtagacagatgagacgccaccttcaaaatacaggtctcgatactggtcaaaggcattgttggcttccacctccagctttctcagccgagctgacggcatggccccatcctccaagggagggtcatacttgttactccatggtgacctataggagtccccatctctgttgtagtcacacaaaaggtaatcctttcccaccaccttgtctctggcaattttcagtggctggtcaacagaagacaggagatcctcacatagactggggaccaggtcgatcaggtcg

SEQ ID NO: 468197 - DNA, 1000 bp, Homo Sapiens; identical to SEQ ID NO: 246451

SEQ ID NO: 468198 - DNA, 1000 bp, Homo Sapiens; identical to SEQ ID NO: 338068

SEQ ID NO: 468199 - DNA, 1000 bp, Homo Sapiens; identical to SEQ ID NO: 338069

SEQ ID NO: 468200 - DNA, 1000 bp, Homo Sapiens; identical to SEQ ID NO: 338070

SEQ ID NO: 468201 - DNA, 1000 bp, Homo Sapiens; identical to SEQ ID NO: 158476

SEQ ID NO: 468202 - DNA, 1000 bp, Homo Sapiens; identical to SEQ ID NO: 158477

SEQ ID NO: 468203 - DNA, 1000 bp, Homo Sapiens
tttcccaggaggtggggaaggggtggtgaggacaggaccaggagggggcaccctcagagcctgaacaggggtgacctgctgcccaaaggctgggggaggaaagtggtggagccaagccctccctgggcaaacgagaccccaaaatagctccttggcccctggccggggagccacattcctgcccaggctgggattagaaacagaaacatttcggggggtggagggtggcgcgggaagacacactccctgcggctccgagagccaagaggaatctgagctcttctttccagggtggacggttctccagagtggaagtcggggcctccaaccggcctggggtgcctgggccttgagagggccaggcctgagaaactaggaggcaaggaccgaggagtcccagctgggcagggcctgggaaacgtggtcctgggcagttctgataatttaaaaaacaccgaggactttgatgaggggccctggctgcgggcaggatgctcttctccccaagagggtcctgctccagccgctggtgtgggtcaccagttgtgtgactcgcaggtccgttccctccctgggctccggcttttcctgctatgaaaaggggtgggaggcgctgggctgggagcaggcctgcactcctcctctggggaaagcggactgcctagaaccacagagtacacacacaggtcctctacatcatctcctccgaaggggacagacccgctgagaaaacagggaactttagtataaataagaggtcctgcgggacagggaggaacctgaggggcttccataatttaacactcttcaaaagcacagacaatagcaagggcagctggggtgggggccgggcgagggctggaccacccccggccctgcccactcaactgaggggcacactgcagacctggggctcttgtggcaggggcggggagtctctccccaggagtgaccagtcacatgctggggacagggatgagggtaacactgatgtttcaga

SEQ ID NO: 468204 - DNA, 1000 bp, Homo Sapiens; identical to SEQ ID NO: 338073

SEQ ID NO: 468205 - DNA, 1000 bp, Homo Sapiens; identical to SEQ ID NO: 158478

SEQ ID NO: 468206 - DNA, 1000 bp, Homo Sapiens; identical to SEQ ID NO: 338074

SEQ ID NO: 468207 - DNA, 1000 bp, Homo Sapiens; identical to SEQ ID NO: 338075

SEQ ID NO: 468208 - DNA, 1000 bp, Homo Sapiens
tttttttttttttttttaactttgcagcatcctgctctttattccaaaagagttccttaacaaagttttatgacccagaacgaaacaaaacaaaacattggtgttattgagggaattaaatctaacattgagagaaatttggatttaagaaatatgttatttaaaaagtatgttacagtattaacatctggcaatatataatctattcagtcctttctagccatttgttggcaagaaataataattaaattttttattaaaacaaaactttttacattgggagttattaagagcgcctccttttggtgtattcgtttacaaataaaaatgaaatatttatttgcatttttattgtgctttatgttgtttgctttatgttgttctcttgggcttacttccgagttggagatgggaaagtgcccaatgaaagaaatataaaagaatactaattggaagctgaacaattattttgctttataagggaagtcctgcaaagtttgtcatacagtttacgtcactataaaccaaaatacaatccatttcactttccatttgaagacttggaatgtatcatcatctgcgtttctgtcatttcacgtgaattttcttcaggggctgacttcacagcactagaaatcgatacactgacttgccgtttcagcatcctcataacctttctcttataccctttacatgcaaagaagtagataaaagggtccatgcagcaattgaagttcatcaggcatactgtaaagtgcagagaaatctggaacgaatgtctttggctacattccaggaaattagagaaacgaagcttcttaatcatatgttgaataattgcaacatggtaaggtgtgaaacagagaacaaacacaacaataataagaataattgtgttgagagcctttttgtttacaccagatttctcagtgagtgggttttgtttggcagttctgaagagtttgcagcagatctgagaatagcagatgagaatgattat

SEQ ID NO: 468209 - DNA, 1000 bp, Homo Sapiens; identical to SEQ ID NO: 161159

SEQ ID NO: 468210 - DNA, 1000 bp, Homo Sapiens
tctttttggtaataaaaaatttcttggtttaggcgaaatactctgtgcaaccgcagtaccgagggggagccctgcccccccatccaccctccccttcctttgcctccagtaggggagaggagaagggggaatctctgggcaggggtgaatgtgggagaaaactgagaagggccagggaggggagaagtgccagcagggagacacaccaatccatcgctgcagtctcgcccaggtggggcggcgcacggccggcagcccgtccagctggcccgcccccgccgcccccgctcctggcagcctgttaaagcttcagctcgttggctattttggaggcaatgtttttgaaggccatggaggtgcccgatatccgcttaaatcgaaccccgttgagagagagccgcggcagtttgcacacctccatctcccactgcacgaagtcctcgtggcccggcgtgccgtgcatgcacagcagcatgtacttctcatgcagctcgctctggcagctgttcgcgtccagcaccttgcggatctcccgcatcatctcgttgggctccatggagctcgtggtcttcatactccacgtgaagcggagggagcggggcttggcctcccgaaattcttccttttctttgtcgttgccgccactgcccaccacgtgaggtctgagcgtctccactcggtctttgctttcaggttcattcaggttcctgcgtacaaacttggaggtgaacttgctgaagatgctcccagaggccccccgccggccctggctgtggccagagggagaggctggggtcacaccgtagggcaaattctgctggtcccgcacctgtcggagctgcccagcatggaaggtgcttcggctggacacaccccgggggaagttagttcggtctggggctccaccactgctgctgatgttgtgggcggatggggaggcaacagggacacgctggggggctgtgctgtctttgccattctggatggaggcctggccgag

SEQ ID NO: 468211 - DNA, 1000 bp, Homo Sapiens; identical to SEQ ID NO: 338077

SEQ ID NO: 468212 - DNA, 1000 bp, Homo Sapiens
tatgtttaaaattctgatgtcatttattggcacaaaaattattctgatacaacatggtgtctagacatggctacactttatactttgtgcatttagttgagtatttgttctgctcataatttccaatatgtaccagaccttccctgtgttcagcacctccatgacagtatttctgttttctgagcccttgctctaaacagagtattttgaccactgaaaacatcccagaaccctgctgcagaaggccagtgagggtggtcccactgcacagtgatcccctctgtgcatctgctcagccgaggctgccagcgatctgaataaacctccctactagcggtcaggtcttgaattgaagcgtgtgagtcgcagcatcactgggtctgatggaagacagaccttttgtactcattttggcctatcttgcaaacatttctgctgctgtccacagaccagtgaggtcttgggataggtggcaggggtgaggtcagcatcttctgtgtctttacagtctaggatcctaatccatgttctccacgacctgaggcttcttggctgtgctgagtttgctgtacccatgttgagaggagcaactaggtcattcttccatcagcaagtacttatgatgagttctcttgtgagttaagtcaaaacccgtatttctaaagttatggatcttctgttccccaaaatgaatggcttgatttacgtggtattactattgtttcactgtcctgggaaccaaatcaagccttgtgtttctgacaatatattcttcaacagcagctagaaagttggttcaaaccaacttttaatatacagtagttcttttcatttacatttcaaaatatttaacaaagtcaaactttctcaccatggtttcagtttagtggaagcatttactaaagtacaaaagcctcagaaaaaacgtgatgggcacatctgggcctccagttaccagaaagggcaccagccaatatagcactggcagaggttttcatgg

SEQ ID NO: 468213 - DNA, 1000 bp, Homo Sapiens; identical to SEQ ID NO: 338078

SEQ ID NO: 468214 - DNA, 1000 bp, Homo Sapiens; identical to SEQ ID NO: 158479

SEQ ID NO: 468215 - DNA, 1000 bp, Homo Sapiens; identical to SEQ ID NO: 158480

SEQ ID NO: 468216 - DNA, 1000 bp, Homo Sapiens; identical to SEQ ID NO: 158481

SEQ ID NO: 468217 - DNA, 1000 bp, Homo Sapiens; identical to SEQ ID NO: 338084

SEQ ID NO: 468218 - DNA, 1000 bp, Homo Sapiens; identical to SEQ ID NO: 338085

SEQ ID NO: 468219 - DNA, 1000 bp, Homo Sapiens; identical to SEQ ID NO: 338087

SEQ ID NO: 468220 - DNA, 1000 bp, Homo Sapiens; identical to SEQ ID NO: 246452

SEQ ID NO: 468221 - DNA, 1000 bp, Homo Sapiens
ttttttttttttttttttcacttgcacaactattgctttccatgcagaaccagatacacactgtagaacacactgactacaatgcaggctattatgcaacatctgcattagttccattgagctgtgagtacggtaataggtttcaatcagacatcagttaacattttggtaatattcacatagtttgtgttagccaaggtacagttggctgttttcaagttttcctctctaaagtcctcattactgttatttacaccctcctggatctccatgtaatcagacttactaatggtagaggcacttctacttttctttaggtcaggggaggatgggatctttggacagcttgtcacttgcaagtattgggcctgttcctctccctctgtctcccggtggtagaagtagttgaaattggacacaatgacagggaccggtaaggcaatagttaacacacctgcaatcgcacatagggaacccactatctttcccccaatggtagtcggaaccatgtctccatagcctacagttgtcatggagacgactgcccaccagaaggcatctgggatgctggggaactgggactctcgctcatcggcctctgcaaaatacacagcactagagaaaaggatgacccctatgaagagaaagaatatcaggaggcccaattctctcatgctggctttgagggtctgacctagaatctggagacctttggagtgtctggacaacttgaaaatcctaaagactcttaccaaccggatgacacggaggatggccagtgacatggcctgctggccttgctgagcgtcctctggcttctcagccaactctgtccccagggtgatgaagtaggggatgatggccacaatgtcaatgatgttcatgatgttggtgaagaagccggctttgctgggacaggcaaagaacctcaccaagaattcaaaggagaaccagatgatgcagagtgtctctacaatgaagaaagggtctgtgaaggaag

SEQ ID NO: 468222 - DNA, 1000 bp, Homo Sapiens
aacttgaaaaccacagaaaacaaaacagaatttctattatagtaggtactttccttgctgcagcaggaattattcagtctgaactgggcatttcaatgcgtggtatttttttcctttcatttttgcaagtaaaaaaatcatatttttatgctgttcttcagtaacacacagtctctttgaataaactatttcttttgcatatttgacacttgcatatcttttgagtctacactagtgatgtaaagaaagcgtgttcctcctccaaccctaaaacaatgctctgagttcatgctgttggctgggtgcccaccttctgaacccttcccagattgccagggggcaattagaattgagtacaagtggtgcaactcaccctgatggtatctcaaaataaaatctcaggtactatgaaataccgaagtcaatgaagacatttgagtaagggttttgcgctgggatcgtggcttatggcgcagagacttccccatgaccaatcattccctgtagctgtctaacagtggaatccatccaggaggtgatggacaggtgttcctaggggtggctgggcaacattcaataccaaattggtcaacccactctttcaacaccagccgcttgttccagcatccttctctagctgaagccaggaggactgtcaatgttgccctccgaggctgagatggaaagccacgagagaatggggagtatgtggcctcggtcctgtctaaagtggtggtagtggtggctgtgagttccactcatgtcatctcccaaagagggctatagagttgttacaaggaggtgctgtgccctatggcttggccaacttcatgctgatggacctgtcatggctctcaaggtcttagggagccttctctggagtctctcttctctctgagggctttacagggcctttctgttccagagttcatgcagaaaagctctgtggcaggtaagctgaacagctctcctctttggacctcacccaaaagtctctcct

SEQ ID NO: 468223 - DNA, 1000 bp, Homo Sapiens
tcagatcgacatgcctctaagaggtttcctacctgctctgttaatttctaaaatttcttcctgggccagcggacatgtgtcactctgagtactgtggtgtggagagtttacgacagatttacaataattgggagatcccagctgcggtggccgcggaatatgcttcttttttttctttggtagtttctgcttagccatggctaaggagtaatacatcccgaaattgttcacgatgacgggcacgggcatggcgatggtgagcacgcccgccagcgcacacagagcccccaccagcatgccggaccacgtctgcgggtacatgtctccatagcccagggtcgtcatggtgaccacggcccaccagaagccgatggggatgttcttaaagtgcgtgtgctcactggcgctggggtcattgggctgtgcccctatcctctcggcgtagtagatcatggtggcgaagatcagcacgcccaaggccaggaagatgatgagcagcaggaactcgttggtgctggctcggagcgtgtggcccaggacccgcaggcccacaaagtggcgggtcagcttaaagatgcgcaagatgcgcacgaagcggacgacgcgcaggaagcccagcacgtccttggctgccttggaggacaggccgctcagccccacctccaggtagaagggcaggatggccacaaagtcaatgatgttgagcgagttcttgatgaactctaccttgttggggcagaagatgacacgcatgaggaactcgaaggtgaaccagaccacacagacgccctcgatgtaggtaaggaaggcctccgtctcggcctcccggtagtagcgcacttgcgtgccattgcgaacgttctcgatctccgtcttgttcacgatggggttgaagcgctcgtgggtctccaggcagaaggtggtgatggagaccaggatgaagaagagggaagcgaaggccacataccgcgcgtagcgggacgagtacgggtcctcgaag

SEQ ID NO: 468224 - DNA, 1000 bp, Homo Sapiens
gcggccgccgtagcggggctgggggctgacctagttgtagggaaagagagcaggcagggggtggggtctgcaagggggctgagtggagcgaagctggcagtgcccttggggaatccgatgagaactccaggagcagtgggggggggtggggggggagggaggctcctccagaagattctaaggacggggtcgggggtggggggcggtgaggcggagggctggggagagggacatctttaaagggtccaagaaggctctgagcttctgacgggtgcgggaaggctctcacaggcatctcacagctaatgggactcaagatccagcaacagtgtgtgtggtttctgcaaagcctggggctgcctgcagggttctgcacccccgcagggagctctgtggcttttccaggcaacgctaagggagctgtctggacaaaaggtgtcttgatcgtaggagggagggcttggggggagatttgaagcccagtgtcttggggacaccccctcccagccattcccaattgctaacctggggggaaggggcgggggggaccgaaagtctcgcgaggtctcaggcggtgacaagagcccggggggagggggttcgtccactagggggatatccaggccgcggcgttggcgttgaggtcgggcaagaagcttggggggcctggcttacgccagtcttgggggggcagtgggggagcaccagtggcttttcggatggagccatcaggggaaggggcatagtcggtgaggaggaagcaggctcggtcccggctatagcggccacggcttccaggcgtgatggggctcttgtcttccggggacatggcaggctggtcaatggctgggcagtcctcgtgggcaagcgcagctgctgccggatccccattggggcgaggatctgcccggttgatctcaatcacctcctcctgagccaacgggcaaggctcgccgggggctggcagaggaggcagccccatgatccccagcccacccgc

SEQ ID NO: 468225 - DNA, 1000 bp, Homo Sapiens
ttcaccaggttacttgctgacaggggaaacatccccaagacaggagcctgggactacccagctggactggcaattcccagatgcacttttcttgggacattccacccacacagtcagcagaaacaacagaaatcagtgaaggggacgggaaactctgggtggggcaagggcttagggagacacagcctaacaaagaagacaaaccaccaatagcacgtgcactacacacaagagtataatatgtatgaatatagatactatatgtgcatatatatctcttcgatgtacaatggaacagaacatcagacccagatggctctgggccccgagggtcgcatgggagattttccaccagtcctgtgcaaacaaggatatctgagtctttcccagcgaaaagattcttgtctgggttccagagtttccctaagcctctggctttctgtctgtctgcctgtctctctcacgttggtgccgctttaagagagggtgaggacttcagcctgggcatagttggacgagagggcgtcttggcaggtctctgttcaggtaaccactagctccaggaaccactagcctcttaggtcttcaaagctccagtgcagtggagaaagggaccatagctctgcagccttgcatggaggcagtggggaaagttcctgatgtggcctgtggctcacaggccatcaccccagctgttgcctgaccaacttgagctctcccccaagtagctccatctgctgtcaccaccctgggatattccattgtcccaaggagctggtgaagaaggctcctgagtatgatgccatgtcgtgcccagcccccttcctcaatgtggcaggaacagagtcccagcagttggagggcatgcagcctcaggtgaatgctgaaggggaaggtcacggaggacgaatgtgcctttccggacactaccatcggcgcaggcatagtccccagtgctgagcaggaagcaggcagctgccttcttgtttctgtctcgagt

SEQ ID NO: 468226 - DNA, 1000 bp, Homo Sapiens; identical to SEQ ID NO: 246453

SEQ ID NO: 468227 - DNA, 1000 bp, Homo Sapiens
tacaaagaaaatgttttaataaaatattcaatacagtatttccctgtggggattctagaagaagaagtgagatgctgaaggaagtgactgtcactgtggggaacccagtcctaaatgagacaagacttagctttccttcaaagacaccttgtccagctctgcccaacaggccgcaatgagatggaccaggaaaccttcaggagtcaccgacagacaaagcgaatgaactgaatccacttacaaacagatccacttaagcagtttttgcctcaggcttcctaccaaatgcagttatcatggagacaggagaaggctgatgtacaaaacgcattaacatgattttgttttttcccctcctattctatttgcatttccagagtgatcattagtaacacagcgatctgggtttcaccaactaagcatttcaaacagactcatttcttgaccaaattttgtgctcaaggcctgttactattagtgtaattcttgtgtttcaaattgagagaaacgagcatacccacccctgcacataacttaagtatatcactgcgaattctacatgtatgaaacaagcataagccatgaatcctccacttggtgtgttactttttattactacagaaagtgctgttgcttgaatatgaatatcatttagtgtaataaaatgtagaaggacacattattgtgttccagctctggttcagtctggcagtgcccagcataaaccgtcaaaacttgataaaagactgtcttggggttatcttgctgtcatgattccgatgtgttttgatttccttctggagtcataaattgcacctttggtaccatgagggaagaattgttccttcggatagaattgttcctcctcatggaattgtttcttctcatggagttgcgcttcctcagagaattttgatgagacagttcactcttttggagggtctgaataaggatggaaggtttctcatccagctctcgggcactgcaccgtggagcagct

SEQ ID NO: 468228 - DNA, 1000 bp, Homo Sapiens
cttcatctctctgtcgggcctgctcagcttccagacaccccctccacttgtcactgccctgtttccattgatggttgagtttctgggcccaaagttaaactcttcagcctgggcttcgggtccctttcccacacataaaaccccacccttcacatttctctgtctgctcctgtgaggatcctcagcttcttctcagcttctcttcatcttcctctcagctactcctcagtttctatgccccatgtcctgaaacgacttccaagtattcacttagagcacaggttctcaaagtgtggtcctcagtccagcaacagcagcatgacctggggacttcttaggaatgcatggttttggtccccacctcttgggtcagaaacccttggagtggagcccaaaaatctgtgttttaccaagccctccaggtgattccaacgcacactggagatttctaactcctgacttacatattccctatgccttacactggccccagccttctgatcacccacactcccctaccctccacgggactgcacaggttgtcagtttgaattatccctcgttcagtcaccacaggtagattcctctgttttcccaggtgccccttattttgaggacaggaaccaggtttttgaatgtccactccacatggcacccaatcagtgatgtgaatgactgtgccccaaggacacactgctttcctaggggctccctgtttcccagctctagtgaacccactttctagatctctctcctggcccttcctccccagaacctctctctctctcttcctgcctgtgcctgatacctgtaagatctcactccactgtaagaaaatagctatccctggttttcctttcccaggcccctctccaggccccagctcaggcacctccccgctctgcctgcttccctgaacttgcggactaaggtcattcacaccttgctgagccccttgcacgccttcatcctggtgagggtggagctaggagggcaccct

SEQ ID NO: 468229 - DNA, 1000 bp, Homo Sapiens
gaaaattatatgtctcaattagcagcccttccattttaccttcccctgtgctatatgtgaaagaggagggaggaagagtctatttctctgtctcatgatgctaagacattcttctgcttaaggctttgtgtgtgtgcatgcgtgtgtgcatgtttgtgtgcgtgcgtgcgtgtgtgtatgaagggtcacaaccctctagctcccatttttccttttgtcatctctgtgacctctactcagtgactaacaccactcagtgtgagacgagtagatgagaaagaagaaacattcaccctcctccctattgccccaaataaggaaggtagactatgctttgaaattgctaaatacatcagtagatacttgagaataagacagaagagagacatagcagcagcttttgatatatagatacagagtacaaagagatacagagtaagtaagagaagacatcaaacatagtacagtccaacaacaggggttggggagggagttagtatcagagaccacaggtttgcagcatgctgagaagaggcctcagtccctcttagaaactgaaagtgcaggtatgcagccgtgggtgtgggagattagctggctgctgtctcttggtggagagggaaaagcttggcctggtcctcagcctcatagccacacggcaggtcactcctattgtcattgatatctgtggcatttccattgtccatgttggccttctggtaggaagccaaggggccgccagaagatgtggctccactgctggtacaggagtttgcaaagtacatatctgaggtggagctgggtgtggcctgcaggtagagattctggtagttctggaagaggctgttggtgtaactgatgcactcagggctccgggtgccataggggttggtgggtgaggatgctgggtagtggccaggccggacgggtttggcaatctgggcagaatggccccgtttgcccgagctcttgtagcgaacggcctccttgatgcggtcca

SEQ ID NO: 468230 - DNA, 1000 bp, Homo Sapiens
ttttttttttttttttttttttttttttttttttttttttttttttaacaggaagaattctttattcagatttaatttctcttacattctcaaagaagccaaggaaatccaggtatgcatatatctttaaaaattttacagaatagactgaggtataaggcaagaattgactatctcttaatttctttagttctttatctcatctattttactgctcatttttcacatttctaagtacttattccactgctgttattatcccaattcacaaaatagaatggatttcccaatctgaataaaacacaagactcttacccttaaactatatacacagaactgtgtgactgctgtcattcataaacttggatgctgaagttcattcaaccatcccttaaaaaaaaacatttgaacaattccaaaagagaacaaagataaatctccaagtcacccaatagaacagaaacctactactgagaacactgaccgctctcttcagagtgaagaatgggcctcatgtcacacgaggcaggggaagctgctggacgcggccctggaaggtgcactggcccagtccccctcccactggccctggctgcaactcatgctcagactccctcttcctcctctctcaaagctgcttcacgcagggatgggaagaaaaagcgaactcttgcactgaccttgatcacatactcaaggactttcacatagctggtttcagcaagggcccttggaccccacaggaactcatagcgtgcgggatcactgtccggcacctgccggtactccaggtacttttcctgcaccaaatcttgggtgagcagcttcctgggctccccataggcactgtgctccctcccatcatacacctccatcacactcagctcctcccagatttcctcctcaggagcatggccgccctccattgcaatcatgaccaggacaattatcaggaagcctgtcttgggcatgatctgattatcacccagcaggccatcat

SEQ ID NO: 468231 - DNA, 1000 bp, Homo Sapiens; identical to SEQ ID NO: 158483

SEQ ID NO: 468232 - DNA, 1000 bp, Homo Sapiens; identical to SEQ ID NO: 338090

SEQ ID NO: 468233 - DNA, 1000 bp, Homo Sapiens; identical to SEQ ID NO: 158484

SEQ ID NO: 468234 - DNA, 1000 bp, Homo Sapiens; identical to SEQ ID NO: 338092

SEQ ID NO: 468235 - DNA, 1000 bp, Homo Sapiens
taggaaggcgaaaacacatgtaattttatttttgtttaaccttaagcttgccaacttctttccctgaacagcatttgtcttgttttgatacccacctacacttatattagaaacgtactgcaaactatttagtgactccacttttaatttatggtcgtatgactaagatgttttgaatataagcctatcggtatgccagatataaatttcaggaactcttaatgtctcttcttttacagaaactctacctctatcctgatgtaattaggttgattaagaaaattaaaggccacgggccagaaaactaacttccacaaatgcaacaaaaggaaaatttctccaataacctgtatgcaatgggaaatctttcttttaagtaccaagtcaatttctttaactgtacaatgtattctaatttgaaggttttcaaatataatacagtaacaacaaaatataataaaattaagactataagaaaacagagtaaatggtataattcaataatgactaaaataaaatgacactatggattttgtaatcaacctataattatctatttaaatttcactttacatacataagatcacagctgaggttaaccataatttcaaattttatcaccagccacttgtgctattttatcacatttgaaaatattcactcgtattatttacttcaaacagtaatctataaatttgtttagactataataattaaggacctttccttcttcaggataacttaaaaaattaaatgatgtattgaacatactactaaagaaagtttactttttgattatggtctctgcattgaaaatctgtaggaatttttctttaataattttcaaatcttcccatggcctctctgttcacagaaatatcatctttgaaacaacttgtgtgagtactttataaatcaaaaattgattcacatgaccatattaccataatcaccaattttaacagtctcctacatattttctatatcacttttcttgatt

SEQ ID NO: 468236 - DNA, 1000 bp, Homo Sapiens
tttttttttttttttttttttttttttttttttttttttttttttttttttttttttttttttttttcaacctgaaatgttttaatagtggaactgtgtacaggatcctctaaagagaccgcctggctgggtgctcaaaccacatgggccgacccaaaagacgccaaaaccaagagctgctcaggaggcactaaatgttgacggtcttggccggcttcacatcctcaatttcagcagacagccagcggtaagtgcgatgacgccgcagcacctcaatggccttgagttccagtggtgttgcctgaataccaaggtcttctaagccaggcaggtgaggcaatttcatgtctgtgatgtgcatccgctccactttatcccttgttatccagggctcaaatgggcttatttcaaagactcttgctacccatcgataggcaaaaagcggcaaggggaatgggaggaacaatctgtgagccacagcaaagatgtacttcaccaggtggaaaaggaggtaccgactgggaccaacgaaagcaaaggatttcccattggcatcaggatccttaactgcattaacaattcctttggatacatctacgacatatactggttgtttaactgtcttccagcccaaggaaccaaggggtataggaccaaaccgatgcatacttgcaaaagaattaaggaatctatcctctcttccaaagatgtccgacggctttacgataatggcttccggaaatgcatctctcactactttctctccaacagccttatttctcaaatatctagaagagcttttaatattcgcattcagatgtgaaacatgaatgaatttttcaactccagcttccttggacagttgagcaattgcttggggaatcttcacaaaaacatcctcaaaatcaaagtttttggtttcccagtctcgtccaataagattgatgaccacattgctgtgttgtactactcgtcggatagaatctttatctctcgcgtc

SEQ ID NO: 468237 - DNA, 804 bp, Homo Sapiens; identical to SEQ ID NO: 158486

SEQ ID NO: 468238 - DNA, 1000 bp, Homo Sapiens; identical to SEQ ID NO: 158487

SEQ ID NO: 468239 - DNA, 1000 bp, Homo Sapiens; identical to SEQ ID NO: 338095

SEQ ID NO: 468240 - DNA, 1000 bp, Homo Sapiens; identical to SEQ ID NO: 338096

SEQ ID NO: 468241 - DNA, 1000 bp, Homo Sapiens; identical to SEQ ID NO: 338097

SEQ ID NO: 468242 - DNA, 1000 bp, Homo Sapiens
atctttagaactttattttgccaacactaatttaatcttgcaaacaaagcagttatttctttgcaaatcattttgtaacaaagaggcctttctatggttgtatttttacaaaaacatttatcccagttaaaatggaacacaataacattgtttaggatagttgctgaaatctgctaaaatacaaattgcaatgagatagtttggtgttttttagttgtccaaataacagctttataattttgttgttttggtattctgaggcaaaaagattagttaattttgtgaatctgtatgccttgggtccttagtacctggatggcctcttacaaatcaaaaatatcattctatgtgctatgtggtgagctagggggatggatgtcataatggtgagatcacaaataccagtgtgaaagctttcctgaagaagaggtcagagaaaatggtctattccttaaatgaatgcttgttacattaatataccttcctgtcatttaaatattgtcctcagagtgatcaggagggtcgtggcctgtgggtctttactgctaatgctacttccttcctcatttttagaaaaattactgttaatagaaatgatacactcactttctttaacatgatatttctatatttaaaaagagcataagaaaccattaacgtttaatttatgattcccacttgtcattctaatttatatttttaaagatttacattattttgagtaagttctaatcctatgaaatgatgcagatgtcaccaacaacttaaattcaattctgatcttatactaatacataattctaaatatattactttgagtaatacatgtttacttagatttactatattaagtataggttttgtgaagtcgtaagtgtatacctatatagtttcttgctattcttgattttcataataatgaaggtcaaagtgcccttctgctccttcttgttctgggctctcatgagcattgtcaggatcatcgtgatcttcactttca

SEQ ID NO: 468243 - DNA, 1000 bp, Homo Sapiens; identical to SEQ ID NO: 338098

SEQ ID NO: 468244 - DNA, 1000 bp, Homo Sapiens; identical to SEQ ID NO: 338099

SEQ ID NO: 468245 - DNA, 1000 bp, Homo Sapiens; identical to SEQ ID NO: 338101

SEQ ID NO: 468246 - DNA, 847 bp, Homo Sapiens
ttttttttttttttttttttttttttttttttttttttttttgttagtagaatcttttttattcagaaaaaaaaaaccccaaaaaacaaaagttttccaaccacacacgggagggatatgggtagggggaggtgtctgtccatccagccctggcccccagcccatgtggttttggcagcaataaggggtatggggtaatggcccaaaaaataaaatggtttgtgtgtgtatggggaggaaaggggtgcaaagctgtggggagcggtgaaggggaagggacagacgaggtcagtactgggaacgccgaaggtgggaggccatttcataacatttcttgttgatcaaaccaccgtggacaccttctttgcccatcagcaggactagcgtcttgtcagtcttggtgacagtgacattgaaggtgggggccccaccggtgctcttggtacgaagatccatgctaaattccccatcctgcagcagtgagtcccggatcaccgaacatttctggcccccaagtgtcagcccattcacgtaaaaacttgaccggtctttgccaaccaggacacccacctcagctggcgtgatgttgacgaacgttttcccggggacggcggcccagacggagggcgagtccttgtagcccacgatggccgcgtcctgacaggtcccgtccgccatgaggttgtcgatgtaggcgttccacccggccatggcgctgctactggggctgctctcggcgctgctgctggggccgcggactgggctcgagctgcctcggctggcgggcggggggaggcggagagctcggggcacgcgctgccgtccggaccgcggctccgctcgctgt

SEQ ID NO: 468247 - DNA, 1000 bp, Homo Sapiens; identical to SEQ ID NO: 338105

SEQ ID NO: 468248 - DNA, 1000 bp, Homo Sapiens; identical to SEQ ID NO: 338106

SEQ ID NO: 468249 - DNA, 547 bp, Homo Sapiens; identical to SEQ ID NO: 338107

SEQ ID NO: 468250 - DNA, 1000 bp, Homo Sapiens; identical to SEQ ID NO: 158490

SEQ ID NO: 468251 - DNA, 1000 bp, Homo Sapiens; identical to SEQ ID NO: 338108

SEQ ID NO: 468252 - DNA, 971 bp, Homo Sapiens
tggtttgcaataaatttatttaatcagaacttcagagggttctagaaacctgcatttttaacaaggactgcagatgattctaggttttgattaaaagtgtggtttggggaagcaactttaccctttattgtgtgttaaattacatatacaataaaacaaaaagtcacgtaatggaacaaaaaattgctttatacaaaatattagtagatacccaaatataatatggtcttaaaaataaaatcatatgtatatagttgtattcctaagtacagtagtgcccccctcatccaaagtttccctttctgtggttttggttacctgtagtcaaccacattctaaaataggtgagtactgtacaagaagatattttgaaagcaagagagaccaaccacattcacataacttttattatagtatgttatcattgttctattacattattattaatctcttgctatgcttaatttatacattatactttatcataggtatatatatatggaaaaaacagtgtataaaggtttggtactgtttgaggtttcaggagttcactgggggccttggaatgtatctcccgaagataagggggaactactgtaagcaaaatcgaaagctatacaacaatcagaaatgggaagagagcaaatccaagtataagtgaagacattcctctgaattcccagcattcatcgagcatcaaaaacgaccaatcttttagtccttttcttgtacattattctgtatccacattctctgcatctgattggatccctagattttatttcattttctgtgtgacactctccacagatatatatcattggttgctgctttggaggttgaacgtccttctgggtgtccattgttagcccctacacagcacggaaaaactcactccgcgtttccaaatacaacccggctagtccaggtgtcgagaccaacttccggcgctggtacatgacgcacagtgc

SEQ ID NO: 468253 - DNA, 1000 bp, Homo Sapiens
tttttttttttttttttttttttttttttttttttttttttttttttttttttttttggggggtggcaaaagagctttatttacacactgacaaggctcacggggtgtcagctgaagaagtaggtggaacgcttcacctgctccaggtcgaaggcccctggcttgggcaccgcctgcagtgtctccttcagctggctggcctccaagatcttctggggctcagagcagaaccgcttgaccaggaatctggacaggtcctgcaggatgggctcgctgtgcaagcggacaaactgctcccggcacacctggttcatgacggagacatcagctgcgtgagtccagtaacagtcgtgcacagagacgaaggtcaggcccttcctgtagcagtgcagggcggtgagcatcatgtgggaggagtccagcgagtggatgaagttgggcgggaagccgttcttctgcttacgtgtgttgggctttcggctgatgtctccgttgtgggtgtaggtgatgctctgaattccacctcctatttgcttgaccttggagtccaggcgatacggctggatgacggggacgcccaggggtgtgacccactccaccacagagcccatgtgggagatgaggcgggcactctcggtcagccagtgctggatggcccgggtccccgagaacatctcctgtagactcttgaagacctggcgtacgagatagtgagaggcctcccacacgaactcctggggaaagtcgctcagctcccggaggcgcttctcaatctgcaggcgcccgccatagcgcgtgaccccgtacaccaccgtcatcaccgtctgcttcaccaccttgcgggtgatgaaaccttccagcacctgtgccacccgcatgccccgctgggcgtcctgcctacggaacacctccacctgcgcggccacgccgctgtacacgtcctgcggcacatccgagggctccaggttgacggaggcggcgcccacgctgtcgcggccca

SEQ ID NO: 468254 - DNA, 1000 bp, Homo Sapiens; identical to SEQ ID NO: 157406

SEQ ID NO: 468255 - DNA, 1000 bp, Homo Sapiens; identical to SEQ ID NO: 158491

SEQ ID NO: 468256 - DNA, 1000 bp, Homo Sapiens; identical to SEQ ID NO: 161224

SEQ ID NO: 468257 - DNA, 1000 bp, Homo Sapiens
ttttttttttttttttttttttcaccataacatcatatttattggccctttatcaagctatgtacatggtgagacaggtcaggacaggcctccatttgtctcaggggcaaagcattgtgggcaaagaagacagagcagctggagctgatggggctccagttaaggcaatgaaggctttgccacaccatagagggctcaagggaagggtcctaaaagaccagccctgagcagcctggtgggaacagcctcttggccttctgcccagctcctggctgaagctgtgatctgtgtagctgtgactgcagggcttgagaatggcggagggcttaggcagtttggacagggtgaatcgggattagcgtgtaaacccagccacctccctgaaaaacagtctgaatctcccttttccatctgtctgatgcgtatccaatcttttggcttctctgggccacgttggaagaagaattgtgttgggccacatgtaaaatccactagcactaacgatagccgatgagctaaaaaaaaaaaaaaaatagcaaaaagaaactcataatgttttaagaaagtttgcgaatttgcgttgggccgcattcaaagccatcctgggccgcatgcgggcctcgggttggacaagcttggtctaatgggaatacgaagacagccctggctcccactgtgagaaccccttcagtccaagcatactggtcctttccaagctcactgttctcaccacacggccccactccggtttcctggaggctcccccagaagcatttgggggacatagtccaggcaggtgcctcctcccaggtggggcaagcacctggcatgatagcggaattttaggtggccatgattcaggttgcatctcacctcatgggaaccagacttgggagcctgatcacaggtgccaaggaggtcatcgtccctgccagagtcctgatcccagacctgcaacctcaggggcccccctgtggccaggagcacatccccaaaatcc

SEQ ID NO: 468258 - DNA, 1000 bp, Homo Sapiens; identical to SEQ ID NO: 338113

SEQ ID NO: 468259 - DNA, 1000 bp, Homo Sapiens; identical to SEQ ID NO: 338114

SEQ ID NO: 468260 - DNA, 1000 bp, Homo Sapiens
tcttcagacttttttccccacctttatttttcatgttataaaagtgcacattcaaggaaaagtacacagaaggaaggagacacctcatgacgaccccagtatgcagtctgggacatgtgttttcagatctgattctgtgaatatttcattttttatgggtagggtcacatacatatatatttttgtccttccttttgtcatttaacatcctatagcctaaatgttcttgaataatactgacaattctgtctaagtatcatttttaataggtttgtaatatcattgtgggctggccgtggtggctcatgcctgtaatcccagcactttgggaggccaaggtgggtggatcatctgaggtcaggcgttcaagaccacgctggccaacatggtgaaaccctgtctctagtaaaaatacacaaaaaattagcctggtgtggtggtgcacacctgtagtcccaggtacttgggaggctgaagcacgagaatcacttgaacccaggaggcggaggttgcagtgagccaagattgcatcactgcattgcagcccaagcaacagagactctgtctcaaagaaaaaaaacatcgttgtgccaagccagactattatttaagccatctggtacttttggaacatgtttgatggtttcacttcatttctgtgataaataatatcatggtaaattcaagtcttgttctacattttggattttttttgtttcagtaggttcttcctaagattagagttactgggtcaaaggtggtgaataagggtctcggtgtacgttgaccaagtgtcttccgtaaagactgtacgaacgtccagttccagtgtttgagagtgctggtctcactgactcttctccagcactgagggttttgtgtttctttatttgttttggttttaggtctttaccaatttgattggtttatcaacagggcatgaggttggtttaaatatatctttgaggaaaggtaaagtcaaatttgacttcataggtca

SEQ ID NO: 468261 - DNA, 1000 bp, Homo Sapiens; identical to SEQ ID NO: 158492

SEQ ID NO: 468262 - DNA, 1000 bp, Homo Sapiens
ttttttttttttttttttttttttttttttttttttttttttttttttttttttttttttttttttttttttttttttttttttttttttttttttttatttttaaaacaaatttttaattgatcccacatgccatgtacaatgtagtaacagctcaaacaagaaaaagatatagatgcagcatgatttgctatcaaaatacattacaaacaaaatcaatttgcagacacaagctcactaactgaggaaatctttccacatgacatagtttacaaagaagaaagagtgaagacctgaggtctggctggtcacaaagaggccattcaaaagaagggatgtgtgaaatattcttttttgagaaattttccttgttcccagaaacacatgtaattgttataaatgcattattttatcaatgtccagccaactaattttccagcaagtacttgttcttagatcttttatcttcccatatatttttttagatcctaattgctcctatgcacaggcaaaataaatgcagtgatagaagtacattaaagtaagaaataagagaatactagtttctaaaaggaaaatgatacacactaaaagatcttcattatatttagggtgatatatatgagagaaagctacagccaagcaattgaatcttttttctacccaaaagtagcagaaaaaaatgaacaatcacagagcaaataccatacattaatttagaggaaaacttgatgccaatagaaggtaataaactactccattgacacttgcattttcatgtcgttagtatttacaggagccaattcatggagcctaaaaactattattaagtaacaccttaactgaattttcagcctttgaactcaagcataggagtatcagccaagccctctcacacaaccagccattggaccagcccatgaaagtcagccacaaatgtccattcagagaacatcctcagtttctccttggcatccttcagtgtctgggttagattcca

SEQ ID NO: 468263 - DNA, 1000 bp, Homo Sapiens; identical to SEQ ID NO: 338116

SEQ ID NO: 468264 - DNA, 1000 bp, Homo Sapiens; identical to SEQ ID NO: 158493

SEQ ID NO: 468265 - DNA, 1000 bp, Homo Sapiens
ttttttttttttttttttgtaggtggagaatgtttattgtataaaatgagaaggggctgccccacctcggggcacaaggaacagaactcccccccaccctccccctccagggaagcccatcctggggcttccctgcacctgcccctgcagccctgagggagaccctgctccctcccggcctccggcgggggccagggaaggctggagccacaccccagaatgaggcggcagagaggacaggatcctgccacccagcctcatccccatgcttccccccggcccacccccaccgctccccacagccgactcagggacaccacacgtctcaacacaacagcggacacgtccagggctgctccccgccagccctcaggctcgggtgggccagggctctagaagacggtgcacttcttccccggcttcttcactgggggcgggcagagcaccgcgcggatcgcctcgtcaaacactgtcttcaggccccgctgggtcagggctgagcactccaggtatttcacagagccaatctcccgggccatggccaggccctgtgggtaggtgatgggtgccagcttcttgtcccgcagccgctcaatggtgtccttgtcgtcgcggaggtccagcttggtgcccaccaggaggatgggcgtgtgggggcagtggtgccgcacctccgggtaccacttggcacgaacattctcgaaggaggccgggctcaccagagagaagcagatcagaaagacgtcagtttgggggtaggagagtggccgcagccgatcgtagtcctcctgacccgctgtgtcccacagccccaagttgactggtttcccgtccaccatcacgttggcagagtagttgtcaaaaacggtggggatgtactctccggggaaggcgttggtcgtgtagctgatcagcaagcatgtcttccccacggcgccgtcgccgaccaccacgcacttgatggcctgcatgggcgcgggccgggcggcggcgggcgcgg

SEQ ID NO: 468266 - DNA, 1000 bp, Homo Sapiens; identical to SEQ ID NO: 338119

SEQ ID NO: 468267 - DNA, 1000 bp, Homo Sapiens; identical to SEQ ID NO: 246455

SEQ ID NO: 468268 - DNA, 1000 bp, Homo Sapiens
tttttttttttttttaaaaatggatttgctaaaacaacttcatcacccagaggtactacaaccccacatcctctgatgaagccatggtgttattcaacagcatctgctgtgggccgtagttagaaatcaccagtgttggaaacagcagacattggggtcagggctgcaagggaaaaagctgttatttgctggtcttgctcatggccatgcctgaagcctggtgtctggaatacttgtgaatgaagttttccccgaaaagcatgcatcactgtggctcagtaagatagtacgactggtcatactcgtcatcttcttctctttttttttttggcagaagcctggatccatgtacctgctcttccctaaaatgtagacccaagacagcaagacttttcaaagccaaaaaacggctccttgccttgtagtaggttcttctcctcagaatccaatctagtcagatttctgatctagatgatatcctcatcttacaaagataaggtgacctgccccagcttgtgagaggttctcctatttgggatgttcttctagcacaaacaagcacaaatcgctgaggtcaatagactgtgataccattccttgacgtctaacagaaataactttggccctgttactcctagttgtatctttagggcattaagtacctggtaacagtggaagaaagtggtactccaatccctctccaactatcctaatgaaggagatccaagcaattagcaccttcagttggtgctgctcctaagttgtaagcctctaactactatcagctggacaaaagccacatcctatatgccctgttagcacaccaatgtattaatactaaccagccaccctagagctcaattaagcatctggccttaatgcagtaaaccacactcaaaggagacatgagatattggctgttgtaccaaagaagacaccctctgcatagatatgttgatagagcaatgtaacccacagagtccatgcaaagaggaagcca

SEQ ID NO: 468269 - DNA, 1000 bp, Homo Sapiens; identical to SEQ ID NO: 338122

SEQ ID NO: 468270 - DNA, 1000 bp, Homo Sapiens; identical to SEQ ID NO: 338124

SEQ ID NO: 468271 - DNA, 1000 bp, Homo Sapiens
tttttttttttttttttttgctcaaagagatcgatttgagtaataataaaacataaaactccggtctcccgcacagccagctctgtgtgaattactctttctctattgcaattcccctgtcttaatgaatcggctttgtctaggcagcaggcaaggtgaaccccttgggcggttacacagcgctctgagacctcgcaggaagagtcgcctccggcctttgttagacattggggcagacagtgcggtgcgcttcagggttcatccaccccacacagcctacaagtctcccgaggtctccggcgtttccttctccagatgcttcttttgggggcccatgaaggccctcttctcttgggctgtctggaagcggccatggccgaacttggaggtggtgtcaatgaacttgagctcaatattctccacggcttggcgactgtgatgcaccaggagggactttctcagcgtaatgacccgcttcttggtaccagcaatacaacccttcagcatgacgaagtcgttgttcacttccccgtagtgggggaagccacccagcggtgtgatggacttggcagtcacgtcgtagctggtggatgcattgttcttcaccagcttcccgtcctccatgtgcgggcccctgccgatgcggaagatcttcttgttgagctccgtgcggtggtgatagcccttctgcccggcccgagcaatggagcagcccacgcgggcggggtgccaggcgccaatgcaggccaccttgcgcaggcccttatgggtcttccgcggcagcttcttggtatgccagcggcttgtgacccctttgacgcctcgacccttggtgacagcaatgacatcaatgacctcactctggctgaacacgctgtgcacgggcacctgcttctccagccgggcctgggcccaggccaccttctcggccaccgtgccaccgttcagctggatctccatgatgtgggccttcttctgccggaagggcagcagtttcatc

SEQ ID NO: 468272 - DNA, 1000 bp, Homo Sapiens
ttttttgcaatcagattcacttcacttttattatgaacaaacacaatctcagattagtacaattagcttcagagttgatattaatagaaattattccaaaattattcttgtcacaagtaactactatatcccacataaaaagggaaaaaatcccacccaatcacagaaaaggcatcctctgtatgtttccgtggcaatgcgttgtttatgtattctcaaattttgtctggctagttatccaccgcttctccaatggattcattcagtttcttggagaaccatatagactaatgacagcatctgggacacacggacgtatcaagttcatggtggacattcctattataaaaaatactcaggtcttgagaattcctgtgctgaaggatcccaaaatgctttctaaaaagcattagtcatgcctcaaaactgccctttgaggtaggtcagtattattatccccattttaacagaaggaaaactgaggcaccttatagttaagtgacttgcccagggtcacacagcaagtcagtggcacagtggttggagaggccctggccttaaccaccagcataacatggccacctcgcttttttaacctttcatgatgacctatttgagctacacttacagagaatacacccaagatactagcaaaccaaggagaaaattttccattttaaatgctacaaccatcttttaacccaaaaaaaaaaaaaaaacttataaatcaaatacattcaaattatttccaccctccatcaaatgtgggcacttaagaaaagcagccctaacaaaagtttccagaatgaagcccagaagggaatcctgcaaatcgtgatactgataatcctccactcaggcccctttttctaccagccacttcagtagggtctcaggtgcaaagggattctgcagagggagtgagggcaggctcatatgcaacactgtgattagaaaagatgtaaggcacctgagctaagttgtcagcacaccccccaaa

SEQ ID NO: 468273 - DNA, 1000 bp, Homo Sapiens; identical to SEQ ID NO: 158494

SEQ ID NO: 468274 - DNA, 1000 bp, Homo Sapiens; identical to SEQ ID NO: 158495

SEQ ID NO: 468275 - DNA, 1000 bp, Homo Sapiens; identical to SEQ ID NO: 338127

SEQ ID NO: 468276 - DNA, 1000 bp, Homo Sapiens
cttgtaaatctatgatagggtcttttttctcaacagtaacctttgttattgaactgctccgatagccttgatttatttttactaaatacagccccaaaagttaataacaaggtagacacaaaagcattttgcagtactttattgaaaaatgtcggtggtatctcctagtaatcaaacctacacctttcaagaatcacggtttaattacaagactcatgaacataaaaaaataataccctcggcttatttcctgtgcacacactcacaaggagctgtgaatgaggtatagctgagtgcgtggagaggcgggcacatcccttcctaccatccagccccttcgctgcatgacccacggtcctaaatttgcaaattgtgactcttaccatgaggcccactgacagacaccctgtagggattgtgtcaggtcctcactaagtgacacagggttggcaaaaaaaaaaaaaaaaaagtcagttcacattttgagagcagttggtgtaggtgcacttgattttagaacgatgagtttaaaacatttgtgaaaacctctttccattcagaaaggtggaaaaagtttcctaaaataaaccattttgataaagcagcaaaatgctgcagtgttgatagtgtgaagaaaattgaaggacggcggttcaatgcattgtgcagttcagagccatgacaggatttttccatgttgagatctttaagcaaaacccataaaaagtaaaaattaatggaagctcattttttaaacactgctggtgctttatgaaaggatttctgtttacctgttgcacacgtaacatgttcttacgaagttttctcgctgtgtagaaaatgcttaaaatgtctacatcattttcattacacccccttaagcatgtttttccttcacaaggtgcagtccattgacagtgttccgtattgcacgtgcaatttaactttattagcactatttgtagcaaacacgagcctagtgaattacagatctgtgtgg

SEQ ID NO: 468277 - DNA, 1000 bp, Homo Sapiens
caggagtgtggttataatgagctcaaagcctgtgccggtctggtctgtgaaaggtgaggcgaggtcaacaccccgggcagaagtcaggggggccactctagccatggcatcaggagtggttccaggcacatctctaggtcctgaggagccccccagcccagggctgggctctgcctgaggcccaggtgtcaatccctaaggtcttggggtctctgaggggcactgtcttcagggtcacactggcatgtgcagctcattgtactcatcctggccatcctcatcgaagtttggttcagcatcttccgagtccagcgcctgcagctccctgtcctggaagagccggggcagaaggcaatgcctcagaggcaccgtgagcagcagcaggaagggaaaggcgagtgaggccgccgtggacttgaccacccagagcagtgcgatgcagcccagctggatgcaggtgaacagatgcatccgccacgtcttcaccttggtcacatagggctgctcaggatggtgttttgccggcatgaggatgagcaacagacgctgggacagctggataccagacagggacgtgacccccatgtacaggaagatcccaaagagcacagccaatgggatccgacgcagcacagcccccatgacgatggacaggcccacgaggctggcgatgagcacaccagtgacccgctgctcccgcacctcctggatctggggcttgtcaccaggcgcgatggcagtacgcatcactgtcaacgcattgacatgggtgacggagcggaccgtggcagccgtgagccagggcaacccaaacagcccacagagcccccccagggagccaatgaggagcaggtccaggtggaaaccggagcccttgagcagcctccgcgccttctggctgacgataagcgccgtgatctgtgtctccatgaagatcaggatgaggacgaggagggcgggaacagcggctgccaccatcatccacggcgggaaaggacgg

SEQ ID NO: 468278 - DNA, 1000 bp, Homo Sapiens; identical to SEQ ID NO: 158497

SEQ ID NO: 468279 - DNA, 1000 bp, Homo Sapiens
taagaacagaaatttatttcacaccattgaaacttcaaaaaaaatcattactcggccttcacctgagcctgtctttcgagttatccataatttaaacacaggtagggactagaaaaacaaaataacaaaaacccaaaggtaaagttatcagttaataccagctggcccttatcacagccattttaaacctgtacgttcacttttggccttggctcctgcctcctttagaatagttttcgtaagagtattagaaatgaacagtatggaataggaaactttgttaccatttcaaaattaagctagtccaaaataacatcatttgtgtgatagggaagatgaccaatgtggggtgggctcacagtactctaagacagtgtgtgtacgtgtggcttaaataagcctttcaaacagaagacttcttccagagttttagattcactgctggctgcttagaaaatagcgttcacggccgggcgcggtagctcaagcctgtaatcccagcactttggcaggccgaggtgggcagatcaccaggtcaagagatcgagaccatcctggttaacatggtgaaaccccatctctactaaaaatacaaaaatagctgggcgtggtggtgcatgccgctaatcccagccactcgggaggctgaggcaggagaattacttgaacctgggaggcggaggttgcagtgagctgagatcgtgccattgcactccagcctggacaacaagagcaaaactctgtctcaaaaaaaaaaaaaaaaaaaagaaaagaaaaagaaaaaagaaaatagcattcatggtttagttcccaattctgaagtcttcctcatcaggggccatccaatggagtgtcctgctacctgggggcagaggtcagggcatctgcgggcccagtccatcctccacttgcctcctgaccttcacatctgtttctgtgaattggcccctgacatgaaatatgggttactcttttccagtctgtttttcttttcatcctc

SEQ ID NO: 468280 - DNA, 1000 bp, Homo Sapiens; identical to SEQ ID NO: 338129

SEQ ID NO: 468281 - DNA, 1000 bp, Homo Sapiens
tttttttttttttttccccaacaggttgagaaaccatctttatttaagaactgcctgctaccagagtcaataaataactatcattacaagaagtacaggagagaaacagtaggccaacgggagtggttccattttaacaaacactgagtcaagtcagtggtctgatgaagccctagcatttgccaagctgtgagcctctctaagctgtgcaggccctggatgggacgggtaagttggaggagtcttggggccgaggcaagatgtatcccatctaagggcactaagtgtcataggccccaaaggctgcctggggctgtggccaaagctatctgacccattttgtttctctcattttcctttacgtcctgtcttcccaaagcctatgaccatatacacaagtccacgggtgttccgcagctaccaggtgcctgtttccatggagctttttgggggcacacagaaaaatgcccacctaatgccttttatgctaagagcctctctggcaatccccatcacatccaggaggaagcctagggtgggtgtcacccagggagacagagcaccactgtcatgccagtggccacaggtttgaggatactgtgtctcccaccaatgagccagttggcagtcccattctgagaccaggcagagaaaagattcctctgtagctggggaagagattaagggagtcaaacattcctagccattttgggctcttgcccagagtacaggctggctggcccttggggctgccctaaagaggcagcatacgctgggatgagcactgggctgtaaccagaattcctagatgagcccccttaatggcttcccataaggtgcagggccacagaaggtgggatctccaagacttcctgggctgaacactttgattctaagagtctcatctctggatggacacttggaccatctcctgcccctccagtcacagcttcacctttcccaaatcccatgtcaacagctgtcaaaattcctcaaagct

SEQ ID NO: 468282 - DNA, 1000 bp, Homo Sapiens; identical to SEQ ID NO: 338130

SEQ ID NO: 468283 - DNA, 1000 bp, Homo Sapiens; identical to SEQ ID NO: 158498

SEQ ID NO: 468284 - DNA, 1000 bp, Homo Sapiens; identical to SEQ ID NO: 158499

SEQ ID NO: 468285 - DNA, 1000 bp, Homo Sapiens; identical to SEQ ID NO: 158500

SEQ ID NO: 468286 - DNA, 1000 bp, Homo Sapiens; identical to SEQ ID NO: 338133

SEQ ID NO: 468287 - DNA, 1000 bp, Homo Sapiens; identical to SEQ ID NO: 158501

SEQ ID NO: 468288 - DNA, 1000 bp, Homo Sapiens; identical to SEQ ID NO: 338136

SEQ ID NO: 468289 - DNA, 1000 bp, Homo Sapiens; identical to SEQ ID NO: 158502

SEQ ID NO: 468290 - DNA, 1000 bp, Homo Sapiens; identical to SEQ ID NO: 158503

SEQ ID NO: 468291 - DNA, 1000 bp, Homo Sapiens; identical to SEQ ID NO: 338138

SEQ ID NO: 468292 - DNA, 1000 bp, Homo Sapiens; identical to SEQ ID NO: 158504

SEQ ID NO: 468293 - DNA, 1000 bp, Homo Sapiens; identical to SEQ ID NO: 338140

SEQ ID NO: 468294 - DNA, 1000 bp, Homo Sapiens; identical to SEQ ID NO: 158505

SEQ ID NO: 468295 - DNA, 1000 bp, Homo Sapiens
tatgaaagaaaatgtaaacattttatttggcagttgtttctgtacacatgaataaataaatggaaaagtacatattaatatttctttttggagtaacagataccattaaacgcttatttacacatcttcactgcaaagaacagttacacaattaaattttgtcttataaaaggtaacttcccacatcactggactggacagttaaggatggagatactggtagtgcttggttctagcagtctcaatgtttgaaaggcattcatttgcaagtgtgataagaagagtcatcatgcattgagttcatccgggtcatgtactgtagaaaatttctgatggcagccacagaatttggtgtctcatgcgcttaagtcaactatgacatgtttgtaaatctgtgtatttcccttaaaactggaagcaaaaagaaaattacgcttattaatggacacatgtgtgaatgatcttggtgcctgaacatttaattcctgaaatttcacaaatttggctttctctgcatcccagttatacacttgagtaaaggagtaatcacttccaagaattgcatattggtaattatttatttgaagaggctggaacaccatggatcctcgcgatggcatcctctgaatatcctggaacgaggagcctccccatttcatgactttggaatcaccaatgaatcttgtcaagcaaatgtacacgtcccctttcactgagaagtgcttcactgcgtacacatcctccatgttaggaatgtcagtttggttagtgaataattgtgttgctttgttccactgataaattacaggacgctgggaactactagacagaattaaatgaggcgttctgagtgtctgaggtgttctgactatttctagatattccacatcagtgtccctgtaccacgcgtgtaaggattgatgggagtagaatccgtttccgttccatttgtaaatggtagtaaaaccagcttttgaactgtcagcaacaacaaagtacc

SEQ ID NO: 468296 - DNA, 1000 bp, Homo Sapiens; identical to SEQ ID NO: 338142

SEQ ID NO: 468297 - DNA, 1000 bp, Homo Sapiens; identical to SEQ ID NO: 338143

SEQ ID NO: 468298 - DNA, 1000 bp, Homo Sapiens
tttttttttttttttttttacttcttaaaaaatttattaaatgccattgatttgactggaaccagcaaaagtgctcatgatattgatgaatccataagtagctgtatctagaattcatacttaagaaaaacacacaggcatgaataaaataggacacagtaatgagaatgggcagttctgcagtgtacactttctcaagcacctcagaggacacacacttttaaaaaagtacaattcttcacagacacatgaagcagaacatttgaaaatcaaaacttacttaaatacaagattctaaaagtgaatggcaatttaatggttaaaatttgaccagtggtgaaacaagcagcaagctacaaaatccatcaccaccaacagtttcaatgttagcactaagtattaaaccaaagtaatgcatattctggttttgcttcttcaagaacagcccgtttattctgtttcaatctctctgaacaatactggtaggtaatagttacactgacaattctcacaaaaaaacagtgttggttcttgccatcactgaatttatagtataaatctcccaaggctttaatctagttcatcagtgcagtttagataagaaagccataaaaacaaatgggcatactgtcagttaatgagaaatacaactgcacatgcacaattaatattactctctcttaatctactaagagaacagtttattagtagatttaacaaaaaccatctctagaattcaaaatagtgcccatatttccgttggttctataatataaagaattagtgtagtcaagatctgttaatactgaatcaaacccaagttcaaatgtgctgagtttccaatagcaagaagggtaatggtagccagctctcagaataatgctgtcggaaatctagcttggagcccaccgcagataaagttgctgctctatgtaggacacagaactttcagaatataatcagttaacaagctcggaactttttcactgtcctccttcat

SEQ ID NO: 468299 - DNA, 1000 bp, Homo Sapiens; identical to SEQ ID NO: 338144

SEQ ID NO: 468300 - DNA, 1000 bp, Homo Sapiens; identical to SEQ ID NO: 158508

SEQ ID NO: 468301 - DNA, 1000 bp, Homo Sapiens; identical to SEQ ID NO: 338147

SEQ ID NO: 468302 - DNA, 1000 bp, Homo Sapiens; identical to SEQ ID NO: 338148

SEQ ID NO: 468303 - DNA, 1000 bp, Homo Sapiens; identical to SEQ ID NO: 338149

SEQ ID NO: 468304 - DNA, 1000 bp, Homo Sapiens; identical to SEQ ID NO: 338152

SEQ ID NO: 468305 - DNA, 1000 bp, Homo Sapiens
ttttttttttttttttttttacaaacaaactccattttaatatacaaaacaaacctcacttacatacataaatataatttgggggcataaataatgtaagaaaataagagatgtacatatcaaaataaattactcataaatatcatgttggaaaaccaagtgctggggaaagggttctaggtcttcccccgctgcttccacacagcaagttattgacaagacttggggtcttcaaatcttttcttttcctgatttttgaacaagaagtgcaggttgacataaggtggggggcctgggaggccccaatccatggggaggcatgtgaggtgggcagagggctggtgggctgggagatggaagcaggtgacaccgggacagcaagttattctcaggacagcatccatgacagaactggcctcagggggaattctcaagttgtcccagggctggagtggggctccaggcttcccctactcctgaagcctggtgggccatgcctgctccagtcagttctggcctggagggatttgggaagggcaaatggtccctggaagtagagatatagatcaattcccacatggggttgagtgaaatttacctgctgttttacagagtggatcacctgttcctgaaattaaaactactgcctgtcttctggctgctcctggggaagtgatgagaaaaaattagagaatttcagcttgacataagaatttttccaaaggaagtgagttccccatcgatggaggtattcaagcagaactgagacagtgcagcagcttgtccagcaacctcgagggagcagaatgggggcccaggcagcagctgggcaagctacaggcttacaatgttatgatcagacaagtctattggctagaaactggcactgccaatggaaaactctgaatatgtacaacttctagatgtttcttcctaaagctaaacagaacgtggactcaggactgttcttgtagaagcacgtcccccacgctgcaggtac

SEQ ID NO: 468306 - DNA, 1000 bp, Homo Sapiens; identical to SEQ ID NO: 338153

SEQ ID NO: 468307 - DNA, 1000 bp, Homo Sapiens; identical to SEQ ID NO: 338154

SEQ ID NO: 468308 - DNA, 1000 bp, Homo Sapiens; identical to SEQ ID NO: 338155

SEQ ID NO: 468309 - DNA, 1000 bp, Homo Sapiens; identical to SEQ ID NO: 158509

SEQ ID NO: 468310 - DNA, 1000 bp, Homo Sapiens; identical to SEQ ID NO: 158510

SEQ ID NO: 468311 - DNA, 1000 bp, Homo Sapiens; identical to SEQ ID NO: 158511

SEQ ID NO: 468312 - DNA, 1000 bp, Homo Sapiens
ttttttttttttttttgcttgtaataggctgctggtttaattttagaatcaaaagttttatattgggctactttcaaatatagaaatgctatgagtgacatatgaactattaattttgtttcccattacctacaggaagaatttattcaaataaaattttacaagacaaaatgcaaatctatatacctatatagagatgtatatatgtatatattgaacctaactaaagttttataagcaatactaacatagttctggttacacattcctaaagacttaattgttttaaagatacatgttataaagaggcttatgcaaaaggcaaaaattaagaatcaacatgatcttttgaggttttcattacttcaaaaagctgtttctatcacccatagaagaaaactatgcatttgtttatcttaggaaaaaaaattataaaaagataatgctatcatgtaaagattcacaaaaactatactgtatatcccataagagttatacctacttaaggtaaatcacaattatggtttatattgtactacagacatcaccatcgcctttcctctttaataatgagagggtttaacttttttttaacttacttaactagtgccacagtaaatcaagtcccagtagcaacaagttaaacaagattacaaaataaggcattctgctcacacgtcatgagagtaacaggcttagtacagtaaagcgggctgttatcatttttgcaattttatataatccaaacattatacagaaggcaatctttaccaaaaaatccaattaattgctattttccaggtaaacaggaaaacatacataaaatcctcaactttggctatttctcctaataccataaacagatgctgatcttatctacttaatcaagtccactattagaaatgtggataaaatgtctttgactataccatttctaagcctgtaggtcacacactagatgatttttcaaattataaattaaatctaatatgacaaaatc

SEQ ID NO: 468313 - DNA, 1000 bp, Homo Sapiens; identical to SEQ ID NO: 338159

SEQ ID NO: 468314 - DNA, 1000 bp, Homo Sapiens; identical to SEQ ID NO: 338160

SEQ ID NO: 468315 - DNA, 1000 bp, Homo Sapiens; identical to SEQ ID NO: 158512

SEQ ID NO: 468316 - DNA, 1000 bp, Homo Sapiens; identical to SEQ ID NO: 338161

SEQ ID NO: 468317 - DNA, 1000 bp, Homo Sapiens; identical to SEQ ID NO: 158514

SEQ ID NO: 468318 - DNA, 1000 bp, Homo Sapiens; identical to SEQ ID NO: 158515

SEQ ID NO: 468319 - DNA, 1000 bp, Homo Sapiens; identical to SEQ ID NO: 158516

SEQ ID NO: 468320 - DNA, 1000 bp, Homo Sapiens; identical to SEQ ID NO: 338166

SEQ ID NO: 468321 - DNA, 1000 bp, Homo Sapiens; identical to SEQ ID NO: 338167

SEQ ID NO: 468322 - DNA, 1000 bp, Homo Sapiens
tttttttttttttttttttttttttgagaagatgaaaattttattttcatgagtcatagatgttgagactccagtgaactttgcatttttattctacatagtggttctccatgtttttaccaggaatatggtagcatcacaggcattcgcttttttgcatagatttaaaatgaagtggaaaaaatttcacccatcctttggagatgtttgatagaagctgaacccacctcttcgttagtactgtgtgaaattggctgtgatgtgctcgtggttgaagggtatgtagtcagcaaccccttcattcaaaggtgttacaccactaagaaactgccagtatgtcttgtgattaacattttccgcgatattgttgatagaagagacgacaaggccccaagatgtcattgtggtttcaaatttgaacataggatttttgcgctgtgcttcctctaggacaacaagtaacactgacccacttttcacactaacattgatggtctcgttgaagagcagctcaacccccctcagctggttatttatggtgtatatgacagtgatgttagatgcagaggtggggccagggccagggttgctgggtagagttggttgtacctcatgatcaggactacaagtgacctggggcacatctaggtatgtcttgcctttcagggaagggaggatttgagcaatggacatggggttgtggaatttcccctgcttaatctcattgagtatcatatccgtagtcttcttgcagttccattcctttttagatggctcaggtgttacagagagagcctgcatggcgaggccagtactgtagatgtctccaatgatgccattatctttgatcttcatgctgattttctccacaatatcctttagtacctgaccaaacagggatctgtaaccttcctctgaacctacagggatcttgttgtacatacaggtcagagccaaggttgccattgctcctgtgtctacattgaagggagaggagttg

SEQ ID NO: 468323 - DNA, 1000 bp, Homo Sapiens
aaatgggtcaaaagaaagctctttattgattgactcagcaatgcagggctggcacccatcagcttcaaaccacatcttatcgcatccactcctgtccactcccgtccactttgccctcttccaggctgaaatcttgctttcaggcaagggcttccggccagccttgcattagttctcagctatggtcttctgaacccagtcctggatggaagtcaccttcacatacacaccatactcagccacagcacagctcttatcaaagcttaagatcccagtcgcataccaggtgtcctcctccaggtcgtgaacggcaaaggcactgcccgcatcgccatagcaggtgtcttcttggtacttagacatgccagcacagaaggtgtgttcattcagtatgggctgcacccctacagggctcttcggtgtcttcttttcggggactgtgctgccttcataatgccttatgcattggtcttggtcagccacaggcagcatgacatacttcagatggtcagtaaatttaaaattggcatttcgcccccagccagaaacataacccacacgccctacttctgcataatcctttgaaggtaggcagatgggcatcactctctcattaacagacaccttctgtttgagtttgatgagcccaatatctacctgggagtagttagggtgtagaacaaccttctcaatctctacaagctgctttttccccacatagagtgttaaagtaggggcaatgtctttcgctgttgcattttctgaatggttcaggaagagatttttagccgtggtcagcagccattgttcattgatcagcgtggcacctgtggtgagattatggtgggaaaccatcttagcctgccagggaaagctgcctttggcatccaggtgtccacccaggatccgctgcactgggtttgccggattcttgggcttcccacatactgcttcacattcaggaagtttatctccaacagccttatttatccactgcttc

SEQ ID NO: 468324 - DNA, 1000 bp, Homo Sapiens; identical to SEQ ID NO: 341148

SEQ ID NO: 468325 - DNA, 1000 bp, Homo Sapiens
tattttaaattttttttattttttttgagacagggtctgactgtcacctaggctgcagtgtggtggctcaatcagggcccactgcagcctgtgtctcccaggttcaagtgatcctcccacctcagcatcccaagtagctgggactacaggcgctcaccaccacgcctggctaatctttgtatttttggtagagatggggttttgccaccttactcaggttggtctcaaactcctgggctcaaacagtcctcctgcctcagcctcctaaagtgctgtgattacaagcatgagccactgcgcccagctgattattctttaaagtttacagttttcttcaatttattttttggtttcatttttaaaatcttaaaatgtgggagccatctgagaagtatgtgggtgtacgtggggccgggcaccagtatcctgggcacccaaggtggccgtttgtctttctatggatttgaggctcacatgtcccccagcagctcagtcacactctatcacagagttcaggccaaggaatctcatctttctgggtcactgtacacgggacaagtctcccaggaggcactgagctcagccctccccataccgcgtgcaccaaatactcccagcccaaccctgggagtttcactcctctagacacagaccagggtggcacaggacagccaggacagaaggtggcacctgtgccctacccaaagcccaatccccagcccaccaggctgggcagtcctgggctgccctgaccgggagacattacaggacagtgacctgtgcagcccccgaggccaggagagagcagggtgatgagtttctaaaaccgccttccactttctatcagagagccggccctgcagaggtgtgaccgacagccaggggagaaggaaggagccttagaggacccgggctcgctctctcttccatcgtttagttgtttgtgtcatttgacggccaggtctcacctagcaggagccagactctgtgccacacccaa

SEQ ID NO: 468326 - DNA, 1000 bp, Homo Sapiens
ttttttttttttttttttttttttttttttttttttttttttttttttttttttttttttttcagttcagcaaatgtttattgggcacctacaataggcaaggcacagtaccagctgctgtgggttacaaagacaagaaggctaggcctcaccctcgagaggcttacagtctaatagggagagacacactcacaggtaacaaaaatacaaggcaaaatgaggtgagctctatggcagaggcaaaaacaacgggagaacagcgagcagagatagatcagacatatctcagcagatcagatgttggatgcagggagtgacgtttcagccaggctctgggaggtgggtcggattcgcacaggtgaactggaaaaaagaggacactaaggcacaggcaaggtatagaggtgggaaagtgcaatgaatgttcagagaacagagatgcctgccttgaccaatacataggaggccaacaggataacagagggacctaagctggggaagtggtttcaggccagatggtgtgatcgctcgtagtaggattcctttctttctttctttctttcttttttttcaaatgaaacaaagccttgatctaccacccaggctggagtgcaatgccacaatcataattcactgcagcctcaacctcctgagatcaagcgatcctcctctaagtagttgggactataggcacaggccaccatgcccagctaattttgtgtgcatgactattttttgtagagacaggctctcactttgttgcacaagctggtctcgaactcctgacctcaagcgatcctcttaccttggcctccaaaagggctgagattataggcttaaactaccacacccagttatagtgaggagaattgacttcattccactggtaatggtgaaccattgaaggtttctgagcagaggagtgacatgacttcatttccacaagtctgggcacactgctgtttgtaatacatgattagctttattctttttgttaacc

SEQ ID NO: 468327 - DNA, 1000 bp, Homo Sapiens; identical to SEQ ID NO: 158517

SEQ ID NO: 468328 - DNA, 1000 bp, Homo Sapiens
tgaggaaatggaactttatttccataaatacagggataacacctattcaaaggtagttaaaagagggcctggggcctcaaagaaactaggctctcccaggggggtactccaacactgatcatagggactgggggatccccaaacctgagatgggcctcataggccacagatattccccaacactgacacttcaagaacggaactgtccccataggggagcctcagaaccccactctcatgggtagtccctcttaggagttgggagggctgatgtcaggggactttagagaaaaaagggaacatggggaggagagaagctaaaaatgtcctgagtggcctggaaggagacccctgtggtgggcagggggtgggttctccacccatacagccagatacggaggagcagcagcagcaaaagcagccacaagttaaaaacatggtttctcacttcccaacttcggccttgagagaaagggacagcacggagcaatcccccaaatgagaggacatgaggtaggggaggcctggaattgtcattcatggaggagcagaggaagggggttctgggaggccaagtctctactaaaaccccgtctctactaaaaatgggggataatatgggagcaatgaggtggtcacaggcacaccaaagcctgacatctgctttccaaggccaccacttggtctctggaccgaggagttcctggggacccctgaatatatcctcaggagagccaaggttcaatgcaggtctcataaagggtacggttggagtgccaggctgtgtgggagataccggccattggacacctcactatggccccccgggccaatagagtcttcaacccaaaagaatcccgcagataaaccagttgctcctccatctccaggacggtctcatttgcatcatagaaaccaaagaagctggactgccagggagtaataacaccatcatcagggcccccaatcagcaccaggtggcccacacgcagaaagttct

SEQ ID NO: 468329 - DNA, 1000 bp, Homo Sapiens; identical to SEQ ID NO: 158519

SEQ ID NO: 468330 - DNA, 1000 bp, Homo Sapiens; identical to SEQ ID NO: 338173

SEQ ID NO: 468331 - DNA, 1000 bp, Homo Sapiens; identical to SEQ ID NO: 158520

SEQ ID NO: 468332 - DNA, 1000 bp, Homo Sapiens; identical to SEQ ID NO: 338176

SEQ ID NO: 468333 - DNA, 1000 bp, Homo Sapiens
tttttttttttttttagaatgttttgctaccatttatttgctgtatggtatgtactcaaggcatgagtcagggcttctgtactaccctctgatcccaggagacagggcaggcaagaaggagagcccagggagaagctacctcatcatgggaaaattgtgggagctggaagaggtagggggagacccagccatcctgttctgacttctagcaatttcttctgccctcagtcatgaggggctccctatcctcccatcctatggtcccaggtgcagcaatgagagaggggaagggaagagagaaaggaagacaagttggtgccaggtgaaggcatctctgctctgcatagctatttggccctggccatgactacaagcaaaagtgggtgcagatggctgggccaagggctgtggtatggagtggatactcagtaggcatggttggcaatgtagagtgactgtgctgctgctccaccatcttctccactgccttcatacttgccctgggctgcaagcccattcacctcagcccgcttgatgaactcctcagtggcagccccagcattgtcccgttgccctcgccaggcattgagtgcagaggcttgcagggcacgcccataggagaaggtaagcgcccagggtcggggaagggggcagcggttgatggcattgaggttgaatgatgcctcttcttcgctctgacccccagacaggaaggtcactcctgggacagctgggggcacagtgcgacgcagggcagtgacagttgccatggcaatctcctctggggtatacttgatgggacaggcatggcccggggtcaccatgttgggcttgagcagggtcccctccaggtatacatgatggtcactcagggccttgtacacagcagccaagaccttctctgtaacatactgacaacgtttgaggtcgtggtctccatcaggcaatatttcaggttccacaataggcacaatgccattctgctggcagatactggcat

SEQ ID NO: 468334 - DNA, 1000 bp, Homo Sapiens; identical to SEQ ID NO: 338177

SEQ ID NO: 468335 - DNA, 1000 bp, Homo Sapiens; identical to SEQ ID NO: 338178

SEQ ID NO: 468336 - DNA, 1000 bp, Homo Sapiens
ttttttttttttttttttgtcttcaataaattaagttttatttggattgagtaaaacttcaataaattacaagtttttcaaagaaaaaggacaaccaaaaaaattagggaaagagaatccctctgtcccattccccaggcagcccctccactcctctaacaggtccaccctctgtgccagacgggctagggaagagaggagacacgtgagggatgaattggcggtggtcattaattatcccggcgaccaccagcctctgtacgggtgggcccgaggggtggggcagcgggctttcctgatcaccagcgtaaggggtgacccagccgctgcagagccagggaagggggctgtgccgatcctccttgaggaccttcactttgagggcactgttagggacaggcctcatgtgataccgcatccaaagaaggccaagctagaaggagctccggggttctcctggaggaggtcccggtataaagaactccgctctgctggtagagggtgggtgaggacgagagtggccctgacttggtctccaaagttggggaggacacaccgaggggtgagacagtagggagtggagacggatggggacttccaggcgggtggccaggatgggaggggctgtcaggtcctggaggggcagggacgtctctgggggcaggctcggagcctccagaggccggcagctagaagagattggtcttcagggcggggccgggcttccggtgaaaggaggacagaaccccggagaagggcccggggccggactccgccggctgccaagccttaagtagttcggccgctcccgcgccaggcccgccgcccccaccgcccgccacaccggcccacagtgcgcccttgagcggctgtggccccggcccaggtcccggcccggagcccagtgcgacgggcagcgggctggggctcaggcgcgggctggccaggccgggcgcaggcggcggcggcagcgaggcggtgctatcgggcgtggggctgc

SEQ ID NO: 468337 - DNA, 1000 bp, Homo Sapiens; identical to SEQ ID NO: 158523

SEQ ID NO: 468338 - DNA, 1000 bp, Homo Sapiens; identical to SEQ ID NO: 158524

SEQ ID NO: 468339 - DNA, 1000 bp, Homo Sapiens; identical to SEQ ID NO: 158525

SEQ ID NO: 468340 - DNA, 1000 bp, Homo Sapiens; identical to SEQ ID NO: 158526

SEQ ID NO: 468341 - DNA, 1000 bp, Homo Sapiens; identical to SEQ ID NO: 338182

SEQ ID NO: 468342 - DNA, 1000 bp, Homo Sapiens
tttttttttttttttttttcaggtagtcactgtattttattggaaaacattgatatatatttttcttcacagcttgaactgaacacaatattgcccggtttaaaaaaaacaaaaccaaaacattccgaaaatgtccacagcctcacgcctacctgcccttaccctcagctcttggctgggtctcccactatgccccatccctccttccctcagaggctgggtgccagagggtggatgagaagagattctcaaagctgggcaggtcccaggaaaagccacttgatcgacctgggcagtgaggggaagcagggggtggggggtggggtggggaggtggtggggggagccagatgaaatgaacagaaaaggggaaaaaacccagacgactgaactgcccacattgacttacttgtcccagaggcgaaagtcagaagcaagggcacggatcatgctctccgctgggggagtatgggggcaggcaggtgggcgagggaagaggcagggaagagggcacggagcacagatgtgaggaagcggcgccaagtcaccacggagaagcgggaggtgctggcggaccaggacgcagaggctgctgtagctgccgtcccctgggcagctggccgacaagactgttttattgcaggtgcgttctcttgagagcgtggtggggcccatcttccctctccccaccctttagctagcccagcatggttctgaacaaaatgaaagtcttaagggccatagaggggaaagaaaaaaaaagagaaccagcacattacaaagcgaccatccccacatccattcctaggacgggccctcagggcggtgggtgcatcgtgaggagggagcggcatgggatgttagcaccaggtatttacagaacagctcgagagcgcttcaggaacgcgggcaagtccaatttgcagagtggccaaatgagcagtccccacccagccaaacctcagaaagccaatcagatggtttcagaacagcagccagtg

SEQ ID NO: 468343 - DNA, 1000 bp, Homo Sapiens; identical to SEQ ID NO: 338184

SEQ ID NO: 468344 - DNA, 1000 bp, Homo Sapiens; identical to SEQ ID NO: 338185

SEQ ID NO: 468345 - DNA, 1000 bp, Homo Sapiens; identical to SEQ ID NO: 158529

SEQ ID NO: 468346 - DNA, 1000 bp, Homo Sapiens; identical to SEQ ID NO: 338187

SEQ ID NO: 468347 - DNA, 1000 bp, Homo Sapiens; identical to SEQ ID NO: 158531

SEQ ID NO: 468348 - DNA, 1000 bp, Homo Sapiens; identical to SEQ ID NO: 158532

SEQ ID NO: 468349 - DNA, 1000 bp, Homo Sapiens; identical to SEQ ID NO: 338191

SEQ ID NO: 468350 - DNA, 1000 bp, Homo Sapiens; identical to SEQ ID NO: 338192

SEQ ID NO: 468351 - DNA, 1000 bp, Homo Sapiens; identical to SEQ ID NO: 338193

SEQ ID NO: 468352 - DNA, 425 bp, Homo Sapiens; identical to SEQ ID NO: 158533

SEQ ID NO: 468353 - DNA, 1000 bp, Homo Sapiens; identical to SEQ ID NO: 338196

SEQ ID NO: 468354 - DNA, 700 bp, Homo Sapiens; identical to SEQ ID NO: 158534

SEQ ID NO: 468355 - DNA, 1000 bp, Homo Sapiens; identical to SEQ ID NO: 158535

SEQ ID NO: 468356 - DNA, 1000 bp, Homo Sapiens; identical to SEQ ID NO: 338198

SEQ ID NO: 468357 - DNA, 487 bp, Homo Sapiens; identical to SEQ ID NO: 338199

SEQ ID NO: 468358 - DNA, 1000 bp, Homo Sapiens; identical to SEQ ID NO: 158536

SEQ ID NO: 468359 - DNA, 1000 bp, Homo Sapiens
tttttttttttttattttcgtcttttttattaacattatatataaagatgagtccagtaagaaagcagaaatgagaaggctaggagggggtgggagatggctttgcttcttcccccccgggtgggactcttggagacctaccacgtctctcttggcccctgcacctcccacaaaacccaaatccagccggagcccacatctctcagcttgaaacacacagggagatccgtccaggaggaacatggccacataaataggaaaccgcagcagggaggaggctgcttctctctgttgctcttaaaaaaaaaaaacttactatatatttatatatatagctacagtcttctacctctccttttttttttttttcaatgttttactgcatcaggggtgggggaaagttagctttggtgggatgtctgggtcagggaggggcagtgccaccagccctccaggcagttaccccttactcccaaaggcacaagttctaactctcccctcctctcccatacacctcacccgacattctccagctcggagcaatctgtttccaaggccaccggaaaggaggtgtttgggggtttgtcttgcctggtatgtctctttggagatttggggtttggcaccaaaactgccaacttactggaggagtagagaaggtgaggtgggggcagggacagaacagaggcacccttgcaaggggagacttggccctatctgtgaacaatgccctttgttttcctatttttcaacagcttttaaaaccaaagttgtgcaaagtcctggacatggaagaaataagtccataggaaaaacgtctgagacccacccctcctctcggaacggaggagaggggagagagatggctcctttagttctttcctctaaagccacaaatattaaaagattccctcacttagggggttttctttggtttcaccctcaaatcttaaatgagggctagaagtgcagggcggtgaccagttcaggtccccacccg

SEQ ID NO: 468360 - DNA, 1000 bp, Homo Sapiens
tttttttttttttttttttcatggtcgaaataattttatttatccagaatatacagtttaattcctctatctacacttatttacatggctaaaataacattgaaaaaagtcttttgaaaagttgaggtcatagatttcaaggcaccattgaaagtgtccacagttgcgcaaaaaaagtcctctgtaaaaaaagggggggtcttttgaaatgcaataacttacatgcaaaaaaaagctttacacatgaatctttttcagttttccgaacttccccatatgaattcctttctttatgattttctagaacagcaaaacacagtagtcccaaaaaagagagtaagagagagcagcccatctaatagagtgtcccggaggccagcgccagcgggtgctgtaaggagcccggcggcggcaggtgggaattgattgagctggctgcacttgtgtaccaggatgcagagttctccaggtagctggacgctggggactggttggaggtcggagggtgggcatgagggtggtggctgagcgagcgggacgagccctggggctcccacaccgctggagactgcggcgagttacacgccattgggtcgctggagctgggactgtgctccgggggcatctccccgtttttcatgatcttcttgatcttggatcttttgttctgaaaccagattttcacctgtgtttgtgtcaatcccagcgaggcggccagctcggcgcgttccggcaaggcgaggtactgagtcttctgaaaccttctctgtaatgcggccagctgaaagctggaataaatagtcctgggtttacgaactttctttggtttgccattcaccattctcacctcgggctcggtcacttctttctctggctggttggtggcgcttgggacgcggttgtaggcgccgccgtactggtggtaggagctagcgtagctatagtcggcataagctttggctgggtagctcccggcggagccgttcacgccgtgatactg

SEQ ID NO: 468361 - DNA, 1000 bp, Homo Sapiens; identical to SEQ ID NO: 158537

SEQ ID NO: 468362 - DNA, 1000 bp, Homo Sapiens; identical to SEQ ID NO: 338201

SEQ ID NO: 468363 - DNA, 1000 bp, Homo Sapiens; identical to SEQ ID NO: 158538

SEQ ID NO: 468364 - DNA, 1000 bp, Homo Sapiens; identical to SEQ ID NO: 338203

SEQ ID NO: 468365 - DNA, 1000 bp, Homo Sapiens; identical to SEQ ID NO: 338204

SEQ ID NO: 468366 - DNA, 1000 bp, Homo Sapiens; identical to SEQ ID NO: 158539

SEQ ID NO: 468367 - DNA, 1000 bp, Homo Sapiens; identical to SEQ ID NO: 338205

SEQ ID NO: 468368 - DNA, 1000 bp, Homo Sapiens
tttttttttttttttttttccaatctgtaaaaaatattttcattatgtttattataaaaatataaatgtttccactacaaatcattttacattagtaagaggccatctacattgtacaacataaactgagtaatattttgaaaagacaagtttaaagtaaacacatattgccaatcatatcacatttatacatggcttgattgatatttagcacagcataaactgagtgagttaccagaaataaataatatatgtaaatcaaatttaagatacaaaacagatcatatggtacataacatcatgtaggagttgtggctttatgtttactgaaagtcaatgcagttcctgtacaaagagatggccgtaagcattctagtacctctactccatggttaagaatcgtacacttatgtttacatatgtacagggtaagaattgtgtaaagtaaatttatgagaggtcaaggagaaaaatattaataaaatgaagaacagtatatggtgtatacaacctctactttcagatggaaaccacagccaaaataagtgaaatagattcaacaatcctcaacttctattagtttatgaaatgcatgggttttgttgagtatgctcagaatagtacctaaaaaagaaaatagtagtctgggaaaaaattagattgaaaccacattcagatctcattctaacattccaaacacaaaatacttgatttaaaaaaaaaatgttttctagctgctgatagcaggtataagtgaaatttgtgattaattttataatcacaagtgtatttttaaaaatttcatgctcttatatatccaatacagaattctagtagcctgatttgactaaggaatattgccaagatttgagaaacaatcatatccgaaggagcacaatctaagtcttattacactaaatctacaacagatgagcacttgtgagttttgatttgcgattgtaagctgtgtttcattagcgttccattttgcataagaaca

SEQ ID NO: 468369 - DNA, 1000 bp, Homo Sapiens; identical to SEQ ID NO: 246456

SEQ ID NO: 468370 - DNA, 1000 bp, Homo Sapiens; identical to SEQ ID NO: 158541

SEQ ID NO: 468371 - DNA, 1000 bp, Homo Sapiens; identical to SEQ ID NO: 158542

SEQ ID NO: 468372 - DNA, 1000 bp, Homo Sapiens; identical to SEQ ID NO: 338209

SEQ ID NO: 468373 - DNA, 1000 bp, Homo Sapiens
tttttttttttttttaagttgtaaaaaaaattttgttatttataaatcaattacacaataaaataattatttttaaaagtcacaaatacaatcgttgtataaagtcattttggcatcaagtatctcttaaatatgttgcaaactattttccaaagagatgtggtccaaaccctctgaaggctttataattttgtattagataacaagtgaacaaaactgacaataaatactccaacaattattttttaaaatactaagtggcaaatgctattctaagtggcaaaacaatctattactcagactacctgaaaatttcactgaagtcatcaaaagttatacaaaatttgtatttacatgtttaaaatcctgattgcatttttctttaataataatacatacaaaaactcagagggttaataaagaaataattcaaagtcctaataagtcaacaaacagatttcattataagctgaacataaaagagacaccattgtttgcttctcttttcaaaaattatcacggcactttgtcaaatggaagcagcattcagaacaatggttctcaaatctctgtgtgcataaacaccatgcaggtttgtaccacacagattcctgggccctgttcccagtctgagctctcattattgaatctgaggaatctgcattttgaacaagattcacgactattttattttattttatcacccaagctggagtgcagtggtgcaatctcggctcactgcaacctctgcctcctgagttaaagtgatactcaattcttgtgcctcagcctcctgagtaactgggattacaaacgtgcaccacacacctggttaacttttgtatttttagtagagatgaggtttcgccatgatggccaggctggtctcgaactcctgacctcaagtgattgcctgcctcagcctcccaaagtgctaggattacaggcatgaggcaccgcacccagccaagatccatgattttgatgaagtggtacaaga

SEQ ID NO: 468374 - DNA, 1000 bp, Homo Sapiens
tttttttttttttttttttattaaacatttggaattttattttaaaaaaaaaaaaaaaacatcacaaccatgaacattgttacagttaagaggccctcttggttctccacaatgatactgagcatgctcacaaggggttcccattgttaaagtcttaaacaaccatttttaaaagaaggaagaaaaaaaaactccgcacactaccatttaacttgttttaatgtttcttcacaaatggtgaaaaatactaaagtacagacaaggaataatcataatgttgtggccaacattataaatatggaattataaatttaaaacattttctggtttaaaaaataaatctggtagtcaatgcagctctgcggggtctctgcatctagtagggccgatctctgcgctcctgacggtgctcgcctttatccatttttccaggtcctccacgtcctcctcttcttcctcccatctgttccatcaaaggtccagggggccccccagggccacctcgtcttcctccaccaaagccacctcggtccatgccccggccaccacggaagccacctctgtctccaccacggccacctctgaacattccaccgggaccaccacgatccatgaggccacctcttcctccccgcatgccaccagggccacctctgccacgatcaccacccgggggcggaaagggtggcgggaggaagccttcaggctttggggccttacactggttgcactctgttctccaggcgaagttctggtttccacaacccggattgggacactgccagtctccagctcggtgctggacgtttcctcctccagaggggttccctcgggaaccccggggtcctcttggagggaagcctcctctatctcctccacggcctcccatgcgacccatgggtcccccaggacctcctgggcctcctggacctccacggagtggtggtggcatgcctctgccctcacggggtggcagaccaccccgcatactgttcattgg

SEQ ID NO: 468375 - DNA, 1000 bp, Homo Sapiens; identical to SEQ ID NO: 338211

SEQ ID NO: 468376 - DNA, 1000 bp, Homo Sapiens; identical to SEQ ID NO: 338212

SEQ ID NO: 468377 - DNA, 1000 bp, Homo Sapiens
tagaataaaatactttaatgttgtgatgacacaaagccccacactgccccgctgctcctgggaggctcctcagtctgccagggctggcactcaggcccttccctgccggcttcctgccacacagacccacaaatgccctgcattgcaggcagccccctccgagctccgacttgggccctcttcagttcccactggaccctgatttgagctggctctggaaatagctgagaacccagacgcgggacgcaggggcaagggctcaaggaggagagtcagagtcaagaggctgccacgccaagatgtcgccaggagctctggcggtggccaccaggcccagctagtgcgcactggcctccagctgggagcccagtctcgaagcctgaacgtgagagggctccaggttatccgggctctgcttctgccgccgccgtcggggctggacccccttaccagggggtctgggcagcccactctgtagctgccgcaccatctcgtggtccctgtggtccagcacgcggggcaggaacagggaggacttctgtgtgcggcgggtcttgaagcccctgcggggccggcccttgccgttcacagacacgtaccacagtctctcggcgctgggctgccggcgggccccaggcgtactagacaccgtccggtacagccgggaggcatacgtattatagcccagctcgtggatccgctccacaaactcgcactcggcgctgtagtgctccgaagcatagagtcgtcccctcttgttcatggccaggtaccgcccggagaagagacccctgatggccacaatgcccacctccactgccgttatctccaaaatactgtaggcgctgttctccaggctgccgttgacgcggccgctcgggtgcagctggaggtggtacttcgtggcgcagtagagcttgcggcgccggggcgccccgccaaggtgctcgtagacgccgccacggccgcccgcatcgcgccgcaaccgcgccccagggcc

SEQ ID NO: 468378 - DNA, 1000 bp, Homo Sapiens; identical to SEQ ID NO: 158544

SEQ ID NO: 468379 - DNA, 1000 bp, Homo Sapiens
tcagtatttcgtgcagtcgtaggagtagggggctgcgtggcgatagagaggcggcgtggatctgtagggcagctggcagctggcattgccactcacctgggactccccgagggtcgagttctcaatccccagccggtgggagttgaacatctcccgcacgttggggaaagtttgctgctgggccgcgaacgtgtggccggggaggtggttcaggtccccgctgtggttgagataccaggaggccgcctgcgccgcggcggccccgggctgcggcgtcggctggggctggggagccggcgggggcggcggcgcctgcgggtggtggtggccgtggtgctggtggtggtggcccgtggcggcgagcgcgccctcctggccggcggcgaggttgagagcgctcaggggcgacgtggggccgctcgggtggtccgagagggcctcgtccagggcgggcgggacgcacatgtgcgccggccgctcggccccggtgtacaggctcatcgctcgcatgctgcactggtagcccccggcggccccggcctccaggccctgagcgcacggctggccgtaggcggcgggcggcgcggcggcgtatggcagcgccagcggcggcaccaccaggcccgcgcgtccggcccccgggctcagctctccgcccggcggcgacgttcgcagggtcatgatgttctccacgctgaagccaggcagcccgttgggcgccgcggcgtggtgctccggcagcgaaccgtcgggggagccggcgggcgtggaggccgcgctgcgcgggctgccctgcagcgcgctctcggggctcagcgtctccaccttggtgatgaccggcagcgccggggacgccgcctcgctcttgatcaccaccttcttctcggcctccttgggggcgtccgctaggtggggggtggccggggcgcccttggacgccgccgggggcggctccttgaggtgggcccgctcctccttctccttggacacgtccttcttt

SEQ ID NO: 468380 - DNA, 1000 bp, Homo Sapiens; identical to SEQ ID NO: 158545

SEQ ID NO: 468381 - DNA, 1000 bp, Homo Sapiens; identical to SEQ ID NO: 158546

SEQ ID NO: 468382 - DNA, 1000 bp, Homo Sapiens; identical to SEQ ID NO: 338217

SEQ ID NO: 468383 - DNA, 1000 bp, Homo Sapiens; identical to SEQ ID NO: 338219

SEQ ID NO: 468384 - DNA, 1000 bp, Homo Sapiens; identical to SEQ ID NO: 338220

SEQ ID NO: 468385 - DNA, 1000 bp, Homo Sapiens; identical to SEQ ID NO: 161075

SEQ ID NO: 468386 - DNA, 1000 bp, Homo Sapiens; identical to SEQ ID NO: 158547

SEQ ID NO: 468387 - DNA, 1000 bp, Homo Sapiens
tactcttaatactttattaacttaaaacatcactctaataaatatgtattaacaaacataatgcttaccagaagatctaaaaacatttaccaacctcatcaaagtgaaaataccacctttcccccctctatggtacacatggagggtcaaagagttgaagacagagccttccttcccacatgcctgctagctcagaaatctttaaaatatcagcttaacaataaaaaactgaatatacacacatatctttgaagtaactgttcagctttttgtttacacctgataaaatccaaaagggtcaaaagggaaggtttacaattctgtgctgtcttctcagaattccctccaagagtaagaacagacccagccacttggaggtgcaaccgttagcttttgaggagcagtcaggggttgtgacttcagtctctcttccccaatacctagcatggtgcctggtaccttggtagccggtgatccatgaacatttgctgagtgaatgaatgacatcttgtccacaggcattgcttgtgcttttacctccagtgatgaggttttcacagccctactgaagggaggacctctaatcccctctcattaccaacttctcttctgcttcttcttgggggtagcctcgatggtgcatctcatgacttcaaagtattaaattccttccccaagtcagtttctgaatcagtttttgaggaggagaaatgattcctccaagatttataggcagcacccaaaagaaaggagtcaacagaccccccagaaggaaaaaaataaaagttaacactcactcttctttctagataaaaatattagcatttgtccaccttgtaaatggtgattcctcctcttccacacaaatatctggggtaggtcaagaggggggagggaagaaacctgaagggcattcctgtctgtagattagggctggaaatgggaaggactgtggggtctaagatttattctggtccccatttgactttgcctttgtctt

SEQ ID NO: 468388 - DNA, 1000 bp, Homo Sapiens; identical to SEQ ID NO: 338223

SEQ ID NO: 468389 - DNA, 1000 bp, Homo Sapiens
ctgatgcagttcctttattatcaggaaacagtgtcattatcaaatttctcctcaaaacgtatacagactatacatagcccccagcccatacctcccatccctggggcatcttgtgcaggggactgcagctcccccaatttttctggaaggatagaaaccccttaggaaatgcgatctgtgatggatgagattccctactctttaggcactagagttgaggaattctgtttccccaggtagggatctcagtaagacactcatgttgcccacagccatgttggggggcccagagggaggtggggtatgtccagagctgccccgctgatcatgggaaggaggaggactcagcccctggggctcatccagaatagccacaaagtccagctgagtgttgtcaagatcaagagagtccagggggttacatacctgtccttcgggaggagggtacaaggcaggaccccctcctagcctgcccacctcaggatgaccacagctggggtttgtgcctcccactttgagaggcccatagcaagtgggcaatgggggcagaagtcgaggtggtgctgctgccctatgtgaagccctatttgcccccactacaaaattttcatggcatggtgaaggggtgggataggaacctgacttgtgattgggcaagttgggtccaaagccaggtccatatgtgttcactggagctttagcacggcttgggctaacctgggaaccccccagaaacttgggactctggtaggaaggttcctgggcgggggcatcttccctgcccccaccctcccacagtagctcctgttgagattgaacataattacacacaagctgagccttgagctgccctgtggaatgggtgggggaatcaaagtccaggcaaggcctgggttctgaaggaagataatcagggggtggctgggtataggggcctgactggagatattggggaggagagggctgggggtaatgggaaaagagaggctgtggatgtggg

SEQ ID NO: 468390 - DNA, 1000 bp, Homo Sapiens; identical to SEQ ID NO: 158548

SEQ ID NO: 468391 - DNA, 1000 bp, Homo Sapiens; identical to SEQ ID NO: 338224

SEQ ID NO: 468392 - DNA, 1000 bp, Homo Sapiens
ttttttttttttttttttacagagttggaattggctcctttatggaaaaactgaaaatataataaaaattaaaataaaaccagttttaaaaaagccagcccctggggtttccacctcctgcctccggccctccagaggggtgaggccccaaccccagggcagcagaaggatgagggcctcctgctcctcctcttcccccattccatccccttcttatctccacagtgggggccccgggaggaaccaaacctgggtgggagggcagggacccaaggccccgtggcccggggaagggggctgggattgcgccagccccgcagccctggcctgtagtgtgggcatgggcagggcccctcctggcctgggcccagtgggggtggggccattagttccagatcttgaggaaggagtcccaggagcccgtggccacagccatgccatcgtcggtgaccccgaggcagctcacgcggttgtcgtggccagcgaggactcctgcacggtcgcccttcatggcatcccagatgttgcagttgaagtcgtcgtagccagcgagcagcagccgtccgctgcgcgagaaggcaacagaggtgatgccacagatgatgttgtcatgggagtacatgaggagctcctgatcggcccgcaggtcgaagaggcggcacgtggcgtcgtcagagccggtggtgaaggcgtagccgttggggaagaaagccactgcattgatgtcggattcatggccgatgaaggtctgtcggcacatggaatcccgcacgtcccacagcttgatagaggcatcacaggcgcctgacacaaacgtgcggccatcgggggccagggacagggacatcacatccccactgtgtccagcaaaacccactgtctgctggcctgtctcaatgtcccacagggcacaggtggtatccccagagctggtgatgatttggttgtcatccaggaagcggcaacacgacaggtacccagtgtggccaggcagctcccg

SEQ ID NO: 468393 - DNA, 1000 bp, Homo Sapiens; identical to SEQ ID NO: 338225

SEQ ID NO: 468394 - DNA, 1000 bp, Homo Sapiens; identical to SEQ ID NO: 338226

SEQ ID NO: 468395 - DNA, 1000 bp, Homo Sapiens; identical to SEQ ID NO: 338228

SEQ ID NO: 468396 - DNA, 1000 bp, Homo Sapiens; identical to SEQ ID NO: 338229

SEQ ID NO: 468397 - DNA, 1000 bp, Homo Sapiens
taatgaatgaccttcactgcacgcctgcagcggaggagacgtctccaccctgctgtgttctgcaatgctccttccaggcccgcttctccatgacccccattccagtccctgtccacctgcacctgcgcctgcaccgccacaggcccctcagtagaaggaggcgccctcataggcgaaggcaccaggggagtgggggatcgaggctgggctgggtgcctgcagccggcagaaccagaactgccggagaacatgtttcaggtgtgtgcggaacttgacccccacgaagacatagagcaccgggttaaagcagcagtgggagaaggcgaggttgcggcagatgagcagggcgtattctagctgctgtttggcctcgcagctccggatgatctgggtccgaaacagcgtctgcagaaacagggtgaagttgtagggaccccagctgaggaagtaggccaccacgatggcgaagatgagcttgaccgtgcggtggcgccgcttggagcgtgagcggaacagggtcctgaggatctccacgtagcagaacaggataatccccagggacagcaggaagaagaggttgtgctggtagacggaggtgaggtaccacgtgagttcggaataatcacagcccgaagaaagcaccttgtggaagatggtgtcgaggatggaggacaggatgctggctacccacacagccatggtcaccagcacccggcagcggagggtggggacgcgcagggtggagagggggctcactaccgacaggtagcggtggatggtcatgatggtcaggaagaagatgctgctgtagaggctgatggagaagatcatattgaggagtttgcagaggaagtctcccagcacccagccccagtggtatggggagatccacacaggcaacaagcaggcgaacaccaggtctgagaggcacaggttgaggatgaagatgttggtgagggactccaggctctcatacttcaccaggacccacaggaccagg

SEQ ID NO: 468398 - DNA, 1000 bp, Homo Sapiens
ttttttttttttttttctttttttttttttttttttttacattcttgtaatgggtttattcgtgtacaaaacatgttgtaatttgttgatgcatgtgcagcaaaatattctatcacatacgacaaaaatacaccttttactcccttttccctgcccttgaaaatggcaacactgttttggcagttcagcagctaaaaataaagtgctataattaagcagtattggaatgtcttcgtttgacaaacgtgatgtacaatttgagtatacaaccatatctttttcttggtttttcacagaacaggaagctccacatcctgaacacctccagaagatacaaatatttgtatatatatgtacacatgtatacactgtatatgtaaagtgccaacaagcctctttgtccttgtaagtttgttacatttctctttagtccctttttctttccaaagtcagactcacaccattgggatctcagagttcgtcagcaggcaccgagcttaccaaaggctggcttgttggggtgtggtgttggtgagaggacacggggcgagcccttcagacctcgctgggagacctggaacgaaagggcactttggactggaaacagccacagagcaggagccacagggcgcgctggatctcctggttgcggaaggcatagatgatgggattgatcatggagttgtaggtggcgggcagcagggtggcgtaagtgtagaccgccgggtcctcatggctgcccaccacgcaatagatggcgaagggcagccagctggcgccgaaagtgcccagcaccacagccagtgtacccacaccctttctggtggcagcgagatggggtggcgccaggcagtgctgctgcagcgcgatctggtgcgcgtggcgccagaccacctggcagatgcgcacgtacaggtgcagcatgatgccgaagaccatgaagaaggcggcggagagcagagccacgtggctgcgcgccagcgggcgcaccacgctgcag

SEQ ID NO: 468399 - DNA, 1000 bp, Homo Sapiens; identical to SEQ ID NO: 338230

SEQ ID NO: 468400 - DNA, 1000 bp, Homo Sapiens; identical to SEQ ID NO: 338231

SEQ ID NO: 468401 - DNA, 1000 bp, Homo Sapiens; identical to SEQ ID NO: 338232

SEQ ID NO: 468402 - DNA, 1000 bp, Homo Sapiens
ctagtctgtgacaacctgaggcactaaacgtttttctcttatttcactatcttcaaaggtaatttttttgtttcttttgggatctatccaagagttgtgtattacagcattattaggcaggggatcagcttctactatagaaacaactcgctttttcattttacttttcaagaccttttgaaatttttgtctagtgaatgcatataatagagggtgaaatatagttgttccataagccatgactaaaaaacacaatcttaattttactaaaaggtcacttgggcctaaacataaaatggtggtatttaaaacagaaattggtgtccagcagagaagaaatgtagaaataatcaataaagacatcctgaagactctcttttgtctttctcgtcgttcacggtgtcgtttcacagctcgccggagggcaattattacagaaactgaagttcttacaccaaagactacatttctcccaccactgctttgtgacatgtctgtagcctcatgttgtgtggttagagaaattgtctttttctttcttgctttcttcttctgccctgttgaaaatcttgtgcctattcgaatattaagagcctgaagtattttggtgtatgtgattaacattactacaacagtgaaaaagaatattgggatctgtactaacaggtgataatacattcccagttcagtgtagtattcatttgtactgacacataaaagtgtcttgttttcccaggtatttccactttgaagactgaaaaaatttacctcaataaaaggaatcaggaaagagaaaaaagaaaaaatccaaatggatatcattaacattacagctctgcccattgtcagaattcggtttgcaggttttacagagatgtcatatctgtccaaagtgatagcaaaaacgttgattgctgttgagacacttgcaaaagatacacaagcctcatggaaacagcaaatgagagcagtgttactctccagtgaaagcagaaggata

SEQ ID NO: 468403 - DNA, 1000 bp, Homo Sapiens
aggaattttttttttttttttttatttggttccaatccaggggcacaaattcagcagctcctggctatattaggctccaaaattcgataagaaagaataagtattttcaggttatatatctctactcctccctccaaaaaggattaattcaggttttaataaatgttttgggtttatagtttgattttttagtattactttattttttttttcaatttgctcctgacctgggcacaaatgcagcccctttctggctgtgctgtgctccaaagtataacagggaggataaatattttatagaacctagtttcccaaaatgaagataacgtgacattttaagaaaaaatatgttggtgttgctcaagtttttttattgacactttcctgttttaagtaattttccagcttttacctgccagacacgtatttagcagctttctggctttgaagtttgacatgaaaattttaatttggtgtaaaaacaacgaagttttttaaactcacactgctggtgattataattgtgtaaatcctgttaattttctttttcttcccacccacgtacatgccaacgcaatttgttttctgttttcaaaatgcacataacatattttaccaatgttaaaaatttgacacatttcttattaataatgttaggctaaaaatattcttgtgctaaaataaactcaatgacagtccaaaaaaataaaataaaactagcatatatcagtagtaacacaattttttaaaaatccctgaatttgttctatatttataggcccaacctaattaccaaatatcattggaatagaaatacctttttgaaagtttcaaagtcatctctatattatcaaatgccactagccacctggataatgcgatacaatgaaattccaaccaagcagaagagtttggcaatccatcttggttgttgtaattagatttgacctataattactgaacaaaacagcaataaaaactctacagtataccttcaaac

SEQ ID NO: 468404 - DNA, 1000 bp, Homo Sapiens; identical to SEQ ID NO: 158550

SEQ ID NO: 468405 - DNA, 903 bp, Homo Sapiens
ttacttctgggacttgcccccttgcgttcttgccgcacacactgtcttcaggccaggaccccttcccaagtaaccggtcaccagcggattaagcaccacactccaggcacccgtgatgagccccagcttccgccaggagcctcctagattggggtacaggaagctggccacgttggaggcgttgtagggtcctacgcagagcagcagcgtgaggagggccccgccggccacccaggcggcccgcagcttccgcctgtgcgtcaggccggagcgggccagtgcccggaggcagcccacgtagcagaaggctgtgatggccaagggcagaaaaaagagcaggagagagaggctgaagcgggccgggccggcagaggccgggtcccaggcctccaggcagaccggagagccgttgaccggtgtgttgatgcccagggaggtgttgctgtggtccagccagcctcctggagcctccaacccaaagaccagacccaggtgacacaggacgagggcccagatggccgcgcacaccccccaggaatagcacggcctccggaaggcttggtagcccaaggggaaggctgctcccaggtagcggcctgcactcagggcggccaggaagcccccgccggcatagagtgggaagaagtgggccaccgcgaagacggggcacagcgaggccggcagaggccaggccccggaggctagcgcctccaccgccttcaggggcagagagactgtcagcagcaggtcggagcagcccaggttcagggcgtagaccaggctaggggtgagacggagccgggcgtgggccgtcgcgcctcggatggccaggacgttgagcgggaagcccagcgcaaaggcggccacatagaggccgaaggagagctgcgggggcaggtccat

SEQ ID NO: 468406 - DNA, 1000 bp, Homo Sapiens
ttttttttttttttttttatggatcactttctacatttaataaagacattttctcatttgaggctctggaagtcttgagtcacatttttttttttttgataaccccctccccgctaaaatgccttggaacacatggcttaacagtggctgcacagaaaatatacaccctcaaagtctcactttcatttaaatacaaatatacaaaatgtaaactgagacagtagagaaatttacaaaacttttctttaaaaatcataaagacaaaattcagttctagttatgacgctattaaaatacgtgcaagttgtcgtatccaattggatttctattgcaatgttcaccaaagacaaatccaatccaccccggccggggccgcctcggaaaacagacctgagtggaaatttctttgagaaacctcgaggttctacgtcgacgggatggacggcctccttccccggctcccggggtctcccctggcagccccaccagagcaggggctccactacttccacttctaaggagaagggtctgggctggttccactgtggacttggaggccagagccgaaactagctgcttccggtggagttcgagctgacatggtttgagtttatgtggtggttaaaactggtcttggagctgggcgaactcttggaattgttctgatgctgccgcttgaagagtctctggagcagccctttcttgggcggttccggagggtggtttctgttcagatctggcgggagggtaccattaggtccaaacacgttcagctccttaaagcattctgtttctatcatctcgttttgccatgggatggacacagagcccgtggagaacttggagtagaagtcgtcgtctgtgtggtccagattgacgcccttcacagtggagaactgctcgatgtccagcacgtccttacagtacacagcgcgggggtctggaacgaagggagggtccaacatcccggcttctaagcgcttgaagttcatgttcctga

SEQ ID NO: 468407 - DNA, 1000 bp, Homo Sapiens
cagactgccacacagctttattagggacctgcagagaggcaggggcccagcaccccccccaccccaccccgccaggcatcaagagcaagtacagtgggctccagagcctcccagggctcctgagcacacagtccagggcgacccagcctggccccagctggggtgctcaggagtactcgagggtgaacttggcatggaacctgctcagcttctccagcagcagccgcagtttctccaaggggggcagaatggtcatccggaagtggtaggtgccttcccgctgcccaaagccgctccctggcaccacgcagatgccggtctcctccaggaggcgcaggcagaagaacatatcgggggccaggcccagctcctgagcgcgctccaccgcccgcgggggcagctgcacgcgcgggaaggagtacatggcgccctgcactgggttgcagctgatgccaggagcctcattgaagacctgctcggtgagcttggccttggccgccagctctgccagcactgcctgcttctcagcctggaactgcgcaaaggaggggtcggtgggcgcgggcgggctgaccaccaggtccagcagggcctgtcctggcaccggcgggcacagccgcacactcatcagcttcagcatctgctgctgcactgcagcgtccatgttcaccacctccacatagccgccgcggaacccgcactcgcccatgtagcccttggaggtggagtggaaggaggcaagctcctgctgcccggcgtagggcggccccatctccatgagcaccttcttgaatgagtggaactgcgaacccgcggcgtacacgttgtcctggtacacctcgtccgccagcagaaagagccgctcttcgaaggcgaagcggatcacggcctcgatgcactcgcgggtctgcacctgcccggtggggttgccagggttgatgacacagagcgcacgagggcggcagtggtcacgcgcctggcccagtgcacggtgaagctc

SEQ ID NO: 468408 - DNA, 1000 bp, Homo Sapiens; identical to SEQ ID NO: 157393

SEQ ID NO: 468409 - DNA, 1000 bp, Homo Sapiens; identical to SEQ ID NO: 158553

SEQ ID NO: 468410 - DNA, 947 bp, Homo Sapiens; identical to SEQ ID NO: 338236

SEQ ID NO: 468411 - DNA, 1000 bp, Homo Sapiens; identical to SEQ ID NO: 158554

SEQ ID NO: 468412 - DNA, 732 bp, Homo Sapiens
tggtggctctgaaaagagccttttgggttttagaagtaggcgttcgcctatttcttcttgggcgccgccttcttaggcttgacaaccttgggcttagcggccttgggcttcacagccttagcagcacttttggcagctttcttgggcttcgcaaccttggccttctttgggctcttagccactttcttggttacagtggccgcggccggcttcttcgctttcttcggtgttttcttagcgctcttcttcggagttgcgccgccagccgccttcttgggcttcttggctgccccaactggcttcttaggtttggttccgcccgcctttttaaccttgggcttggcttccccggaggctgccttcttgttgagtttaaaggagccagaagcaccggtgcctttcgtttgcaccagagtgcccttgctcaccaggctcttgagaccaagtttgatacggctgttgtttttctccacatcatagccggcggcagccaacgcttttttcagagcagccagagaaactccgctacgctctttagaggcggccacagccttggtgatgagctctgacaccgggggaccagacgccttacgaggcgtacccccagcctttttggccgccttcttctttacaggggccttctccgcaggaggcgcggcagcgggagcggcaggagcagtctcggacatgttgagaatcaaaaactcgggtacaagtggcaaagcgccgatg

SEQ ID NO: 468413 - DNA, 785 bp, Homo Sapiens; identical to SEQ ID NO: 338237

SEQ ID NO: 468414 - DNA, 1000 bp, Homo Sapiens; identical to SEQ ID NO: 158555

SEQ ID NO: 468415 - DNA, 1000 bp, Homo Sapiens; identical to SEQ ID NO: 158556

SEQ ID NO: 468416 - DNA, 1000 bp, Homo Sapiens; identical to SEQ ID NO: 338241

SEQ ID NO: 468417 - DNA, 1000 bp, Homo Sapiens; identical to SEQ ID NO: 338242

SEQ ID NO: 468418 - DNA, 589 bp, Homo Sapiens
gcttcgttcattggtttattggcgcattacgcggtaagtggggctggggaacctccaggacgggggaggggccgcagcctgtcctgggggtcccggaggcggcgctcagcggtacttctcggtcaggacagaggatacgaccgataggaacttgtcccaggcggcgtgggcctcggccgtgaagtcggcggggaagcgcgcggccagggtgaccagcaggcagtgggacaggagcttgaagttgaccgggtccacgcgcaggatgtaggcgtgcagctcgctcagcttggacagggcgccgccgatgtcgtcgatgctcttcaccgcgtcgcccacggcggccaccaccttggagccgtgcgcgcgcaactgcgcggaccccgggtgcaggtcgaagtgcgggaagtaggtcttggtctgcgggtggctgaggaagagcctctccagagtctcggtgccgatggtgtcggcctgcgtggagatcttggcccacatggacacaatgatggtcctctcagtcttggtcagagacatggcggcagggtgggcagctgcactggagttgggcctgctcaggactggccttggt

SEQ ID NO: 468419 - DNA, 1000 bp, Homo Sapiens; identical to SEQ ID NO: 158557

SEQ ID NO: 468420 - DNA, 1000 bp, Homo Sapiens; identical to SEQ ID NO: 338244

SEQ ID NO: 468421 - DNA, 1000 bp, Homo Sapiens; identical to SEQ ID NO: 338245

SEQ ID NO: 468422 - DNA, 1000 bp, Homo Sapiens; identical to SEQ ID NO: 338246

SEQ ID NO: 468423 - DNA, 1000 bp, Homo Sapiens; identical to SEQ ID NO: 338247

SEQ ID NO: 468424 - DNA, 1000 bp, Homo Sapiens; identical to SEQ ID NO: 338248

SEQ ID NO: 468425 - DNA, 675 bp, Homo Sapiens
aagccatgcaacaatgtcttttattatgtatgcggttttaaaattatttcttgaatctctccatacacaggcaaaaataagtgtgttacttaacatactggaaattgcctaacttaatcattgcctaaagaagagaaaattatccccaaaacgtgcttaaccaggaggccaatgcatttgccgacctccaagaacatggagatgaacgtgatagacagactgtccaccatctgaaccttcattcaccaccattcgataacccttattcaggcccagatcagcagcacatttcttgccaacaatcattaagtgtccaagaagactttcatcatcatcttctgccacagaaatctgggatatatgtttcttgggtatcaccagaaaatgtgttggtgcttgaggggaaatgtcatggaaagcaaggcaccggtcatcctcaaaaatgattttggctggtatttccttgcggatgatcttcccaaagatcgtgtcgccaccaggccgagcgacctgagccttggcaatctcatctgccatctcggcctctctcccgcgcggcggccagaggagaggctcggaagaagggaggaacccgcagagcgtgcggcgcgagagggcgcagccaagcctgcgcaggtgccccggctctggcgccccacctaatcttgcgcgtgc

SEQ ID NO: 468426 - DNA, 1000 bp, Homo Sapiens; identical to SEQ ID NO: 158558

SEQ ID NO: 468427 - DNA, 1000 bp, Homo Sapiens; identical to SEQ ID NO: 338250

SEQ ID NO: 468428 - DNA, 1000 bp, Homo Sapiens; identical to SEQ ID NO: 338251

SEQ ID NO: 468429 - DNA, 1000 bp, Homo Sapiens; identical to SEQ ID NO: 338252

SEQ ID NO: 468430 - DNA, 1000 bp, Homo Sapiens
gaaagtgaaaaaactttttcaatgcccacaaataggttcccccgactattcccagagaggcactcaggtccctgggttatagctcttccacgcaaggaaagtgtgctataaacatcctcatttcatgtgacaattcttaagcatatgaaaatttatgctggcaccatgcctgcttctgtaaaaagtgggtcattgctgaaaaagatggacagatatgtaaaaacattacaatctctatctctccgagaaggtgcttagcacctggtaggttgcttaggccagtgcagatctatgcagaagttgtttccatgtaagttgatttatggttgcaagcaagtccagcccacagtggtagagataaacaggaaagtggattattaggacaaaggcacatttggggccacacagctgaaatcgtccccactgaatgtggcagtgtcttcaggcttgtcctccagcatttccttgtagtggcgtttgaagaagccaagcttgtacagtgtggctgtgatgagcgccagcagtagcagagcccccacagagctgcccatgatgatgggaatggcattgtagacctcgtcttcttctagcaccatctccatctgagctctcataaatgcctcctgtcctggaagctgggagtacacggatgtgtcgaacgtaatttcagccacactcacgaccaacaccttcttctgcaatgtctcgcggacccagccgaaactgagattgcccttcagggtgaaatccagctcctcctggacgctgaaggaggggacgtcacagcggaactgcaggcagtcagcaatggagcagtccagcatgggacttcttgaaatctgggtcaggaagtcagaatgctggggaggttttctctctgaaacacaggggagactctgagatggggcctccatgaccacatcccacacagccaccccgttcagcaggacaggaacccagaagttaatgctgatggccagatctcgctggctgaggttat

SEQ ID NO: 468431 - DNA, 1000 bp, Homo Sapiens; identical to SEQ ID NO: 158559

SEQ ID NO: 468432 - DNA, 1000 bp, Homo Sapiens
gagtccacgtgaaacctgtttatttctaagcacatatgcattataaagcaaggacaagaaacacagttttaggagaaaaacttgttaatgcattcaatccggcctcctcttcccctccgtttgggagctgggcggcttctttcgggcagggcctcgctggacttgccgagctcggatcccgaaacccaggccctgcaacgtctgtgccaggtgcctctggctgggagaaatgcagagaatcaccagtaacttcgcatcgcctccaacgcactcgctgccggccgagtccacgagctgtagtcgagcctgcacctgctccgcatgccctgcggggttcccaggaaccagctgtggagccaaggccccttgagaagctctgcggctccttcctgcccttcctgcctctgtttgctccctggggagggtggcactgcaggcttggtctgcagtgctgtcagagcaggaggctgtggttagagtcaccgtaattatcaggtgagacctggaggaatccgcgtgcaccagggtggggtgcttcgccctgagctgcagacctccatgaacgagctccatcagtttcgaggcgctgccgacagcctcagaggccagcagcgcaacctctgtccgtccatccttggctgtcaccacctcacgcttgacccccgacactgctgcaatgctgtctttggccagaaggtcaaaaatgtcattattgtaaacttccactatggagacttcaacctttgggcttcttgaggtattttccaaaatgagcctgaagagctcctcagccactctagggataattcctaagtcactctgtgggtcaagcggcagaacagggccgtcgtccgaatggcgtcccagcatggtatagctctttccgctgcccgtctgtccatacgccataacacaaacattgtacccatccaagagagaagtgagtagggggcacacatctccaaagaccgcgctctgagactctgctggaccataaacc

SEQ ID NO: 468433 - DNA, 1000 bp, Homo Sapiens; identical to SEQ ID NO: 338255

SEQ ID NO: 468434 - DNA, 1000 bp, Homo Sapiens; identical to SEQ ID NO: 158560

SEQ ID NO: 468435 - DNA, 1000 bp, Homo Sapiens; identical to SEQ ID NO: 158561

SEQ ID NO: 468436 - DNA, 1000 bp, Homo Sapiens
ttttttttttttttttttttttttttttttgaagaggaagaattatttattcagatttaatttcgcttgcattctcaaagaagtcaaggaaatcctggtttgcatatttgtttaattttacagaatagattgaggtacaaggcaagaatcaactatcttttgatttcttgagttatctcatgtatgttattgctaattcgctcacaattttaagcaaatacttttaccactgctattattatgtcacaattcacaaaatggaatggatttcccaatttgagtaaaaaacaagactcttactcctaaactatataaacagcactatgtgtgactactgtcattcataaacctggatgctgacgctcattcaaccatccgttaaaaggaacatttgaacaactccaacaggaaacaaagaataatctcaaagtcatccaacagaacagaaacccactactaagaatgctgactgctcgcttcaaagagtgaagaatgggcctcacgtcacaggaggcagtggaaactaagggatgcggccccggaaggtgcactggcccagaccccctcccactggccctggctgcaactcgtgctcagactcactcttccccctctctcaaaacccactcatgcaggggtgggtaggaaatgtgaggtcctccactgatctttaccatatggtgcaggactttcacatagctggtttcaacgagggcccttggaccccacaggaattcataacatgcaggatcactgccggggacctgccggtactccaggtagttttcctgcacgaaatgttgggtgagcagcttcttgggatcccccaagatactgtcttccctcccctcaaacacctctaacacactcagctcctcccagattttctcctcaggggcacagtcgccctctcttgcgattatggccaggacgattatcaggaggcctgccttgggcatgatctgattgtcacccagcaggccatcgtaggagaggccca

SEQ ID NO: 468437 - DNA, 1000 bp, Homo Sapiens; identical to SEQ ID NO: 338260

SEQ ID NO: 468438 - DNA, 1000 bp, Homo Sapiens
tttttttttttttttttttggactttaagatgagctttaatttgtttgttttccttaagtgcatttatcgatgtaaacagagcatgttagagattcccggggagagcagactattgctgatatgttggttttaattcaaaagaaacgatgatgccaatggtttggattgacagcagcttaaggaggaaaaaaaaaaaaagaaagaaaaaaagaaaaggctggtgacacccccctggcgtggttgacctggtcccagtcgcagtccctatgggacagcagagctgtcaaaacagaacccaatgatgacggctgaaaatcaagccagactgctgtgcggtcagcttgccgccgtggaatgccttgtgtcttggccatgtccagccaagggtacaacgtgcttgttcccgatcacccaggtttgccattggaagtcaaagacagaatcgcttcatggcactacagatgtggaaaaataaaaatctcagctagaaagaacgtccgatttggagatagcgggaggacacgaaggagtgggggccattttggtgctgagaggagggtgccccaacttcaggaggaccatgtgacggctgtggttgttttcggggtcacttgcagcacacacagcgtccccttgatgctcgatggggaccgcagacgggcctgcagacctaacccctggctgtggacaggagaggctgctccaggcttctttccttctcaatgctttacacaggatttccttcatttgtgctttcctttggtttaacagttaaaaaagaagagtgagggggcaaaatggtttgtcacttgtccaaaactgagagaagaggtggaagtgggcgccaaatctcctgggtgatgcttcctggtcctggcgatcggttgccttgctcagggtttgggagctgttgctcctggaaccaccgctggccttctgggacctcgcttccgtggtaggggacgtgaaccagcctcctggtggagctttgtgttgcag

SEQ ID NO: 468439 - DNA, 1000 bp, Homo Sapiens; identical to SEQ ID NO: 158562

SEQ ID NO: 468440 - DNA, 1000 bp, Homo Sapiens; identical to SEQ ID NO: 338261

SEQ ID NO: 468441 - DNA, 1000 bp, Homo Sapiens; identical to SEQ ID NO: 338262

SEQ ID NO: 468442 - DNA, 1000 bp, Homo Sapiens; identical to SEQ ID NO: 158563

SEQ ID NO: 468443 - DNA, 1000 bp, Homo Sapiens; identical to SEQ ID NO: 338264

SEQ ID NO: 468444 - DNA, 1000 bp, Homo Sapiens
ttttttttttttttttctggcaccagagttgacttttaatttgtcctaaagccgctgaagcaaaaaccatgataaaacattctgctttcttttcttttacaaccccacgaacgcaaaaaaaaaaaaaacaaaaacaaaacaaaaaaaagaaacaacaacaaaacccaaactatttgtaggaaaaaatggttttgtacatgggatgaaacaatataaattcaaaacttacagataagggttagctctatcactcaactctttaaaaagtttatatgaatatccagtcaaaaccaacacggtattgcccttgaaatgttaactagacggatttccaaggagaccacaggactgtatactgtcttggaatgtcctcagaaggctctgtcattgatcaggtaacagtaaaaaccccagagtcctttctttcaaatggaaaagggaaagcagagggacagaagctattcaaacttcgtcttctttccttgtggcttgtggtcacctcctcctcctctgcctcctcggaagcctcctcgccctccaaagcctccccggcctctgccaccaaatcctcctcggcctcctctaccaccacctcgtcctccaaagccgcctctgcctccaccacgacccccgaagccaccttcacccttaggtttggcccagtccaaggtaactttatttccatcaatttcaccgtcttccatggcctccttggcagctttggcatcctcctcactgttgaagtctacaaaaccaaaccctttggaggacccagtttcccggtcagtaactatccttgcccgaacggagccgtcaaatgactcctttaatgtctcttcagtggtatcctcagacaggcctttgacaaacagagttttggatggctggcttctggcattaggtgatcccctgggtccttgcaactccagcctgattgctctgccctcaatttcccttttattacaggaatttaaagcttctttagcgtcttcgaatgaag

SEQ ID NO: 468445 - DNA, 1000 bp, Homo Sapiens; identical to SEQ ID NO: 338266

SEQ ID NO: 468446 - DNA, 1000 bp, Homo Sapiens; identical to SEQ ID NO: 338269

SEQ ID NO: 468447 - DNA, 1000 bp, Homo Sapiens
gcctcttttacttttaactttatttggcaaagcagcactgcataaactgttcaagaactaggacacagcttacacagcatgttaagttcatatacattatcagcagcaaattagaaacagaaaaccacactaaactacaagtctcctataattttgagagagagagaagggaagaactaagtcagttatgtccaatctgaacagctgagtgtttacaggacatcacctgccatcttaaggtttaatatttacaaatgcctagttttaaggtaacaaagcagctgattgtatctacaacatgctattctatgacaccacatcaaaagctttaaaaagaaagctcatctctattttcttagtagcatctaacagatatccaaataccaagaatcttaacttgtgaatggtggtgttatccaatgcacaaaagcaatctgataaattaatatcagaacagaattaagtgtccaagaaaagaaaaaccactcctcaaaatcaattcacaaactaagttttccattttacagaaccctttcttttaatatttccaagtaaaatatgggcatgttaaagtaatattacacaaatttatactttgcatccttcctctaccaatttggctctgtgcctctttgaagaatcagaaaccctaaaaaaacacacattttcatgctgaaaataacagtgtaacaaagtccaaaacaagctgtgatggtgttggttttcaaaaagctttgaggactgagatgagcaatccactgtaattttatactggtcaagctgatgttgcttttacaattcatcccttgcatgtgtggaagaagaaagagcagaagataaaatcacttccacctggaccactgcttttctttatctgttaaaggcacgtatatcacccccatcagaggcttcattttgatgctgccatcttgtagcttgtcatactgctccaacatttggtttccgcctgcaggaccaacaggcaatatcaatcttcctc

SEQ ID NO: 468448 - DNA, 1000 bp, Homo Sapiens; identical to SEQ ID NO: 338270

SEQ ID NO: 468449 - DNA, 1000 bp, Homo Sapiens; identical to SEQ ID NO: 338271

SEQ ID NO: 468450 - DNA, 1000 bp, Homo Sapiens; identical to SEQ ID NO: 338273

SEQ ID NO: 468451 - DNA, 1000 bp, Homo Sapiens; identical to SEQ ID NO: 158564

SEQ ID NO: 468452 - DNA, 1000 bp, Homo Sapiens; identical to SEQ ID NO: 338275

SEQ ID NO: 468453 - DNA, 1000 bp, Homo Sapiens
ttttttttttttttttttaagacttaacgtcattgtatttattaggttctgaaacaatacacattcacatccttttgaatacagtacatttggcacaataacgtttacaatgaaataacactaatgaatggcaagagattaaaattacatccagaaaggaaaaaaatgtacaaataaagcatcacaatacaaaaaaaaaaaatcctaaaattgaatacattttacagttagccagaattattttgcacataatttaaaaagaggtaattttttagccttcttttttttttttaaagcaagaatgcattgttttttcacctttggaggaaaaaaaattatgtttctacttcacaaagtccataatgagagaacacagaagaacagctatccttcatatattttttggctttgttttttttgcactcccattttttttttctttgagagagagagagaaagagaaagggggtggggctggaaagatcagaaaaaactggcagaagtgttaacagtgtgtctattttcaaactctcgtaaaaatgaaaatgaaacaatgattactcaacgaacacgcaagcctttttctatagacctttgctggatttaaatcagcctatgtgagaacttcaccagccagaggcatcccagccagcccagctttgggtgctgaaaagggccctttctgggacagactgactggctgccttcagctgccaggtggaatgtattatttgacttcccagcaaacttgccagttgtcctgtaggaaaggcccagttcccactgccgtgcaaacactaggccctcggacaaggccatctggcattgcggttagagcttgcttggttgtccaaagtttattatggtgaagaaagcagaagaaagaacagtagttacacatgaatatgatgggcagtattatcatgtcttcctaaaaaatgagatgatgccaccgtaaagatgtttctgtgcttgtactcaactccagaagatagtctct

SEQ ID NO: 468454 - DNA, 1000 bp, Homo Sapiens; identical to SEQ ID NO: 338276

SEQ ID NO: 468455 - DNA, 1000 bp, Homo Sapiens
ttaactagtttttccagatgtatttttgaccactttccggaaagactgatttgcagtggatcttgtagaaagcgttcgaggggaagcacgaacaaaaccagatggtggattcttagggattttctttactaaatgagttacccattttttttgttcatcctgagaacatgctaacagcagcatatctcttgctgatgttacatcataacttactttacatggacaaattaagtcctctttcttatctaagtgatctctgtggcacttaacatggcatcttcgacactctagggcagggggtggcttaaaaacatgccagagaggtttggcacaggcatcacaattggcaggaaagtggtagagtgtaggaataaactcatggcctttgtgattttggaaattagttttttcagcttgttgtactggttccatctctacatcttttctacattcaccttcatttgcatatagtatctggaatattttaggaatttcttcagtttcagctctatacacatctccttgggttacaggtctaacgtgaaacagtttatctatgtccaataccatagatggattggattgctccttatcttgttcgtcattatagaacaaaatttttttgctgcttaccacaacatactgtttcttccagccatatcgtttgatatttcctctatttggtactgaaagccaaccttcaattcttgactctgggaggttaccatcagtttcatcagcactaggaaaactagcaacacttgtagaatccgagaggtccaaaagtttagcacgcaattgctcaatatcactctctttgctggccaactgcatctgaagctcattcctatgtgcacattcttctaccaattgcgcttgcatgtcattcagttccttctgatgtttcactaccatctggttgaatttctctctttcttggttgagttccagttgcagctttcgattttccttttctttctttctcaaatcttgtgtatta

SEQ ID NO: 468456 - DNA, 1000 bp, Homo Sapiens; identical to SEQ ID NO: 338278

SEQ ID NO: 468457 - DNA, 1000 bp, Homo Sapiens; identical to SEQ ID NO: 338280

SEQ ID NO: 468458 - DNA, 968 bp, Homo Sapiens
tgttgaaagggagttctagcatctcacagaccaagtggagcctcaggatggaggccgaaggccagagagcgtcctccctgtcccatggcctaaatgcctctcagaactcacagatggtcagtcgggagtacaggcagttcctgtcattccactgcccatctgtgtacatctccacacactgctcttttccccgacctgcgggctcccctcggtaccagttggtgtagtttacaggggtcccgtctgagtagcggaagtctccagggctgggaccctcagtcaggcctacataggcatatgtgttgtacttcttcacgaagcttgcaatggcctcattttcctctggattccttgggacagcaatgcggccgcctgctctggcacatgcctcctgaatggcatcaaaagtgatggactgcccattgctggagaagaccttctctcctactgtcattatggagccctgcagactgagggctccccttgtctgcaggatttgatgtctaaagtcgtggagtgtggcttggagctcctcatctagatgagctggaagccctggagggcccctctcgccaggctcccccttctctccacactctccagggataccaggggctccaggcagcccatcatttccaggaggacatggcatttctccaggtggacccatggggcctggagggccagggtctcctttgagaccatctctcccgtccctgcctggcaggccgtgggatccaggagtgccggggataccagggcttccaacacaaacgtccttcacttcgcacacagcaccagaggctgccatcaagatgaggttgagggccagagggcacagccacatggctctgggtccagtcgctgctctcactgactcacaccatctgtcctcatccctgctgtgttactttcttttcaggctccaagaaatcagcgacccacacacagagcctccagctgcttgg

SEQ ID NO: 468459 - DNA, 1000 bp, Homo Sapiens; identical to SEQ ID NO: 338281

SEQ ID NO: 468460 - DNA, 1000 bp, Homo Sapiens; identical to SEQ ID NO: 338282

SEQ ID NO: 468461 - DNA, 1000 bp, Homo Sapiens; identical to SEQ ID NO: 338283

SEQ ID NO: 468462 - DNA, 1000 bp, Homo Sapiens
tttttttttttttttctaaaaactgtaggcttttttattcagttaagaggtagacaaatgaacatggaaggctgtcccatttaacttgcccgaagttcacattccacttcattcatccatcccacactgccagaaatcttaaagaaataaccaagattgccaacaggctttttctttcttacttcttcttagcaataacagtcaataaactgcttgcaaaaaagttactaatttaaattttcactgtgttcaaagaacctcatccctctaagaagctcccgaatatgccaatagatcctgccactactgacaggagggcagagtaccaaggactctacttatataagagactacaagggaagttgtagttatatttttgttgttaaatccctgtgcatgtgagggcagaagctggtgaaaccaacaacgcagagcatgctctgtcaaacggctcttcatggtttaaaaaaaagaaaaaaaaatcacaagtcatcttcagagacaacattaaaacataatggaattgaagcctgatacaaaaagtagagaaatatgtacaggaattcacagcccagaaggaaaggggacctcagcaggagccaaaggaacccgggctattttacacagctaattttgagacaattcatatttagcacaaaagcagttatagcacaagtaacacttccctcctctggctcccaaataaaaagactcttgtcagtcttctgttaacactgtaatcattcttcaggggagcaggaatacctaagatggtcccaaacattgacacaaattttaatctcaaacagcttcacattctgaggatgacatatctgaagattgccatgatggcagcactgataactccagaaatggggactgtgacaaaccaggccataaaaatgttacgaaagagacgccagtcaacagccttcttggaccggagccagccaacagacacaacagagcccactttacaatgtgttgtactgatgggaag

SEQ ID NO: 468463 - DNA, 1000 bp, Homo Sapiens; identical to SEQ ID NO: 158566

SEQ ID NO: 468464 - DNA, 1000 bp, Homo Sapiens; identical to SEQ ID NO: 338286

SEQ ID NO: 468465 - DNA, 1000 bp, Homo Sapiens; identical to SEQ ID NO: 338287

SEQ ID NO: 468466 - DNA, 1000 bp, Homo Sapiens; identical to SEQ ID NO: 338288

SEQ ID NO: 468467 - DNA, 1000 bp, Homo Sapiens; identical to SEQ ID NO: 338289

SEQ ID NO: 468468 - DNA, 1000 bp, Homo Sapiens
ccatcttcatccttttattaaatgtaacccccttgagccccgtctgcttgaggggacccaagaggaaatcggggtgttataaattaaccatgtcagggcacatcccgggagcaccgccagctggacgctgcgctcctccagtccatcccaaagtctccacccgccgggagctgtcacagcccctggctccgctgcctgcccacgccgggctcagagcctggagtttctcgtctctctgccaaggcaccagggctcagcagtattcagaataatcttcctccacgtagttggcagggaaccagccaacccggccatagatctcccctcgccaccagccttgctgtcccttcttgttaaggatcttgatgatgtcaccctccttgagcgacagctctgatcggtctcgggcgcagaagtcatagcgggctttggctgtgccaaaatactttgtgcttcccactgctggcctgctgatggttctcttttcaggctccttgaaggggaactgcaaggtggtgtccagagacttgaagcaatcctttagagagttctgctggtaaaactccaccagctccgtaagcccccggaaagcctttttctctgtgatccggtacagtccttctgctgtcatgattttaatgtgcttgacctcgacgttatatttaatgctgatggcaaattctgctgcatccttcaccctctgccgcaccaagaaagtcccgtccgagcggttggccaggatgctctctgcccctgcccgctccatggggcctgcgtaccagagatgaacagacaggtcctgaggagggccatggacatagggcttcaccctgttacaaggaaaccagccaatttcattagtagatgtatttctgccctcccaccagttctgttcagcctcagccttcgtgagctccacaatgtctccagggttgagccgtagaaagggtccaatggctccagggggtggaggaagcccgtagtattcctgaaacacctc

SEQ ID NO: 468469 - DNA, 1000 bp, Homo Sapiens; identical to SEQ ID NO: 158567

SEQ ID NO: 468470 - DNA, 1000 bp, Homo Sapiens
tttttttttttttttttttttttttttagagatggagtcgcccaggcgggagtgcaatggcgcgatctcagctcactgcaacctccacctcctgggttccagcaattctcctgcctcggcctcctgagtagctggcactacaggcacgcaccaccatgcccagctaattttttgtattttaatagagatggggtttcaccgtgttgcccaggctggtcttgacctcctgagcgcgggcaatccacccacctcggcctcgcaaagtgctaggatcacaggcatgagccaccacgcccagtcagtcttgttcctttttatggctgtatagtattccctggtgtgtatgtaccacatttttttaatccagtctgtcactgatgggcagtgctgcaacgaacatacgcgtgcatgtgtctttataacaatgatttctattcctttgggtatatacccagtaatgagattgctgggttgaatggtatctctgtctttatccccacactgtcttccacaatggctgaactaatttaatttacatttccaccaacagtgtataagcatatctttttctccacaacctcaccagcatctgttattttctgacatttttataatagccatttggactggtgtgagatggtatctcgttgttgtttcgatttgcatttctctaatgatcagtgatgctgggcttttttccataggattgttggccacagatgtcttcttttgaaaagtgtctgttcatgtcctttgcccactttttaatggggtggttttttcttctaaatttgtttaaattacgtatagatgctggatttcagacctttctcagatgcatagtttgcaacaattttctcccattctgtaagctgtctgtttactctcttgatagtttcttttgctgtgcagctctttagtttaattagatcccatttgtgaatttttgcttctgttgcaattgtttttggcgtcttcgtcatgaaatctttgcctgtgc

SEQ ID NO: 468471 - DNA, 1000 bp, Homo Sapiens; identical to SEQ ID NO: 338290

SEQ ID NO: 468472 - DNA, 1000 bp, Homo Sapiens; identical to SEQ ID NO: 338291

SEQ ID NO: 468473 - DNA, 1000 bp, Homo Sapiens
tttttttttttcctttttaccaaacaacttttatttgcatgtggctacttagtaaatagtaatcagtgatcatcctagacagctgccaggcaacaaaaggagagacacatagaagcttttcaaggtatcaggttgcaaaaaaaaaaaaaaaaaaaaagtatcagagtgatcagaaagtgagcagtgagcagtagtgaagccagaattttctttcccatgactcctgtagttctgtccctgtccccgcaaaccccaggaggggaaaaatgtagatacaaaactgtaaggcctcaaaccagttaggacaagtccctttctcgtaataatttatttcattcccaatgacagaaggcacgtgcagttacagggctgtgccctattcgtctgggtcaacagaagagcacagctttctttagaaaaacatttactttaaaaccaagcaccttgatttgatattttagtgtgcacaactttgcccgttgaggtcctggtgagcccttgcccaaccccgtgggcaccaccattccgccaggcctcggagggccaccgggtgcttaagagaatgtgaggggggtgagtgcaggtggcgcagcgcggttcctgggacatgggtccttcactcctcgctgagatgttgcggcagccttttcttccaatgcggttgtggcaggagaatccacggatgtaatgttttcacctttttccctgagggtgctttctgaggaaccagtccttaagaggtggggtcttggattcctgacccaggcgtccggcagctgctcagtttccgagatgtcagactcatggaggagcaggctatgcccttccctccccattccccacccctcaagccccaggtcttactgtataatgatttattttccccacacgtctaccctcaaaattggcttcatgcagatttcccttgaatcctaatgctggagaggaaaggggaggggaagtgggagggtggtgggcagggtggcttgaccctgtcagc

SEQ ID NO: 468474 - DNA, 1000 bp, Homo Sapiens
ttttttttttttttttttgtggctgttatgcttttaatggaagcagatacaaaattcatcaatgcaaaagaatgttttacatactcattaacatagtgattaatgtaaattatattttgacttgtaaaatacagtgtgtttggcctcaagaaactacagagctgcaactcaagataactggaaaggctccttacattgtttttgcccaccacctttatataatactcctaaatgatatctggggagggaattaaaaaataatacaaagctcttttcagctgtggttcaaagaactctagtgaagctgtatggcaatgacattttgggaccatgaagtttccccagaagtatttccggtaagaggcagttaagaagcttaatagtttcaaagtctggaaagcagcaaagatatcttagagaaaacattataaaccccacttctctcctacacagacattttaaagcatggacgtaactttaaggagactgagaaaacatcagtagttttcacaaagcttcaatgaacaccccaaggcacaagtgttgaaaacggcctgttcactaaaacgtcacttttggaggtacaggtatgctgtgcttgcagtgagaggatgactttatccctacttaaaagcaccaggtgtcaagctcagcttccatttacacaggatgcaccaattatccctatgatagtgactgtttcaagtactatactacatttccaacatgtcttttgcctatttgcttagtcggtactggggttcttttaagccccgtaggtctgtagaatattttaaaaggctagaattacctcaaaaatagtcttgaaataatactgagtccttctaaagagctcactggatattttaataacatttacagaaagacaaaatttgcagtagctgagtttaagtgaagaataatgtagaactaacgtgggctaaaatgtttcataattaatgtcaaaaattgccaagattattaatatatattttggtaa

SEQ ID NO: 468475 - DNA, 1000 bp, Homo Sapiens
ttttttttttttttttttttttttttttttcttttttccattctcctttattccataaacacctagttacaagttgcacaaatcaaaaaataaaggcagagaagggtgtagggaagattcttttgatgtgtgtgggcaggaggagggagagagttaggaaccagtctgctccttccacagccctagatagggctacggcccctcagtgggggctctgaggaagaggtgggcaaagatccagggtagctgagggatggagggggcccctaaacccagagctcaccccaaaatgcattgacccttcaatgcatggcaggagtaggatgggaaaggtgagggggtttgaagatggagtggcagaatgaaaaatcaagtcagtagatgcagaggcgaagtcatcaatggtaaaccaggagattaaagaaggaaaaggtagggaaagggtgccgtgaaaggttctccctgagacccccagggagaggtgggggccggcttgcctgttaatttaatattaaattggggatgggaatcgagaggaaaaagttattcaggggatgatttctcagcctctcagcctgtacaagagaggctgagggcccggggcctcaccagtcatagcggcgggactgtcgggaaggggagtcctcaggtccctggatggccaggcggggaggcccctccgcccttcgtcccccagcccctgaggactcaagccgccgaaactccaggggacgctgctgccggaatcgggaggtctcccgccgccactcgtcatcaaacgctgcggcctcactctcatccaggttgatatagtcctgccgctcctcctggtcccccgtgcgatggtttcgggagcgctggaggatgtgagccctgtcccggatgtgatgcccaatggacatctgctccagtccactgtctgaatcccgaacagtcctccgtgtctcccggatcccgcctggtgccgagcgcatctctgatgtctcttggtagaccttgg

SEQ ID NO: 468476 - DNA, 1000 bp, Homo Sapiens; identical to SEQ ID NO: 338293

SEQ ID NO: 468477 - DNA, 1000 bp, Homo Sapiens; identical to SEQ ID NO: 338294

SEQ ID NO: 468478 - DNA, 1000 bp, Homo Sapiens; identical to SEQ ID NO: 338295

SEQ ID NO: 468479 - DNA, 1000 bp, Homo Sapiens; identical to SEQ ID NO: 158568

SEQ ID NO: 468480 - DNA, 1000 bp, Homo Sapiens
tttatgatcagctccagctacctgggcagttgtggtggggtggatgggaaggcccacagcccaagggatccataataataattgcttggccagccatgtggcctgctggcgtatccactgtggcattctttgtggcaccaagtcttcacctgccccagggaaccaggcaattgtctccaatccacatcaaagatgctggggctctctaaagagtaggtgccagtcctgggaccaccctgagtcagggacacaggtgggcctggatccaggtgcccagtgaagaggggagccacacacaccaggcaaggagggttccatgacaggcatggggtcaggctccccacgtctgctaggtggcagatccagggagcagagcttgggccccaaggaggctgcctagaaagggcagcagggttctgagcatggcatgcacctgaggcctgcctggcacaggcacccccacggggacacatgcatccctgcaggcactaccctggggtgcatgcctgtgcgcagactgaggcgacagctgtttctgagctcgggcccaggctgcagctctcttgctgtctttgcccactcttcaagggctttgaggtgaaaagagtgtggccctcatgctcctacatgggtgcacaagtgcccaggcctgttccagttaccttctagcccacctggtagctgcagggcctcagtcttcaggggtagggtccccaagtccaccctgcaccaccccactggtctcttcatggctgtgccatgtctaccatagatgccccccaactttccagtcatgcctgtaaggactacacaggaagagggtggctttgctggctttactccgtgactttgtccagccatgacatcagcttcctctgggccccaaggagaatcaggtgcacgtgcccctccttggatacccaggcctcaggggccctgctctcccaccttcgcccttcagagcccacctccccatggacatggctctggagattgagag

SEQ ID NO: 468481 - DNA, 1000 bp, Homo Sapiens
ttttttttttttttttttgatatatatgcatatcttgctaataagtttggtttatcatcacatcaagataaattgcctttagcatagaacttgagataagtagacgttcactagcaagtgctaacatttggatcagggcaaaggcgtttccaggagtgtttttataccagacccctgcttagtccatggggctgaggcatgtcacataactcagagcaagagccttctatttgtgtaagacccaaccctgggaaggatgcccgagacaatagctatgcctctgccccagcctgatgccatgtgatctagagcctgggcagcaacaaccctgtggtcaaagacatggaagaaacactctgcaaatcccacagtctgttcgacggcttggaaaggaagcaagtggcattgggacaattgctctacatgcctacagcttacctgtcaactacagggggctgccaaggtgtgcaagacgacctgggggcagagccatgctcagggcacagatagatggggatgggagtcgagatggggcatgggaagtgatgagggctctgagaacacatgaagcaggtattggacatcagcagatagatgagactccttggcaccacagtccgagcctggggttgggggatagctggggagttgtcaggcaggaacattgatgtagtcatctgaatcactgtcctccatcatggcggcaggctggtggtagaggctcacgtattcacagctggtcttcagagatggggcatggagccagggagattcagacacctgcagcggggcggggggcaacggcgctccggggccgggaacgggggcctcccctgtgcctgcagcgtccgctccacgagcgcgccgcgggcaggcgctgtagatgttgttttgggagcgcggtcgcggcgacccgcggggcctctgggagctctccagggcgcgcatcctcacggccagtcggcgggcccgcctggagagggctttcctcctttcaacg

SEQ ID NO: 468482 - DNA, 1000 bp, Homo Sapiens
ttttttttttttaacgtataatactgaccttttaataagtaaattaaaactgggaccgtatatacacacacatatacattcctacacagttaaacagtgcattacaggaaccagaaagctaggtctctgtagcccagaaaaaaaaaaaaaaaaaaaaaaaagttcattgaaaaccctcgctagagggtggtggaactggttggaggcggtgcagggggcgtcggtggggatcgatcaagtgtccgggtgcgggcagggggcccccgagttctagcacgagcacttgcactcggaaatgatggggtactggatgggaatccagccgcagcgctggcccccgcgccgctgacagcgccaccgcagcaccgtgaggtgcacggacttggacggcttgcacaccatgccctcgggcacggagcacgagcgcttactgaagcagctgcccaccttcacgtagcgcggccaaaagcggctgcccaggtcgttccacgcgtacagcacggggcagaatgtctgcgaccacagccacatctgtaacttcctccgcagcttcttgcttaggcgctgcttcttgccctgggccaagccctcggagaactctagccctttgatctcgctcggcatggcccccgacggccgctgccgcagcagctggtccagctccgccaggtcctccgcgcccccagctgcacccccgcccccgccgggccggtcctcggggggcgaggtggccatgaagcctgggtcgtagtggcccccgagcagcgagcgcagcagcgtctcgttcagatccttttccttggggtcaaagatagggtctgggtgttcgatgaggtccaccaggggcaggttgtcgctgggtgccgggcggatgtggagatagtgctggccgccggccggtgtcgcccgcagccccaggaccaccaccagggcgtagagggtgacccctaggctggggcagcgctccatgcctctggcgcgcgcccggggctgctgcttc

SEQ ID NO: 468483 - DNA, 1000 bp, Homo Sapiens; identical to SEQ ID NO: 158570

SEQ ID NO: 468484 - DNA, 1000 bp, Homo Sapiens
ttttttttttttttttttttttttttttttccagacaggaaatggcactttaatagttggggccagggtgacaggaccaagatggggctggcctgtgtcagtcaggaagcctccctcttctgctgggacagggccttgcggcagctcctcctccccgcctgaggtcctaggcctgccacaggccagcatgccggtgaggtcagtggcaggagccacccagaagccccgcagatgacggagctgagaacagggacttcacctccacgtgttgccatttcctcactggaaagtccttgggaggtggctgggctcagcctgagctcagggctcttcggtgggggttggggcaggggcagggcgggcacttgcaggtggcacaggcttcatcaaggcaggacacgggcttcatcaaggcaggagccacagcgcccgagccctggcaggggaggtaaggcccaggatggggcagggccgtgtgctcctggaacggacatccttctctgccagagacctgctccccaagccctgtccctcccaatccccaggcagcccactctgccctccatagatgaatctaatcccatatattacaataaactgcatttgcctctccccattgccccaccctcccctaccctgggccagcggcccccacttccttgtcctctggcggtggcaggtgcccctcctcaagcagtgccacatcctgtcagcagccagctgtcctggcactggcctgagggctgggggacgcagagggcggggctgcacagctactccaggtagatatcttctgtggggcaggtgtactccacaaactgcttgtagaactgctggaatgctctccccacggactctgccagggctttggtggagtcttcagacacaaagacgtggcaggcaaaccggtggtcggcggggtgcttggtgatgaacccaaagtacttgttgttctttggatgatatccgcagaaagagatgttttttaactggaaaaagt

SEQ ID NO: 468485 - DNA, 1000 bp, Homo Sapiens; identical to SEQ ID NO: 338301

SEQ ID NO: 468486 - DNA, 1000 bp, Homo Sapiens; identical to SEQ ID NO: 158572

SEQ ID NO: 468487 - DNA, 1000 bp, Homo Sapiens; identical to SEQ ID NO: 338302

SEQ ID NO: 468488 - DNA, 1000 bp, Homo Sapiens; identical to SEQ ID NO: 158573

SEQ ID NO: 468489 - DNA, 1000 bp, Homo Sapiens; identical to SEQ ID NO: 246457

SEQ ID NO: 468490 - DNA, 1000 bp, Homo Sapiens; identical to SEQ ID NO: 158574

SEQ ID NO: 468491 - DNA, 1000 bp, Homo Sapiens; identical to SEQ ID NO: 338307

SEQ ID NO: 468492 - DNA, 1000 bp, Homo Sapiens
ttttttttttttttttttttttttttttttaattgaaaatactggatttaatagaaaatatcacattgtaaacaaatccattgatccatgagcttaaaacagaatgacggcacaatcacatagaaaagctaaagacaaaatactggtaccaaacatagcccttaggcctgggctaggctctcaaaggtctttcccagaaatggaggcagcagtagcttcaaacaggcacaaaaacagccaggaggaggcagcatccactccatgaaggcctaagacaatgaaaggaagccagagcaacagaccaccttgggatccggggagaagggtaaatgggcaaaagggttgtatttcctgatgctctcagaacatcagaccacaccatgtgaatttaagcaggactattttaagtggggaaacaatactagaagcatttggtgtattttcctggcactcacctcctaggtaagcaggagagcgggacactcaggagttgtgactaaactcacacttaagctgcctgtccagaccgtccccttggctgaacacaacactgaaattgtggcagtgtctgttgccccagtggacctcccacttactaatgagtatgtaaaacagaggagccacagtgaggcctttcacaaaaacacagggctctgggggaaaaacggcttccaccttctgccttttggtgctggagagtccctgagggagagaagtttgacgtggctgggccccttgaggctctggatttatcaatagaagcctcctctttggccccacccacccaaatccacccccaggttctcctagttcagagaaaagctgtgaaagtggaagaaggaagggatcgttttctttccattgcacttgttactgaccaaagagactgcttccttgcacttattttagatattgagagtttgtgccttcacttggaacaatggttctcaaccaaggggcaggcctgtgcaagaaggactctcaagaggtggtatccaat

SEQ ID NO: 468493 - DNA, 1000 bp, Homo Sapiens; identical to SEQ ID NO: 338308

SEQ ID NO: 468494 - DNA, 1000 bp, Homo Sapiens; identical to SEQ ID NO: 338309

SEQ ID NO: 468495 - DNA, 1000 bp, Homo Sapiens; identical to SEQ ID NO: 158575

SEQ ID NO: 468496 - DNA, 1000 bp, Homo Sapiens
cggtgtgtgcttgaggccctaggaaaggggagtcttccacttccgtgtggtgagaggtcaggctgggactggctttgagaccagagatggggagagagggggcctgctgcgaagtcctggcgtcctcttccctgaggactggagagagaacgtccctagaccatgcagtgcacagcctgcgggccaaggcgggttgctgggtgtaaggtgacctgggcatcctgtcaacatgggattaaactagaccgcacacgtgtgcgcacatgtgagtggctatctacatggctctacagagcgctacatagctatacatatacacatcttacatacatatacatatacatattcatatacagatcttgctacgtttacagtagaaaaaatgctaggccctcagggccctggcccttttctcccaaggtcgcaggcttctgaggctccccagggcacaccccagggcagcccctttctgggggcagagtggagctccaagttacagctaacgggctgatggcagctgtttctctaaatgaacacaatgacacatctgctctaagaaccgccaacactggccactcccacccctgcccagccccggagaccccatctgcctttctctggcttttgcatttgggacctgcctgctccctcctccctccccctccctccctctagtgctgagtattaaaatagtctataaaagcaagtgaccaaaaatctatagctctaagaatacctggttattttctgctgtcttttgtttttctggtgtgtgtggttttttaaataattattactgttattggtatatctcctaatcacagttaaacctgaaggaagaaggaagggagagaaaagaagaaagaagagggaaggaagggcccagctcatagattggatggcagtttggagcgcactggctcaggcctggccccaggttccctctggggtccagcagtcagagggggccccccagaagaggtggctcttgccccaaaca

SEQ ID NO: 468497 - DNA, 1000 bp, Homo Sapiens; identical to SEQ ID NO: 158576

SEQ ID NO: 468498 - DNA, 1000 bp, Homo Sapiens; identical to SEQ ID NO: 158577

SEQ ID NO: 468499 - DNA, 1000 bp, Homo Sapiens; identical to SEQ ID NO: 158578

SEQ ID NO: 468500 - DNA, 1000 bp, Homo Sapiens; identical to SEQ ID NO: 158579

SEQ ID NO: 468501 - DNA, 1000 bp, Homo Sapiens; identical to SEQ ID NO: 158580

SEQ ID NO: 468502 - DNA, 1000 bp, Homo Sapiens; identical to SEQ ID NO: 158581

SEQ ID NO: 468503 - DNA, 1000 bp, Homo Sapiens; identical to SEQ ID NO: 158582

SEQ ID NO: 468504 - DNA, 1000 bp, Homo Sapiens
ctcctggctgtttattacagaacgaagaaaaaacacactggcttgaaacagacgccagatttcaaatgtagaggtgaaatacgaggtggcaattaaaatgtgattacagaaagtctggacactgagaaaagtttacaggacagtgggtgtgggttttctataacagacacttaaatatacatgacgataattgcagatagaaaccatcaaagacaaaccccaaatcaactaataatgtttacagatgttcccccccaaaccacagagccttacatcaaaacaaatactgaaaggctttaaaccaggaacagctcgccttaaccccacgagggtgcacacaagctgggctttttctctcggtctgaatggtaaagggaggaggatactctagctcctccaggtggattgctgagacagggctcggctcacacactgtctctgcgcctctcccaaatctggagaactctcccagcctcctggtaaagtgtctctgtggggcacttaacgataaaacagcttctgctgtaaagctcattaggaaagagctagcggagactgaaaggttcgcaaaagagattaagaatcacacaaggcaataggatttttagtgaacatagaaataaatggccaagtggttttctatttggcatttgtcaacttgcacaacaactcttggtcatatccacattgctcattgcattaaaaccataagcgactcagccacctagcttaacaaggtatcactggagcaaacaacacggtctgcatatttgtaacattgtataataaacacaaaacaatgcatagtaaacacaactctactgaaacaaaagccgtcgctttatttacaaagtcacaaaatgaagtataaatacttctgtcattaatgtttaggaaaaccatttacaaaattttcaaatatgtacacgtagcttgaaaaatcaccagctttccattttgtcacaggtagagagagggataagcatgggctgacaacacc

SEQ ID NO: 468505 - DNA, 1000 bp, Homo Sapiens; identical to SEQ ID NO: 338321

SEQ ID NO: 468506 - DNA, 1000 bp, Homo Sapiens; identical to SEQ ID NO: 338322

SEQ ID NO: 468507 - DNA, 1000 bp, Homo Sapiens
ttatttataaggactttttcccctttaatataaaagtataactacagcagttcaatgtacaaatacaaaaaaagttctcatactaaaaaaaaaaaagtaccataatactgtacatacaaaaactgttcaacaagaatgatttaaatatgtctgttcttctccagatctggaagacacaaatgtaaagttctgcaactgtattattgctaagaacatgtgcctgggaacactgtgtttccctttctctccctcagcccagccccgcctccagagtcccctgagcttggatcatgagccaacagcatccctgaagataaccagagccaaatgtttactcaatggaagtcattattcagtgagctgctgcttaccataaactatgaaaagcacaggttttaagcccgccaggattaaatccagacggaggtcttcccatcccctgatttgctactggcagtgcttttgttggacccagctttggaccccactttggccttcttctcccggggaccatgagggttgttttggtgactgtaggcctgaactgccagatccaagcgttcctgagccatcctgatctcccgctgcagagcctccaggtcagctgggaggttctcctcatggctgccatactgctgttcctgggctgtgttggccttgttttgcttgtaggcgatcttagcattggacagttcggtgtactggatttgatctggtttgacagcaatgttatagccagggggagcagatggtgtattccaagtgaaaggataattataagcacccggatcctcaagttccctccttttactgtttagtgagtctcgaatggtcccaaaccctaaatgaagcatctcccaaatgttaagcaagaggcaaaggcctgtaacaccatacattatcagaaggaagatggtcttttcagtgggtctagaaataaagcagtctatcttatgaggacaaggaagtctgctgcacacataaaacgggtggacttgga

SEQ ID NO: 468508 - DNA, 1000 bp, Homo Sapiens; identical to SEQ ID NO: 158583

SEQ ID NO: 468509 - DNA, 1000 bp, Homo Sapiens; identical to SEQ ID NO: 158585

SEQ ID NO: 468510 - DNA, 1000 bp, Homo Sapiens; identical to SEQ ID NO: 158587

SEQ ID NO: 468511 - DNA, 1000 bp, Homo Sapiens; identical to SEQ ID NO: 338326

SEQ ID NO: 468512 - DNA, 1000 bp, Homo Sapiens; identical to SEQ ID NO: 338327

SEQ ID NO: 468513 - DNA, 1000 bp, Homo Sapiens
tttttattattgtcttttttttttttaatcgaaggtcccttactggtcctgcttccatgagtagccgtgaccaggggaaaagggagaggaaccagccggcacagggaggggtcatctccacaacattccatttatacacagaactaaacagacaagcacagagtcactattgcggttagaagttggcagcatgggaagggggaggaccaggtggggaatggggatgttgttaaaaaaaatacaggctcccccacaactggggtgcctggggggaacttggtctgcttcagcccaagaggaatcaaaagatcaaaagcagtttgggaaggccagaaccgtcaagggatggagggagaaggaaaatccagggggtggggggtctgtttggcaactggggtgaagggattgccctccccctgctgggatccccccagcccctccggtctggcaggaagggggcagcctgcaacccccaagggcaggtgtggggctgccagatgctccaggcagggggccagaaggggctcacaaaggcttgccctccagggagatgacggcactgccccccagcttctctgccagggtgcagcggtccttgacctcctcgtagcagtttgcttgcaattcatgcttgatccctgtcagcttcttcttgatggcgtccttggagctggcataaatcattttgctcttaaggggcgcagactcgggggcccagaagataaacaccagatcctccttcttgctctccttggtctcataggttgcatcatagagggcatagcggcagtccttatctggcagcatcttgacaaaggtggcgtaggggtcgtcgacagtctggcccacatcgcccaccaggatctccttgccctcctccaggatgatgttcttcttgtcctcactcaggcagaagagcaccgccttcttgcgcttcttcacctcctctggcgttgaagacttacgcaccttcatgtcgttgaacaccttgatgacacca

SEQ ID NO: 468514 - DNA, 1000 bp, Homo Sapiens; identical to SEQ ID NO: 338328

SEQ ID NO: 468515 - DNA, 1000 bp, Homo Sapiens; identical to SEQ ID NO: 338329

SEQ ID NO: 468516 - DNA, 1000 bp, Homo Sapiens
cagaatctctgatcctttatgatttcttctgcacattcttgtgagagggatttgggaacccaagagagctaaattgccataggtacatttaaggcagtacacaggcatcagcactaaggcagtacatagtagcttttacttatttaaatccttctaccaatttctggtttagtagaaaatacttgtcattagttagaatagcattgagccttgaagtgaaatgtaattagactgcgttatatgtcttacctaagatataggatccagccaggcgtggtggctcacgcctgtaattccagcactttgggaggctgaggcgggcagatcacctgaggtcaggagtttgagaccagcctgaccaacatggagaaaccccgtctctactaaaactacaaaattagtcaggcatagtggcgcacgcctgtaatcccagctactcaggaggctaaggcaggagaattgcttgaacctgggaggcggaggttatggtgagccaagatcgcgccattgcactccagcctgggcaacaaaagcgaaactccatctcaaaaaaaaagagctataggatctttacaatatattattgtagtataatagaattttagagcacaaagagacattgctgacatgttcttgatcagataaataggccagtcaaccctttgtcttaacctgtaaaagtatcctttgtgagcactccatagtactggaacaattctgtgtacagttcatgtcggtcaaggttcgaaaacctgactagtttgttattagccaaatttcaagtaaagagaaattggatggccccagaatacccacttgaattctgtctctcagaaaataacaccatggatttactaacattacctctggcacagatagtatcatgcattgcaacatttattgatggagttttcccaatttaatatttctcatcatttcctcacatgattagtactgctagcggacctactaaaattttaacactgacttattattagag

SEQ ID NO: 468517 - DNA, 1000 bp, Homo Sapiens; identical to SEQ ID NO: 158588

SEQ ID NO: 468518 - DNA, 1000 bp, Homo Sapiens; identical to SEQ ID NO: 338331

SEQ ID NO: 468519 - DNA, 1000 bp, Homo Sapiens; identical to SEQ ID NO: 158589

SEQ ID NO: 468520 - DNA, 1000 bp, Homo Sapiens; identical to SEQ ID NO: 158590

SEQ ID NO: 468521 - DNA, 1000 bp, Homo Sapiens; identical to SEQ ID NO: 338334

SEQ ID NO: 468522 - DNA, 1000 bp, Homo Sapiens
gatgtttaaaatgttttatttttttttctttttaaaaatatttacagatctgaactctccccttttcgtccctaccatcctcgggatgagggaaacgaaaagaagcaatttagtaattgtccaaagcctctgagggcctggcttggccgagcgtgtatgcatgtacatatatacaggtgtatatatgggggaggagtgtacctggttttgtaggtgttttcctgatttttttccctaccaaccacagcctgtctggccaaaactccctttcccaccaccacccgagaacatctcactccgaatggttttcaaagcgtactggttcggtctaggtaggaagcaggctctctgacttagggaatgccaataaatacccgaaacaatcaaaacaaaaagtagggcagagaccataaataagagctaatgaatacacatggtgtatttcttcatatttctggaaacacgccgccttgctccggagccctgcttacagtacagtacgcgcccggctctgcgggcagctgggggcggcgcggggcggcgggccggtcagtagtcgagcttgttgtataggttgtagagaggtaaggccgagaggttgcttcccgggtagtagagcggcgcgggaaaggcgagcgagcgcggcaccggcacgcgcagcagcgaactgtcccggaacaccagcggcatgctcaccagagtctgcgccgacgcgtgcgccatgttggccgcctccagctcagccgagagctgccgcttccacttgttgcggcggttctggaaccaagtctttacctgggtctccgtgagctgcaggctggaggcgaggcaggcgcgctccgagctgctcaggtagcgcttcatgtcgaaggtggactcgagctggtacacctggctgcgcgaaaagacggtgcgcgtcttcttcttggccgcgccggcctgccgctcagcgccgccgtcccgcggccgctcggaccccggcgagggcgagcccgcgggc

SEQ ID NO: 468523 - DNA, 1000 bp, Homo Sapiens; identical to SEQ ID NO: 338335

SEQ ID NO: 468524 - DNA, 1000 bp, Homo Sapiens
tttttttttccggaggcttttgaggcttttatttatttttttcacataaattacacaagcactttataaaatggttacacagaaaacaccttataagtgcataaattaacacccccccacccctcaaatgggttctggagaaatgggctgcatttatgtgaaaacctgtctgtgcgtacctggattgggctgggatgtgtggtgggggcctggcagaccaagtgaggctgttgtagctgttggctgttgtgtgtggtgtagtgtgtcacagtgtggccatgaccttgtgtttgtgctggacccagtgccatgctgttcaggatgagtctgtgtcacccctgacctgtgcctgatcgtaaggtccaaagtgtaaacactgtgaccctctgtctggttgacactctcccatagatgcccatgtgtggctctggggtgacaccaggagggacagtaacaccacctgtgtgtggacctatgggtttccatgtgtgtgtgatgagaagtgggtcacagagaaggggtttcccagggcaaattcagatgacagccctggggaccccagaagctcctcctcccttacctcccttgcctttctctgaatcccacgttaaaaattaaaataaaatgaaataaacaaaaacagatttcttaacagttcagacaggtgcgggacgcctctgggaggggggcgcgtgtccttgtcccttgagctcttccaccgaaggagaacagtgtcggcacaaatgtgggggccctttggggcgtgcgagggcagtgttcccctcctgggtgcagtctgaggccaggagggtggggaggagtcctgggtctcaggcctcagtgacccctgagtgggcctggggtcccacagggcagaatgggcaggctcactcgcaggccgacgccaccgacgtgacgctagtgattttggtcgagtcgtcagaccacggctgcagattctgcagggcgaagagcgacgagttgtgcacgcacagagggt

SEQ ID NO: 468525 - DNA, 1000 bp, Homo Sapiens
ttttttttttttttttggcttttgaagggagttctgtttatatatacgtcaacatccagttggaggtgaaaaggttagcacttgacccaggaagtatccatgtttgtttcaaaaataaatctgcttcataaatttcttcatcagtctttttttccattatgagctttgattataataaaggagctgttattaacttttattcaagaaaaggcccatctctttgaaaatatttaccacccttctccctttcccctcatgaaatgtgccaacttcataggaattaacaaattgtagcccagccaaatacacggatgcttaagcatacctgaaacttgagtatatttatttattacagacatcctaagacccgtaaactctgctctggatcatatcactccaggatctcagagctgttcatgattgtacaggaaatggggaatatcataggctcacaaaggataactgatagaactcagtgtggtactttggggacatcaaacattgtgcgacatgcaaaagactattcacgaataacacaaaatatacattcattgtgccatccatcacattaacaattgagctgaaaatacattatatccagctaagataactgtggaaggaagaaattggtttgaataatacttttaggttctgaataacccagcacaaattttaaacagagggtggcccgagaagaaaggggtagagattgggaaagacttagcacaggaagccgggtttctgaagtttgtgctctgcagggcttcttaactgtaagaacaaatcaaggctaccctctgaggcatctgattgggtttaaatgagggaattttttctttcacctataaaattgtaccagtttagagagtttgcccaccctgttttagtaacctaaacatttctagaaaatctgtataaagataaatctcttaggacaaagtatttacaaccagcaaactcacacacatgaaaatgacttaaattaagggatgaattaatt

SEQ ID NO: 468526 - DNA, 1000 bp, Homo Sapiens
gaaaattgattatggttcctttatttacaagttttttgaacaccatccctgtatgaagcatacattcaaatattcttagcagtgagcgagtttaaccacggaacactgtaaacagatagggcctttaaatattttcatcatctcttttcccctctacattgcatcttttaaaattcgctttggttccttcagggaaatatatatatatataatataatatttatcttttaaaataattccacctcactctcaggctcttggaaggtcaccagaagcttccaagctcagttcaagagccaatgagggctgagtgtggtgctggaacccggtgttttgggggactcaaggccctcatagccaaagctggggacctgctggccaggcccactgctctgcagccagacactgagcaaatccaagtttcattacgtgtggtggagagtttgccaaactgccacactccacagccatttcctgcagagatctcaggggccagtggcctggctgcagcctcttggcttttccacatctcccacctcagggaacagtccactctgtgtcgaggctttgggcctgagtggcaggctggaaccaagaccctcatttggtagaaagaaaagccaggtgggctgtaggaggcggtggctaggaactcagggctggatcagtgtggtgggtggctaggaggagtggaaagacactgatgccacctggaatcatagatttcttttcccacaaggatttgcagccctcttccacctcaaagctacctccaagtccagccgctgttcacattggctttggaaagcagcctcattctgggcacctagtaatcctaccccttcctcctgcccctgtccccaagctgaactgggcttggagagcacacagcttttttactcaggggtcctgggggtgggtaggctcccagtagagggagggtgtggtggggttagtctccagggggtctggcaggggcccaatccccagtggagaccac

SEQ ID NO: 468527 - DNA, 1000 bp, Homo Sapiens
ttttttttttttttttggtgcagcgctgcctttaataagtaaggagaggtccagagaccaacttcaagcagttttagcttgagagacacaagagtacgggccacgaggtgctgtggaggactggctgaccacactggaattcacccaccctcctgccctttgcccatcaccccggggagaacaggcatcacctgaaggcaatgtagtgcaggcccatgcccgccagcatgaggaggaggcagtaccccagcacttgtttgttttgtttgtgttgctgctgcctcaactggggcccctgtggcctcacgctgtgaaactgggaccagtactgtgcgttggggggtgtccaggagctgtgtgtttggtgggcagacttgtcatggactgtggttcgtggagactttgggggactacctgagcggagctggtcatcatagctgcggcggctctgctcacggctgagcacacggtatgcctcgctcagctccacaaagcggctgtgcaggcttgggttcccagggtcccggtctgggtgcagctggggtggggcaggactccccttatctccctttgcctgtccctccccaggacccatgctgatgacatccacccaccagggctccagtcatacccagaggccctgcctggtcagtgaccctcactcaggcctgcccactcctcagaaggccagagagcatggactcctgcttcctcctgtgttcaagccctccccacctgccagccccctgcattcaccatatgccctggtccaggtttctcaagagcaggcaggcaggtcaagaaaaccaagcccagcccatcagacaggacccctggctcctgcccacagcctttcccctaccattgagcacctgccactccctatgagggctgaaaaaatgtggcacccaccagagatgctggtctactcctgggaatttgaagcacacccccactggctcaaagttcctgctccccctccccacctcaggggtacggg

SEQ ID NO: 468528 - DNA, 1000 bp, Homo Sapiens; identical to SEQ ID NO: 338336

SEQ ID NO: 468529 - DNA, 1000 bp, Homo Sapiens; identical to SEQ ID NO: 158591

SEQ ID NO: 468530 - DNA, 1000 bp, Homo Sapiens; identical to SEQ ID NO: 158594

SEQ ID NO: 468531 - DNA, 1000 bp, Homo Sapiens; identical to SEQ ID NO: 338340

SEQ ID NO: 468532 - DNA, 1000 bp, Homo Sapiens; identical to SEQ ID NO: 158595

SEQ ID NO: 468533 - DNA, 1000 bp, Homo Sapiens; identical to SEQ ID NO: 338342

SEQ ID NO: 468534 - DNA, 810 bp, Homo Sapiens
ttttttttttttttttttttttttttttttttttttttttttttttttttttttttttttttttttttctgctttgggtcgtttatttactaagagacagcaagaaggggtgttacacatgcagggagcggagcgtctggggctcccctggagtgaggacatttggctgtcagtgtccagcatctgtgaaagcggggatcctccaagccagggctagggtgtgatttattctgcagttgactccacaggctgcaggtggcattggtctggggtagatagtgagcacccatcccaggaggtaatcaaaggcctgtagatgcgagactttatggtgctgtgtggcctcaggagctcaccagaccagaccctctgggcctcaggccactctgaggctgcacccaaggaggaatcagtagggacagagggtcagcaggtcttgttgggtacagccactgaggcagcagtagcgtgcagggttggtggcagctgcacggtggtggcggtgatggtgagaggtctggggcaggggctgcaggccaggtcccagcgtgagattactgtcggccaccagcccatggagcagatgtcgtctctccagccactgtagcaactcacggtcgcctccggtcgcaggcctcctggcttcggtggaccagcgggggcccccgcacacgcgcactagcgcgcgtacgaagtggtggccgcacaacttctcacgcatctctggggtgggcgcggggcccaacgcgaacaccagggcagggcccagcagcaccagcgcccaggcgggcagacgggggtccatggtgg

SEQ ID NO: 468535 - DNA, 1000 bp, Homo Sapiens; identical to SEQ ID NO: 338343

SEQ ID NO: 468536 - DNA, 1000 bp, Homo Sapiens; identical to SEQ ID NO: 158596

SEQ ID NO: 468537 - DNA, 1000 bp, Homo Sapiens; identical to SEQ ID NO: 338344

SEQ ID NO: 468538 - DNA, 1000 bp, Homo Sapiens
tttttttttttttttttttttttttttttttaggatcccaagacttccaggatttattatgtatcattgtacacactcactgattcagcttcaatactggggaagtaaggattcctatagtaacaatagtccctcaagtagaggctctgctcacctgaggttgggattggggtcattggggttggcactggacaataattccctctctcccccaccctcaccccattaaagagacatgtagagggacagagtcaagttcacagatgagacgggccacctagcggacccgaaataagtggagccagtggctctctcttcccttgtatgagacgatctgagggcctctggacactgcgggtggttatttatgtttgggtggccactgcacctcctgcttctgctgctggtgctctacaggaagcaatacttctccctttgtgggcagggctggttgaatgtcttggacctggcctggagctggggcaaacacaggctgctccagctgccccttctgctgctccaggtccttcagctgcccctcctgctgctccagatgttttagttgtccgtcctgctgctctgggtgctctaggtgcttttcctgctgttccaggtgctttggctgtcctacctgctgctctgggagctccagctgtgcctcctgcttctccaggtgcttcacctggccctcttgctgctctgggagctccagttgcttctcctcctgctccaggttctttggctgccccacctgctgctctgggacctccaactgcccctgctgctgctccagatgcttcagttgtccctcctgctcctctaggtgcttcagctgccccacctgctgctccaggtgctccacctgcctctcctgctgctccagctgcccctcctgctgcaccagatgcttcagctgcccctcctgctgcaccaggtgcttcagctgcccctcctcctcctccaggtgctttggctgcccctgctgcttctctagctgctt

SEQ ID NO: 468539 - DNA, 1000 bp, Homo Sapiens; identical to SEQ ID NO: 158597

SEQ ID NO: 468540 - DNA, 1000 bp, Homo Sapiens; identical to SEQ ID NO: 158598

SEQ ID NO: 468541 - DNA, 1000 bp, Homo Sapiens; identical to SEQ ID NO: 158599

SEQ ID NO: 468542 - DNA, 1000 bp, Homo Sapiens
tttatttagcaattgcaaacagtgaagagcacagaaatcatcacagagatacaggctttgtacatcataggactagtcacttgtgctttcatggatactgcctgggtgggggttcacaacacttataagttagagagtttgagagccagtggaaagtaagtggaagttgttctgaaataagcccctggcaattttctgcaatgaaaaggagcagaggtcattttcttataatgctcagcctcagagatagaacactggaggcaagaaattaataatttagtaacagtgaagctccagtggtgattacatcatgatgtaaaatcagaggttgatctgatggtgagcaatgggtgctcagatggtatagagagagagagaagaagtgagggcactaagcattcatccccagctctacctgggacagcaggggagactggaggccaggagaggacaggcaacctgaggagagggctctgcagccagagaggggcctgaggactgtgggaccgagagctagcagacgcactttagtgcttatagctcttcctgctggaggaggaggtggtggtgtacttgatggtggaactgccgcctccaacagagctgaggccacccccaatggctctgccactgctggaactgaagccacctccaacgccaagaccactgccataggagtagctgcttcctccacccaggcctaagccactgccgacaccactggcaccgccatagccactggagacggtggactgcaccacagagatgttgacttgtccaacgccttcgccattcagcctgcactcctcaccctccagcagcttgcggtaggtggcgatctccacgtccagggccagcttgacattcatcagctcctggtactccttcagcagccgggccaggtcctgcttggccttctgcagggcatcctccagcccttccagcttgttcttggcatccttgagggccatctccccacgctgctcagcatcagcaatgg

SEQ ID NO: 468543 - DNA, 1000 bp, Homo Sapiens
tttattcaacagaacaaaagaaggcaaagagagcagagaaagcagtgcaggaatgcagactgcatcagaaggtacatcacttgccattcagggacactgcaagagaagatcaggacaactgacttgtcagatgagaactcctgagtgtagctataatgggcaggatggttagcaattaaagagaggactcctcatctgcagctggacctagactgagtttcagttcttatggggatataggtcatttttcttctcagaattatggcagactcagatacctgtaataatacgggaactaaaaaggacattcgcatgtctgagtgctgataactgttgacttgatggtaagcaacaggagctcagtggaacaggtattgatgagaagaaaagtgagggcatcccagctctacccgggagggcaggggagactggaggccaggggaggacaagcaacctgaggagagggctctgctgccagagaggggcctgagagctgtgggactgagagctggcggcacgacttcagtgcttgtagctcttcctgctggaggaggaggtggtggtgtacttgatggtggaactgccgcctccaacagagctgaggccacccccagtggctctgccgctgctggaactaaagccgcctccaacgccaagaccactgccataggagtagctgcttcctccacccaggcctaagccactgccgacaccgctggcaccgccatagccactggagacggtggactgcactacagagatgttgacttgtccaacgccttcgccattcagcctgcactcctcgccctccagcagcttgcggtaggtggcgatctccacgtccagggccagcttgacgttcatcagctcctggtactccttcagcagccgggccaggtcctgcttggccttctgcagggcatcctccagcccttccagcttgttcttagcatccttgagggccatctccccacgctgctcagcatcagcaatggcagcc

SEQ ID NO: 468544 - DNA, 1000 bp, Homo Sapiens; identical to SEQ ID NO: 338348

SEQ ID NO: 468545 - DNA, 1000 bp, Homo Sapiens; identical to SEQ ID NO: 158600

SEQ ID NO: 468546 - DNA, 1000 bp, Homo Sapiens; identical to SEQ ID NO: 158601

SEQ ID NO: 468547 - DNA, 1000 bp, Homo Sapiens
ggcatctaacaattgttctttatttaaaaacactttcaggaaaatccaaggaaatacagaagcaaggcagcaccatagtcttcccagccaaggtggaagtgcctctggttcctccagcaattcccactggtgttatcataactcaacagtctgttgcaatcagttgtagaaaggcacagagtgacagctggaatgcaaagaaatgtgcacaacccagagctctgtcagccttgccaaaactcaagtgcccccatgggagggtcttgcaacatatgttctgttgagcaaagaggttgcaaaccaagcggttattgcaataaacaccacttgtgacaaacaaagtttgtaagtttaaatttattttttaaaaatgcttgtcttcctcactagacaatcaactctatgagggcagagactatgtcaccactgtcccaccagcccctggcacacagtaggtactcaataaatatatgttggaaggatggatggaggtaatggatggaaagatggatggaaggatgaatggagggatggatgtgacccagctgaagtgtgagtaggaacattctcttattatgggtggaggaaagagagaggagattgagaaaataagataaaatacattgatgcgcatcatttttggtgttcgaaaagtaggattgaattaggactaataaatctagagaattttacctctttcaatgcccaagccacacttttctatcactttgaaaccgaaaaagtaaatactttcccaacatttgctttgctggtaggaaatgctttaataaaaatgcaatctctaagttgccatggcatcattaaaagaaaggatgtcatgcccaggtccagaacttgaaggtggcaggcaccagcaagcaccatagctctgaatgggcctgccttacaggtcctcactccaacactgctcacttcttccagcttgaaaatggagaacatgttcacaccctgggttgtaagtaggaggaactctgatcag

SEQ ID NO: 468548 - DNA, 1000 bp, Homo Sapiens; identical to SEQ ID NO: 158602

SEQ ID NO: 468549 - DNA, 845 bp, Homo Sapiens; identical to SEQ ID NO: 158603

SEQ ID NO: 468550 - DNA, 1000 bp, Homo Sapiens; identical to SEQ ID NO: 338351

SEQ ID NO: 468551 - DNA, 1000 bp, Homo Sapiens
cactgttcaaggtttattgggggttttagttggtataacacttggatagttggttgcattgtttgtatgtagatctttttacattatatggtaatgtacactactgatatagttcacaaaataagatcctttggaagaattatgcacaagacatgatattggatttatacactggatcccaggatgtgactcactgggaaaaaatgttggactaggcatgttcagtgaaggagccaggaagttatataacacacggtaaacatccacctggctcaaggggcaaatgcagtacgtacagcattggcagtggtgcgtcagaggtggcagaactatttcacactaaccagttgaagactacacaagattaataccatccagcatcaggatatagctgtggattttacaaaccattcttatttctaacttcaggagttgatgtttttcccagtccatcttaaaatattactgctttaatcacagatcagataaaaaggacaacatgcacaacctccacctagaatcctgttgtagcctagacagtgaaatgatatgacatcagaagactttaaaattgcagctccttttggatcccccaaagtgtatctgcactcttcttcaaacgggcctcttcctcagaagtcagagtcaccttcacaaggtctgagattccattctgtcccaaaatgcaaggaacactaaggaagacatcatcctttattccgtaaagacccttaatcatggtggaaactgggtgcacccgcctaagattcttcattatactctctgccaaatctgctacagagagtccaatagcccaggatgtgtagcctttgagtttgatcacctcataagcactctcaaccacctgcttgtgaacctctttccactgttccttatctttatcagtccctaaatctgggtgcagagtcttcagagagacaccagcaacattcattccactccatacaggcacactggaatctccatgttccccaaggac

SEQ ID NO: 468552 - DNA, 1000 bp, Homo Sapiens; identical to SEQ ID NO: 158604

SEQ ID NO: 468553 - DNA, 1000 bp, Homo Sapiens; identical to SEQ ID NO: 338352

SEQ ID NO: 468554 - DNA, 1000 bp, Homo Sapiens; identical to SEQ ID NO: 338353

SEQ ID NO: 468555 - DNA, 1000 bp, Homo Sapiens; identical to SEQ ID NO: 158605

SEQ ID NO: 468556 - DNA, 1000 bp, Homo Sapiens; identical to SEQ ID NO: 338355

SEQ ID NO: 468557 - DNA, 1000 bp, Homo Sapiens; identical to SEQ ID NO: 338356

SEQ ID NO: 468558 - DNA, 1000 bp, Homo Sapiens; identical to SEQ ID NO: 338358

SEQ ID NO: 468559 - DNA, 1000 bp, Homo Sapiens
ttttttttttttttttttggtgttgatgtgacaaacagcatttattccagactccagtgtccacagatgatggggtggggcggaggtagggcgggggcaggagtgggaccaggggcggggtgaggggggggaatccagtgtcagactctgcagcaagacgtcaggtggggggaccagcaggggaggcgggaggtaaaaatagctccggccagccgaccctcggagccttgtcccaggctgggccttgggcttgggtccaggagctattctggggcctgggagagtcacattccctggaggaaggccccctcccacccacccaccctccctctccttccctcccggaggcaggcagccactgtgggtccctgccttgccggcagaggaaggaagggagggctgggcagggagagggaagagggaagagggaaggcgggggcgggcatggcgtgagcagggctggttctctgatgcctgcagctccaggtccagggacagcctctaggaggttcttggctcagcactcgtctccgaagcccccgctgccacccctggctcctccggaggcacctcccatgagaaggccggtctgctctggttgctccgaccccgagtggctcagccctggctcccctggcggcggagcccccttctcccgccgctggcggcagcaggggccccctttgcgtctcacgcagtagaagacagcaacgacgaggagcaggaggcccacgctgacggccacggccatgacggccactccagcctgggaggtctgggggctcacggtgccgaagtggaagacatggcgcttgttcccgtgggggttggaggcttcacaggagatgccatcgcggctcagggcgctggtcactttcagggtcagagagctgctcacccaaccctgccgtccggggattggctctgcggggctgccccccaattggctccagctgagtttggggtctggatggccgcgggcagagcagatgagtgtgac

SEQ ID NO: 468560 - DNA, 1000 bp, Homo Sapiens; identical to SEQ ID NO: 338359

SEQ ID NO: 468561 - DNA, 1000 bp, Homo Sapiens
ttttttttttttttattttacttcatttattaccatctaattaaataaaaaccagcaacaaattaaaatctaaatcacaaaagtaattatccagtgtatttcaagtgcatttttcaaatatataattcagatattcaagcgttattatataagctgaattcaaatttctttgaatatatttaaataacatttcaagtatatttatggaatgttagaaatagaacaagcaatatttgaaacaaaatgtaaactttttaaagttcagacactttcaaagacagataaaagtaccaggaagaaatctacctttaaatgatatctttgttagtggaaaatgtctggaagtatccagaatggcaatttaagttctgttcaccaaatcacaaaacaccaacatccacactttcaaagacaatgtgagatcacaatatttgttacaaatcaaaatatacattacagtttctttcagatggcatatccaaatcgtgtttactcacagacagatgcacctaaatcaccaggattgctataatcctttgatagttaggcagagtgttcgtctcggtctggcgttacagctgggctgtttacggagtgttacggtgtacttttcaagggagataggaaatcgtgtggaaagaagtcttctaatactagtggctttgggtttttctccatccgcttcccctactttttctccccttgtgggggtgggtgagatgatgtttaaatattgtattattattcctttttaaaggaagagattgtttgcactgcggagtggaatattaggaattgaacagaagtttacacttaataaggactttgagaagggtaataatttcggctcttgattaaatcatcctctaaagtttttccaaacttttcgggttggtcaggatctctcttgccagtcgccacgtttgtttggcagcgttttccagagctgagtgaggtttgccttgaaacagatctaagttcggtagaaagtagtggggac

SEQ ID NO: 468562 - DNA, 1000 bp, Homo Sapiens; identical to SEQ ID NO: 338360

SEQ ID NO: 468563 - DNA, 1000 bp, Homo Sapiens; identical to SEQ ID NO: 338362

SEQ ID NO: 468564 - DNA, 1000 bp, Homo Sapiens; identical to SEQ ID NO: 158607

SEQ ID NO: 468565 - DNA, 1000 bp, Homo Sapiens; identical to SEQ ID NO: 158608

SEQ ID NO: 468566 - DNA, 1000 bp, Homo Sapiens
cttgtagtaaaaaattttatttatggtggaatttccaaaatttcttatatcttgaaatgatccacaaagtactattttgtgcttacatttaaaagatacatttcttacaagaaaagatcaaaatatatacattaggcagtattatatttttatttaatacaatataactaaaggattaaagagaaaagaaatagttaaatatatttaaaattccatttaactgattctcagctgttttaatgttttaaagaaaaaaataaagctctaaacaccagagacattttgatgagcaatatttataatatatatatatgtatatataagttaagcattcgaacaagctaccctcaatcaatggccccctatcagaaatagtattactggaactatgtattaatatctaagcaaagaataataaagaagaagaaagtattatttgcaatgatgactttttagttaaatacactttcttataaagtggcaaggtaatctttacaaatttacaactgaaaagaaatctttatgtacatgttgtcttggtttgggactttttgaagccttcttcgtcctgtgtattaggccctcctggaagaagtcatatagaccagaaaattagttcatagcacatgatagataagcctggaactagaagcccctggagttcgaggctgtgaatcggtgctggcaactggagagagagaagccagatcctggagaggcaacccaggttgctctgaggaggtgatccggtccactatgttggataagcaatccaagctggataaggagtttttatctgtggcatatacatttgatacatcaggacagtagatgctgtcaaaagtactgctctttctggaccagacaggactgttacattcgggcatgccatcagagcagttggaggtggggctggtgggctccgagcagctctgtcccggcaggctatagtagttctccacctgctctctcagcaactcctgcaggctctcgatgtagc

SEQ ID NO: 468567 - DNA, 1000 bp, Homo Sapiens
ttttttttttttttttttttttttttttttccaacaagaagccataactttatttatgatagaaacagtacaaatttcaaaccaagctgcagttactcctttgagacaccaaaaaaagttgcttccatatggttacattgttaattccataatcgcatttacaatatcattactgttgttcttcagggctcggactgcctttgctctcgacacatttgcttgtgacatgaccaattctatgtccttaacttctacacctgtttcatcgacctcttcctcttcactctcctcttgtacagttggagtctgtgtgttttcttgaatgtttgagacagcttcaccttgaactttgaatttctcagcagctgctagttgtgcttgctgggataaatcttcgatcttggcttccccaaaaactatgtaagtatctgaagcagggctcttgtagacatctggttttgtgatgacaaagaggatattcttagatttccggatagtgactctagtaactcctgtaacctgccgaagacccagtttggacatagccttccgtgccttcttttcactccgactctgttttgctttactgactggttcttcatcgatttcagctgctgccgccagctgggcttgttgtgtggttgcctgggtggaatcctgttcttcaagctctggtactgattcatcactgtcagattctgttccagaccctgtctcagcctggggctgcggcaactcctgctctgtagcagggacggtttctgtggcttcgccgggcatttccttttctggatcctgtgaagcagttcccaaaacaagacgcactcctcttccgccctcaacactgcaactgctcccatctctgcaggctcggattctgggcccgccccgcagcccttctaccctgcttttgccaggacaccaaccgcagaccccattttgtccggaggcccaggggcgagtaggaaccctgtggcccagtaaagcctccaactctcct

SEQ ID NO: 468568 - DNA, 1000 bp, Homo Sapiens; identical to SEQ ID NO: 338366

SEQ ID NO: 468569 - DNA, 1000 bp, Homo Sapiens; identical to SEQ ID NO: 158609

SEQ ID NO: 468570 - DNA, 1000 bp, Homo Sapiens; identical to SEQ ID NO: 338369

SEQ ID NO: 468571 - DNA, 1000 bp, Homo Sapiens; identical to SEQ ID NO: 158610

SEQ ID NO: 468572 - DNA, 1000 bp, Homo Sapiens; identical to SEQ ID NO: 338373

SEQ ID NO: 468573 - DNA, 1000 bp, Homo Sapiens; identical to SEQ ID NO: 338374

SEQ ID NO: 468574 - DNA, 1000 bp, Homo Sapiens; identical to SEQ ID NO: 158611

SEQ ID NO: 468575 - DNA, 1000 bp, Homo Sapiens
agagatctaactccagtaccccaccctctgcatgaggtgctggggctggcccaagagagtgtgacagactcaagggctggtttggggtctggtctggaggctcagatggcctcatccggggctggcaggcgctggcgggaaggctccacaccccagatctcccgggcatactgggcaatggtgcggtcactggagaacttgccagaggtggctatgttccggatcaccatccgcgtccactctcttgggttcttgtacaaggcgctgactttctcctggcatttaatgtagtcttcataatctgcgaagactttaaaccggtcatggtgcatgagcatattgacaatgtccttgaacaggtcgggctgtttgggggagaagaagccactgctcagctgctcaatgacctgccgaagctcaggaatgcgatcgtagtactcctgggcattgtaccctctttggtcaagcttatccacatcctccacccgcatgccaaagatgaagaagttttcctctcccgcctcttctgccatctccacattggccccgtccatggtgccaatggtcagagccccgttgagcatgaacttcatgttgccggtgcctgaggcttcagtgcccgcagtggagatctgctcagagaggtctgcagctgggatcactttctcggccagtgagactcggtagttctccaggaagatgacacggaggcggtcacccactgccgggtcatggttgaccacatccccgatggctgtgacgagtctgatgatcatcttggccatgtggtacccaggtgcagccttccctccaatcatcacagtccgaggcacaaaaaacttattgggctccctcttgatgcggttgtacagggtgatgacatggaggcagttgaggagctgtcgtttatattcgtgaatccgcttcacctggatgtcgaagagtgagttggggttgatgtggactttgtattccctctctaggtaggcagcaaacttca

SEQ ID NO: 468576 - DNA, 1000 bp, Homo Sapiens; identical to SEQ ID NO: 338378

SEQ ID NO: 468577 - DNA, 1000 bp, Homo Sapiens; identical to SEQ ID NO: 338379

SEQ ID NO: 468578 - DNA, 1000 bp, Homo Sapiens; identical to SEQ ID NO: 158613

SEQ ID NO: 468579 - DNA, 1000 bp, Homo Sapiens; identical to SEQ ID NO: 338381

SEQ ID NO: 468580 - DNA, 1000 bp, Homo Sapiens
gaattcctcataaaatttattttggaaaaatattttaaaaaggaatttcttcattaacaaaacagtaaaaaactcaaataacattggcacaatattccataaatacatttatatacaaaaaaatatagtcacatagacccgaagtgcctttgtacatatttaccaaaatttaaattataaaaaacgaacatcacaaaatactcaagctttacagatatcatgaaaaatatttttacaaatccaaaaaataacacacatcttttccatctagaaaaagcacatcttcgtatcaaaaaggacaataaaggcagtgtttgtgtttctaattcaagaaaagactggctcataagaatccaaaatatacactcaggcagtgcatgcttcttaggcgtaattcagttcacccatttaaatatatattctcttaagagcaactgtccatagtgcaacggcgacgtcacggaaggcagtgccgcaggcggccgggccgcgacaggctgtcggcaggcgtcgaggacctcaggaggagaacctgctcggtctgaactcggtttctcagcagcagtccacgaggcctccctcctcttcagcagcattcgttggggcatatatccttggaattttacttattttaagagaaacgggagtcttgccatctcacttccattttacacctcagttgctatgacgcactcatccttctcctcggatatgacgtacaccgactggtacttggtgtcttttgaagttgaacagcccgagtccggcctttttctttcagatgcttctccacccctgagtgtggtcggggtccccttctcctcccctgaggagccctggggctggcacttggtgtcacgcttgctgtgcgcgtccctgacggcggtgtcgtcacccttgaggtcctgcacgaggttatagtccaccgctgggtagcgggccttgaagccattcttgtcggcgctgtggtccccgtggaagtccgccttcttgttggtgt

SEQ ID NO: 468581 - DNA, 595 bp, Homo Sapiens; identical to SEQ ID NO: 158614

SEQ ID NO: 468582 - DNA, 1000 bp, Homo Sapiens; identical to SEQ ID NO: 158616

SEQ ID NO: 468583 - DNA, 1000 bp, Homo Sapiens; identical to SEQ ID NO: 338385

SEQ ID NO: 468584 - DNA, 1000 bp, Homo Sapiens; identical to SEQ ID NO: 338387

SEQ ID NO: 468585 - DNA, 1000 bp, Homo Sapiens; identical to SEQ ID NO: 338388

SEQ ID NO: 468586 - DNA, 1000 bp, Homo Sapiens; identical to SEQ ID NO: 338389

SEQ ID NO: 468587 - DNA, 1000 bp, Homo Sapiens; identical to SEQ ID NO: 338391

SEQ ID NO: 468588 - DNA, 1000 bp, Homo Sapiens; identical to SEQ ID NO: 338393

SEQ ID NO: 468589 - DNA, 1000 bp, Homo Sapiens; identical to SEQ ID NO: 158617

SEQ ID NO: 468590 - DNA, 1000 bp, Homo Sapiens; identical to SEQ ID NO: 338396

SEQ ID NO: 468591 - DNA, 1000 bp, Homo Sapiens; identical to SEQ ID NO: 158618

SEQ ID NO: 468592 - DNA, 1000 bp, Homo Sapiens; identical to SEQ ID NO: 158619

SEQ ID NO: 468593 - DNA, 668 bp, Homo Sapiens
tttttttttttttaattggcatatttgtttatttctcagtttgtgaaaatgtccttaatttgttgatgtagcaaacaaatttcaactttgattgctatgcaaaaaaacaagataatctgctttgcaatgaactttatatagttcaactgcatacaggcaacatgctatatatgaaaaagttactaactgaactacaggtattaaatactgaaaagagttaacagtttattataatttattttatttaacaatctaagaagttcgcagccatcagcagttccagtgcaatttcaggtgcaattgggaattcaggaatctcggtggagctgttagtgtagcgaaccttgtacgtaaaatacatgcatactttcgatagcacatgtgaaggtatctctctaaaattgacctcattggtttcgttctcagcaaactgacctgggccactcaacatggcttttatcgtgcctgatgttaatgcatgttctctttttacaataaattcatggccatcagatgatatcaatttgacatacatggcatcaggtccttcacagccaccataggttttctcctctccatccattttgttcttatgaaattctactttgcttccccaggaactttagtagtttctcgtcagtcccgcagccaccgcagccgggtccccg

SEQ ID NO: 468594 - DNA, 1000 bp, Homo Sapiens; identical to SEQ ID NO: 338399

SEQ ID NO: 468595 - DNA, 1000 bp, Homo Sapiens
tttttttttttttttaaaaaaagattacagaaaacactttactgaaattttttgctaaaaagacagtctttaagggtgtccgggagagacagcaagcacaacacagtacaaaaggagaagggaatgttgaattccagtgcaagacacgaacacagcacaattagggaatcaggaggaagcaaccatttcacaaagaatgaaattaggcatttatattcaatcggattttttttaagctttaaaagtccagcataaggaagggaattgggaaaagaggcaggggacagggggcaggggatcagggaactaatcttatctacaatcaccattttaccaaaaaacacactggttcaaccacatgagaagtggaggattaacctgcctacatagcccagcagatgttgacagcaaatgccaaggcagacaggtctagggttgatgtcacgactggctaaagagtttttaaagggaatcttattccacaaggactggtctgtcatcaacctgggttcataacagactaagttcctttgcatttgcatcagaaggccagaacttgacgtggaacaaatttactccaaataatactcacattgctggttttaacaggtcatggagtcacaagtggctcctaatagacttcaccatttcctaggagaaggttctacagattaccagggatttaaatttaagcaaaccactaaagaagggaaacgctaatgatattctggcactgcacaagctgtgtgcctgtcatctctgccaaggacatgggtggacttggctctgcttcttagctccatgatctccaacagtgatgaagtggaaatgggacctcccccacgtcgaaggaggttgcccaaaattctcatcccagcccagcttctgaaagaaacagcagatgccaggcgcggtggctcatgcctgtaatcccagcactttgggaggccgagttgggtggatcacgaggtcaggagatcgagaccatcctggctaacac

SEQ ID NO: 468596 - DNA, 1000 bp, Homo Sapiens; identical to SEQ ID NO: 158620

SEQ ID NO: 468597 - DNA, 1000 bp, Homo Sapiens; identical to SEQ ID NO: 338402

SEQ ID NO: 468598 - DNA, 1000 bp, Homo Sapiens; identical to SEQ ID NO: 338404

SEQ ID NO: 468599 - DNA, 1000 bp, Homo Sapiens; identical to SEQ ID NO: 338406

SEQ ID NO: 468600 - DNA, 1000 bp, Homo Sapiens
ggcaagatacacaacacattttatttgcaaaaactcagctaagagatagtgtggagctggcaggggctggggggctgagctgaggtgggtcatgagagagcttagtcatgttggccctgggtggggcaggggtggtggggacagggagtccagtgtctacctcactctacccctaatactgatcagagtttggtcccagctgggccaagggcaagaagagagaacgaggccaggccaatgtcttcaatcccagcggctaggaacccttcaccttggtgagcaactttggcagaaagggctccgtgatgaggtctccacggtgggaagacagctgcggtggtggtggctgcccgggaggctgctggtgaacgcagggcccggaggcggaggcagaggcagaggctatggctttggctgcacctcggggaaggctgtagaggtagacagcaccaatgacgagtccagcgccaagggcaaataatgggtccacgtggaagccaaagaggcgaatggaggcaacagtggacagcacaatggacagggaggtggcaaagcccttgaggatattgtcagcgtacttgacaaccacagccaccagtagcccgccgaaggcctggttgagcaccacgccccagacagcaggtgtgtacccaaaaaagaaaccacgggtggccacggcggtaccctcagcccaccagagccccaccaggcccagtgctgtgccgaagaggcccagttgcaggttgcgcagccacacggagcctgagctgcctttgaggatcttctcaaagtagacacctgcgaagccggaggagagacaggaggccacgacggctgccaggcctgccccagggttctgatccagtggccgtgggcctcccccaccggcttgctgtgcctggacaatggcgacgccagtgaagaggagcagcagggaggcccactgcagccgggaaaggctgcgattcagcatgagcacggagaacagcgctgtggtcag

SEQ ID NO: 468601 - DNA, 1000 bp, Homo Sapiens; identical to SEQ ID NO: 158623

SEQ ID NO: 468602 - DNA, 1000 bp, Homo Sapiens; identical to SEQ ID NO: 158624

SEQ ID NO: 468603 - DNA, 1000 bp, Homo Sapiens; identical to SEQ ID NO: 338408

SEQ ID NO: 468604 - DNA, 1000 bp, Homo Sapiens; identical to SEQ ID NO: 246458

SEQ ID NO: 468605 - DNA, 1000 bp, Homo Sapiens
ttggctcttgtaattgcattttcacaaatcaacacaaaactttatttatgaataaaaatgagtaaaacagtacttgaaaaatgaaattgaaaacaaatataatagtaaattcagaaaaaggtgtgcattttactaatagtaatgccattgattctatttttcttcacaactgggatataccagtttcccattctgacacattgctcgaaatgaatgagattttgttggatgatatccagatttacaaacaaattcaactatgtcacctgttcttgaataaagcttttgttggtttgtccactttaattttatgttatatttttccataatttcttgtgatattacacatggatctaagcattttggtggttctgaccattgtccgtttctacatgttatttgattgttaccctcaagttgatacaagttctggcactggtactcaactgatgaacctggagcatatactgacaacaggaatgaagtaatgtctccattgtcaataggtggagggggcccacatttttctgcagaaatagtggacctgcatttgggaggagtggaccagccccgttctacacatgaaatgttgttctcattgttttgaagtctgtatcctgtgttgcaaataatttgtacagtatcaccttccagatgtgtttgtcctgaagattcagaatgaccattttccacaaaaggaaagaaacacagtctgagacactttggtgttggtgaccatccttcttctgcgcacgttatgcgagtccaaaaggattttgaaggagacacaaaattatattcacaggagtaatagaaaacttcccctgtaggaacttgggaaaatggcttatatttttcttcatcatatagaattccatggtttatttttggaaaatcacagaacattgcttctcccccaacagaggatatccgtgagattagaattacactgaccaggagccacatgcttggtagttccaatcttatataactaaaaata

SEQ ID NO: 468606 - DNA, 1000 bp, Homo Sapiens; identical to SEQ ID NO: 338411

SEQ ID NO: 468607 - DNA, 1000 bp, Homo Sapiens; identical to SEQ ID NO: 158625

SEQ ID NO: 468608 - DNA, 1000 bp, Homo Sapiens
tttttttttgtctttttaaatgcttttatttgccaaaagttttgggtgattttgaaatacattagacatcccattcattgaggaaaaagacagtttattccaaaacattctttaatagtcctaaactgattttgtctatcagagcaaaaggaacaaaggtaaaaatccacctgaaaaaagatctttgtatcatggaaattatgaagctggatttcttagacattaaagaaattcacagacccacatagtttaaaaatttaatttttaagattaaattttcacaacacattatgactgtaaatgagttacctgaataccaattattacctctagttatttttagcaagggagctggacttcactttacttaatgctagcttataaatttaactttgtaaaattatagtggaaatgtgtcctggctagctgcctctgcccaaagcaaatgtcatctcccctaagtgccacagttctatctccccgtcctctgagctccactgaaacttaccttgtatccttcttgtcccccacgccttctaaataagagtctcttgcatctatcaatatgtgtttgtggaagaaaggaaggtgcagaaaaataaatacgcatcatagtttaattaggaaagtaagggctttgaatcaaacccagctttgtatctcacttcatctatttattcatcatgtgacaatagacagttgagttaacccttctgaccttagtttccccatctttatcatggagataatgagaccttcttcattggatattgtgaagattaaactggatatgattatatatcaccttgcacatagaggctctcaattaaaaaaacacttctctttcttctattctagcatatcattcatggtccaatcctgcattacagttggttgaatgcaggtctgtttctaggcagcacatttttgaaggcaaagttgttcatctctgtatttcctgtagaacctagggtgatgagctgcatagtctggaggcaca

SEQ ID NO: 468609 - DNA, 1000 bp, Homo Sapiens
ccccccccctttggttttttttttttttttttttttttttttttaaaaattcacctatattttaatgctttcatagttttattttttaaaatactgattcatttggaactttgtaacatttaatacaaggcaaaattatataaatcgcaaacatcagttaagtaaactgtaatgcacacccaacagaaagaactttaaagcctccaagagctttgaagcttcttccaagtttttaatttcacagaaatacagcagaataaacattcctgcgtataagactttgaagaatttgaatcatgaaatattgtgtggtaagatggattgaagaggcagaaaggaaagttctaagggtttgttttctaacactgaggaaatcatgtcagctgggaaaaaataccaattaattactgagtaccttactgcatacatttcaacctcattctcatttgggtacactgtaaaatggcacagtccacagattattatatatagaaagcaatccttttctaatcctattcccatggatatcaatgttcaaagtttactgccatgagctcaatcaaggtatggtgtgattcgaaagtgaagcctttattgtgccagaaggtcatagcataactgacttcatgcaaacagggagctctcccttctttcctagttggtctgctccttctcctccaggatgagtacagtgtccacagttattcctatgtcctccagcgactggcctccctccactgccagaggccgtctgggaaaggaagtagaaaggctgtatagagatatgtggtacccaattctcgtcatccagtcaaataagacctgtgagctgtaggacttcaaaaaccttctcctcaggacattcccactgggacatcggagagcaacagtaactacttcttctgctgtttgagaaggttcttcaggtaaatcaggaatctccttgcatgtgggctgttcagcaggagacggaaattcagttaaaggtttaggcaagttc

SEQ ID NO: 468610 - DNA, 1000 bp, Homo Sapiens; identical to SEQ ID NO: 338413

SEQ ID NO: 468611 - DNA, 1000 bp, Homo Sapiens; identical to SEQ ID NO: 338414

SEQ ID NO: 468612 - DNA, 1000 bp, Homo Sapiens
tttttttttttttttacaagttacagtttattacacaatagcaagaggcaaagtatttgcaaacaataactgctgtagagctatattctgtaattagtttgtcatttgaagaattattccttaacaaatgtaacatttaacattacaaaaaagaaaacagacatagttacaaagagcaaaggcagtaatattgtttctctagctataaataatacaaaaatataaaaatatataaaaataagttttttgtagtaatataagcttcttaatacactacataaatacattcaataactatctaccaagctacttactgtgtagctacaactgtgaaataactaaaattcagtatcagagtcttggatttacaatactgtattttttcacagatctcttcatccgcttaattttcttccctaagatttggtgatcttgctttaaaatataccggaaatatctacaaccttttcctaacagtaaaccagccacaaaagctttctcacaggccaaagctgtatcttccttccaatcactttttgcccaaaagtagctgaaatgaaagcctggccaccagtttttcctggagttccactcttcttgaacccacgcaaggtggtttcccattaagatatttttcagatattttgccaagtatttccaagcagttatattcttagtgcatccggcaaaatctaagactccaaataatacctccaaccccagtttacggtgttcttctttttctgattttctaagtaatgtatggaattccaacatcaatttatgagatggtacaatctgatacaaaatcttaagcacacttatcaattttgatcttggtgccttctgtctctttagaaagttgtataagtagatatgggcatttggatttgatggaaacttttcatcatatgcataattggtgagtacctcttgggctccatctcgatccccatagaattccagcatttctacataactcttcacaaaagggtcccaa

SEQ ID NO: 468613 - DNA, 1000 bp, Homo Sapiens
ttttttttttttttttttttttttttttttttttttttttttttttttttttttttttttttttttttttttttccagtttgctaggtgattacaacagctgatttttatttttcttcttgattctcttctacagtttccaaattctctacaatgaacatgtacttctttttaatatcaaaagacaaaagaattggtacgtaaaaagaacatccttcccatcttcaaggtcaagattgaacgctgactcctgcaggaagtcttccaggattcccaggcaggaatgatggctccctgtccctgtagctccaggagttcttgcttcacgcacgcctcacataccagactgaatgttggcaggaggagtgaccaggtcggtcatctgtgtccctaccacctacaacaggccagcaatctacccgtgtgtgtttgttggacagaattaaccatgatgggcggccgagggcgcctggagctatttgggggcttggagagaacctcttaggagagtgtcaggccctaggccagtgtcaccagaggaggtcagtctcagtccttggagtggtgggatggaaaccagacgggactggcatggtccacagttcttgccacaagagggcttcaggagaggctgagggcccctctgaggcgtgtgcttggtcagggtgagcaagggcaatgcagctcatacaaaggcccagatggacagagggacctagcccagcccacgcatcggtaccgagcctggctcaggggcaggccgaggcttgtgcagtagacaaacatttacagcagacaccaggcagctcctggaaaccactccccaaaaaacagcattggaatcggggacccccagctgtgaacgaaggagcaaggaggccctgggagaggaggagaaccccagggaagatggagggaggactggggggctgagggagggagggggcctgggctcagaggtaggcgagctgctgctgtgctcctggcaaagggcctctcct

SEQ ID NO: 468614 - DNA, 1000 bp, Homo Sapiens
ttttttttttttttttttttttttttttttttttttttttttttttttttttttttttttttttttttttttttttttttttttttttttttttttttttttcacaaggcatcacatgaatctatttatttggcgaatcagattaatcaagtcattttttccaaagctaaccgtccgcccctcctgtgctgctgggccccactgctgattatgggccagcttgggttgcagctatgtgggtccaaactctcggccctcctgccgagcagccgtagtggcctgcagcatggacctgtgcccgctcccacagacacgggtccccacggagaagaggcccttctttccacagtgttttgggatgggtcaggggtccccagggcacacccacaggtccatagttgtcacatcacactgagactgctgataccctccaaggaccttcctcttacagccatgcagctcctgggtcctggctcccctccccgtccctccctacatgatcaggtcctctcagctgtctagagccctttctgtcacctggagagagtcatgctgcacatagataagattttatgtttgaacatcgctggggatgatagttggttaggtccacccacccttgtctcttaggaagcccatctggccttaagcacattggtagacccaagtgcacatgacgggcatcactcaactccaccaggcaggctcccaactcctcgtgcagagaaagaagtgggaggagggtggtcactaaatccaccacccgtagacactgacccgaaccagccccaaatgccccgttgcatgtgaaagtctggctccctcagagtatcacgggtggtgtctctgtctagggtggccatgggagagggcagcctgcaggcaaggagaggagtgtctggggtttggggcagccaggcagccttacctctgggtctgcagagcctgactctgtggctgtggttcttagaggcccagctcagggggcctgagcctccga

SEQ ID NO: 468615 - DNA, 1000 bp, Homo Sapiens
tttttttttttttttttctgaaatgatctgtctttattatgtcatcagaaaacaaaaaaatcccccgagtgtaaacaggagaaatgtgctggttaagttactcatcattatcttattattaacaaaataaagcactatctatgtttacagtcataaaaaaagaaacagcctggagagaagtgggggctttgaggatggagagaagacgggggcagacacagactccacatctggccctgtgggatttggggttcccatactgatccaagggctatttagatcttcagagttaggtgacaatgggatttgatttccttagggaacaaactttgtgaaactgatcagaggctgagatccagtccctagtatagagtgggggaggggagggcaggcaggtgaggggcagggctgggtgggagaggctgaagcccaggagtcttctcaacctcttccaagaatggggacccccccgaccctgtgctcatgagggaggaataaagaccagctgccatggacagcccctctccagggcctctgacgctggcaggaaggggagcaccatcaatcctcctgtcccaactccctcgtgggatcaggttgggaccaggggcgggggcaccaggacaaagccccttggaggccgaggcacattcccatgctgatcagagctaaaaatggctccgtgggaaccgactggcagagccagggagggagtgaaggggagggcaggaggaggtcaggaaggctgatgagcccagggcagaccaggggcctacatagacccagagaatccagagggcacagggggcaaaggacagacaccaagaaagagagaaatagagggccttgcagagagacgaggacagagagagacagaaatgcacacaaggacacacagaacctgagacacccagactgacaaagaggtagcaatttggggacaaagagaagcacagaaagaggcccccagagaagcaggagtggcatcgagagacacacc

SEQ ID NO: 468616 - DNA, 1000 bp, Homo Sapiens; identical to SEQ ID NO: 338415

SEQ ID NO: 468617 - DNA, 1000 bp, Homo Sapiens; identical to SEQ ID NO: 158626

SEQ ID NO: 468618 - DNA, 1000 bp, Homo Sapiens; identical to SEQ ID NO: 338417

SEQ ID NO: 468619 - DNA, 1000 bp, Homo Sapiens
accctttgactctcttttaatgccacgggaggatctccttgcccagctcccaggaatgtttgcccttctcagtctgttccacttctaggaggcagccaccaggcctcagccatccggccaagaaaacagaaaatatggggacagaacagtcattcgtgcacatcccagatctcagagagcagcggtgggagctttttgtcctgcagacgcagtgcaaacacttgctctgagtggacgctgctcagggtccggaggctcaccagtttcattagcatccgtgggaacatcagtcggtcatggggatggtggatggagacgtaggcatgcagggcttccacatatgtgtgctgcagcctctccacctggagctggtcctgcacgttgggccggtctgcagagaagatgctgatagcaatgagcaaggcaaactcggcatcattgagttgcagctcattcatggccctggagaactcgaagatggggttgatgaattccacttgcagccctgctttggcaaagtcttcccggttataactgaaatccttgaggaaggtgatactctcactcccagggttgtacctccgagatgtctccagaagcatcacctcgatcgcagaggtcttcagcagggcaatctggtcctcccggctgagctgcaggaagccgggtagctgtttagcaaagtcaactatctcctgcacagagacgatggccagctcagtgaagtgggcaaagcgctgctgacgggcctcccggctatggggatctggtgccatgggccaaggcgtgactcgaagccggtcagaaaaggagcgccggttacactgttgctgggcagcgacgagcttctcgatcatgcccagttgttccgggctgagctggggcaggatttgggggggtgaggaacgcctggggggcaaggatgtggcatgagcctgttcctcctcttgccgcttcagtttcttcaggcggatctgttcttctgacaggacacactcct

SEQ ID NO: 468620 - DNA, 1000 bp, Homo Sapiens; identical to SEQ ID NO: 158629

SEQ ID NO: 468621 - DNA, 1000 bp, Homo Sapiens; identical to SEQ ID NO: 158630

SEQ ID NO: 468622 - DNA, 1000 bp, Homo Sapiens; identical to SEQ ID NO: 158631

SEQ ID NO: 468623 - DNA, 1000 bp, Homo Sapiens; identical to SEQ ID NO: 338422

SEQ ID NO: 468624 - DNA, 1000 bp, Homo Sapiens; identical to SEQ ID NO: 338423

SEQ ID NO: 468625 - DNA, 1000 bp, Homo Sapiens; identical to SEQ ID NO: 158632

SEQ ID NO: 468626 - DNA, 1000 bp, Homo Sapiens; identical to SEQ ID NO: 338425

SEQ ID NO: 468627 - DNA, 1000 bp, Homo Sapiens; identical to SEQ ID NO: 338426

SEQ ID NO: 468628 - DNA, 1000 bp, Homo Sapiens; identical to SEQ ID NO: 158633

SEQ ID NO: 468629 - DNA, 1000 bp, Homo Sapiens; identical to SEQ ID NO: 338428

SEQ ID NO: 468630 - DNA, 1000 bp, Homo Sapiens
ttttttttcttttttggtaagcatctaactgtccataaattcatggctacagtagagattcacggcgcaacgactttcatactggttatttttttttttaattctgtcagtgagcagcatttcccagttttacactcccctaatggcagctccattaggcgagactgcaggctgcatctgtgattaggtccatgcagctcgaagatcagttcggcacgcgggagggtcccgaaagctgggtctgtccagtgtcttgcagcagcggttgcagggggtctaccagctcgccctgacagcttcgatatcgctaaccaaattctgggccaggcatatcccaaatatctgcagcaatgcaatgcctatgaaaataccagcaacgatggttaaattgtcctgcaaccacttctcaaactggggcacacagcctttcgtgtagattacaatctgctggtcaacttctggtttttgcctggcatcatagccacactgagtgttgatgacatcttctgcgggatctttagtgcagcaggagaatggaacgccacatcgctctcgacttgcattggaatctgtgcaattgaagtaaatatttaggttccaatcatcagctccaaaagccccacagcactgccaatattcctgggtgaagtctatgaggttttgcaaatcaatgtcatcccgatatgctctgatgttgttgtttataaagaaatacagctggtctttgatccagtctttgaaaacaaatgctagaactccggcagtgagctccaggaagaaaataattcccaggaacacagaaaaaaacttgagaaggaaagtgttttcccgtagcgctccaatgcaccctgcaaatcccaaaatgaacatcactcctcccaccacaaggaagagccaaactgggtcaaagccgccgagatcggtgatggaagagatgttggacagaactcctttttcattccatgcccacagtccaattccaagaaatgttattcccaaa

SEQ ID NO: 468631 - DNA, 1000 bp, Homo Sapiens; identical to SEQ ID NO: 158634

SEQ ID NO: 468632 - DNA, 1000 bp, Homo Sapiens
tttcagtatatagaaaatttaatatgaaatcacttaaaatatttcaacattaagaagtcttaattcagtgccttggcatgagacatttaaaagcatgtttgggtctaatctcaaattagttcaggggaacagaaatagctgaaaatttatgtatatgtgtatgtatatatatatatacacacacatctgtatatacatacatgtatatattcaaattatatacatataaagatatttgtagattcaagatatatagggattatatatctatatatattatatgtgtgtctatacagatatatatatatatatattcatctttctgtgtgtgtgtgtatatatatccacacacacatataaaatctattgttgcttagtggtggaattctctaattttactcatacgcatattttggaaagcttatctccaaaaggggcacattaatcgtacatggaacagaacccttctcttctactttaattaatttcattttaaatttatttatttctattcttccacttttaactattatagtctcctttaaagttgttaattcagataggaaactaaactcacttttgtggaatcagagatgattctgagttggaaagaacccgagtatgcacttgggcctgtttcctgtcttcaggcagagagataaactaaagctaagagagatggactgcctgttctttgcctaaaaggtcacatttctcaactactggggtacaaactatatttcatgaagtaatttttgtaaaataatttttctttagctacagacacagtaaagtagccatgtataattaagtttttagcttgcctcaaatatgacctttgttcttctagaaaaatttcctccaaaatcagtagcagtagcaagtatggcagaaagagaaatgtggttctccatgggagagagactatttcaagcagtcatatctttttagcaaaatgttttgtgagttttttgggagtgtgacacttttagtgcacact

SEQ ID NO: 468633 - DNA, 1000 bp, Homo Sapiens; identical to SEQ ID NO: 158635

SEQ ID NO: 468634 - DNA, 1000 bp, Homo Sapiens; identical to SEQ ID NO: 338432

SEQ ID NO: 468635 - DNA, 1000 bp, Homo Sapiens; identical to SEQ ID NO: 338433

SEQ ID NO: 468636 - DNA, 1000 bp, Homo Sapiens; identical to SEQ ID NO: 338434

SEQ ID NO: 468637 - DNA, 1000 bp, Homo Sapiens; identical to SEQ ID NO: 338435

SEQ ID NO: 468638 - DNA, 1000 bp, Homo Sapiens
ccttgtccataattattactataatgatttacaaaagtttttttcaggcaaccgtgttaaattattgtacatatctgagagagggaggtggggccctggccacagcaaaagtgacgacctctttcttgggtgaggtaagaaaatgtcccccacccccttttaggtctgactccttattaagtggcttcccctcaataaatgatgagcatcaaccctttcccacccagggtgccgagggtagagggaggagcaagtggatgaagtgctctgaaaaggatagtgcagctggctctagccaccgtgcatcctctagccctggctctgaagggcctgaccctgggctgcacccccttgctggggatggaagaccattcagtactcagccctacaccagggcatctacccaggaagataggaggacagagtgtgaaaggggctgtgtcaccctgtcaggtcacgaacaggaggtggcaatggatgcagtgacacaccagtgggcgctgctggctgccccttgcagcccactccccaaactggctacccaggcatccaggcattctggccctggagctcagggaggcagccctgagagtcggagcaggggaaccacaggcctagctggccctgccagggggatacccacaacagcctgacatggcgctcaattcccacacgccagctcaaggctcctgtccatgcagctcaatgttacttgtgtgtgcatgtcctgtgtagaggggaaggctgcaggggggcactgctgtgccacccacccaggggttcagggcatgcaggggaccctaagcctagtatacgagccaagaccaaaaagggttaaaggctctgtctcccctccctccccctctcccaacatgccccgccctccttgggcactagaaagttttgcgatgaatagcacgggagccatcctcttcatactcctttttggacacccacatcttcttaaaagtgtccagcgaggccaggatggagccgccaa

SEQ ID NO: 468639 - DNA, 1000 bp, Homo Sapiens; identical to SEQ ID NO: 158637

SEQ ID NO: 468640 - DNA, 1000 bp, Homo Sapiens; identical to SEQ ID NO: 338436

SEQ ID NO: 468641 - DNA, 1000 bp, Homo Sapiens; identical to SEQ ID NO: 338437

SEQ ID NO: 468642 - DNA, 1000 bp, Homo Sapiens; identical to SEQ ID NO: 158639

SEQ ID NO: 468643 - DNA, 1000 bp, Homo Sapiens
acaatggtttatctacctttttattacaatataatttacttaaactttccattaacaaaacaattctggtactacagaccagtggtgtcagaataggcttagtgcctccttgtttgtgtttgttttgttttaattgcatgagcactctagatggtaaagttttcagagttcattttatgcagggccattctcagtcctcaatgtactcccacagatctttttcatagccttcatgcacatgctgtaacaaaacccttcgtcgactctcacagtatctgtacttgtcttgtactttctgctttatatcctgcagagaatcttgggaaatatctcgttcaaggtagcccgagagcacctctgtggcattctctagatctgcttggttattctcaaagataatggactggttattctttttgaggtagaaagcgaagacataagtgtacatgagtgtggcacgacactggcagaggacatcaactgccttcttcaggaactgcacctcaatccaggacatgttgtgctgctgcatctcctccattttctgtttcacctgagcatatagtttgtgctcaaagcgcaggctctgcatgtggttcatatagcgattacagtagaacaggtacctctgcagggctgccctagatcgctcctgtgcatctcttgctgcctttgcatcatcctcattatagcggttacagttgtaccaggcagatccatgtggttcccatgggccaagacacacccagcaaaactctgctttacaattctggttacgacagaccatgtgattacaaccaccatccttctcaattgtgacatggcatttgggacattcctttgtgttggctgcaatccaattggaggtttcactgtcatcatcacactttttaatccatttctttaaccacttacatttaacaggatcatgccaattttctccacagttaaagcaaaattggcgcccacatttgcagcgaacaggtttagcatcaggata

SEQ ID NO: 468644 - DNA, 1000 bp, Homo Sapiens; identical to SEQ ID NO: 158641

SEQ ID NO: 468645 - DNA, 888 bp, Homo Sapiens
ttttttttttttttttttagctgggtaggtctgggttctaatccagattcttttattatctaagcaacctcaggcaaactctttaaccttcctgcatttcaatttgtcatctccaagtggggaaaaaaatctgcagcctggatttgttgtgaggactcagtgaggtcgtgcggtgaggtactggcacgttcccacggggttacctgggtgggaaggcatcttgtcaaatcaaactcaagaggaaccactgggaggatgaggttgtggctctgcccaccctctctcttctccagtattctttgtcttttcgtcatgttggtttctcccagctgggagctgtcagaaacgctcagaagggggggaaaaggcagcctttcatcccctaagcttgtcatcctcagctttttgccaatgctcagttcttttttccttcattgatgcactgcagttgagtgagcaccggagacagtcacactggggtttgggtcaaaggtccagctggcagcaaagcattctggctctgttttatctgcagtgtctgcagttccaaggtcagctctcctggatttccgtccatagtgtccaattgaaagaagaaggtaaaaatttttgcgtgttccttccttcccaaattcaactgacaggaaaaaaaaaattgtaaaaaattggttctttgaattgtgagtcttgtgaatttgcttctgggtgtccattggtaattgatccacagcctcccaggaagtccttgtttttcttatctctgtcttttgtgtgggttgtcataaggaagaaaattataattaattagatttgaggtaggaggctggcagggcttgttttctggtcatgacctcactgatctggtttgaaaggatatggttgaaacag

SEQ ID NO: 468646 - DNA, 1000 bp, Homo Sapiens
tttttttttttttttttttttttttttttattgatcagaattcaggctttattattgagcaatgaaaacagctaaaacttaattccaagcatgtgtagttaaagtttgcaaagtgggatattgttcacaaaacacattcaatgtttaaacactatttatttgaagaacaaaatatatttaaaattgtttgcttctaaaaagcccatttccctccaagtctaaactttgtaatttgatattaagcaatgaagttattttgtacaatctagttaaacaagcagaatagcactaggcagaataaaaaattgcacagacgtatgcaattttccaagatagcattctttaaattcagttttcagcttccaaagattggttgcccataatagacttaaacatataatgatggctaaaaaaaataaatatacgaaaatgtaaaaaaggaaatgtaagtccactctcaatctcataaaaggtgagagtaaggatgctaaagcaaaataaatgtaggttctttttttctatttccgtttatcatgcaatctgcttctttgatatgccttagggttacccatttaagttagaggttgtaatgcaatggtgggaatgaaaattgatcaaatatacaccttgtcatttcatttcaaattgcggctggaaacttccaaaaaaagggtaggcatgaagaaaaaaaaaaaatcaaatcagaacctcttcaggggtttgtgttctgatatggcagacaagatacaagtcccaccaggagatggagcaattcaaaataagggtaatgggctgacaaggtattattgccagcatgggacagaatgagcaacaggctgaaaagtttttggattatatagcacctagagtctctgatgtagggaatttttgttagtcaaacatacgctaaacttccaagggaaaatctttcaggtagcctaagcttgcttttctagagtgatgagttgcattgctactgtgattttttgaaaacaaactg

SEQ ID NO: 468647 - DNA, 1000 bp, Homo Sapiens; identical to SEQ ID NO: 158642

SEQ ID NO: 468648 - DNA, 1000 bp, Homo Sapiens
ttttttttttttttattttatatttatattaattttttagagatggggtcttgctgtgtggcccggactggtttcgagctcctggcctcaagctaccctcccacgtcggcttcccagtgactgggattacaggtgcgatccactgcgcccagcccaacaacaattcttttctaattaaacaataaaaaatatctcacagtgacagttcagtcagccctgcactgtggtaaaggtaaaggtaaaggagagagtagtacatctccatttctcagctagagaaactgaggctcaaagggaaaagtcggtcatctgaggttgcccggcagctcagcagcagcaaagcaaggactccagcccaggctaggcagatcccatccgccctccaacaggtgtcccggggcttagggtggcgaggacccaggtgctgtctggaggcagcgggaagcccttgctacttgcccaggctcattgtggcagtggcggggagactccagtcactcagttccccgtagtctgtgaggtcctgagccgccacttggacgtagtacctggctcggggccgcacagccctgaggatgaaggacgtggcttcaatgggccccacccggtggaagcgcgcagctccctgacgcttgtaacggatccagtacttcagtgagaagatctctgggaagggccaggacccgggaggctcccactgcacctgtagctggcgctcagcgagggggcttaggcgcacgccttctggagggtcgggcttgatgatgtgctctgttatgaaaggcacgaagctgctgctggagccccaggggtggacggcggtgacattgagcacgtagggagccatggagaacagctggacatccgtgatggtgcagctggtggacgttggcgtctgctgcaggcagggccagctgtggccccgggcagccatgccgagcctgtacgtggcaatgaaggacacggggctggtggagtttggagcaggcggcagggtcca

SEQ ID NO: 468649 - DNA, 1000 bp, Homo Sapiens; identical to SEQ ID NO: 338443

SEQ ID NO: 468650 - DNA, 1000 bp, Homo Sapiens; identical to SEQ ID NO: 158643

SEQ ID NO: 468651 - DNA, 1000 bp, Homo Sapiens; identical to SEQ ID NO: 158644

SEQ ID NO: 468652 - DNA, 1000 bp, Homo Sapiens; identical to SEQ ID NO: 338446

SEQ ID NO: 468653 - DNA, 1000 bp, Homo Sapiens; identical to SEQ ID NO: 338448

SEQ ID NO: 468654 - DNA, 894 bp, Homo Sapiens
tcactggaagcctgaggggctgttgctgagcctcagccccagaaatacaaaaagtctttatttcacagaaattagggccatttccatagttatggggaaggacgtgtgagcaggatgggaggtgctcagctgactgtcctctccagaaggctcttctgagctgagcaggagaccccagggccacagccgagccccaacctagacacggtctgagctccaaccttggctggctatacttcaagggcgggtagggccggcatggggctggagggagtcagcccactattgcagattccacacaaagaaggagggggcttgggtggtagcactggacatccatcccatgtgcctgggagtcttggggttggagccacagagaaggttacatcggggtgctgcggaccttgccttcctcctcgggcacattctcataggcattctcatgctcactggacctgaaactggccgccatcgaagagtaccttccatctgttcccaccaggactccatctgccttgtttccgacggtcaggatcatgtgtgcaggctccggctcctcctggcaccagaagtggttgactgcaaaggcgattgcaacgaggaccaggaacacggccaccgcgataaggccctgcatccagggctgaaggttccccaggccttgctgacagctggcaggtggcactgccgtgagcaggcccagaatgaggaggctgagggccgacatggctgcagcagctcctagccttgcttctggccgccggtgtctgggctcctggagctgctgtggagtctattggtgtccgcctgaaatcaacctgggctcagtctggccctggaggagaggagctaggaaggaggaaggcgagggagggaggagacacgaagacgggc

SEQ ID NO: 468655 - DNA, 1000 bp, Homo Sapiens
ttttttttttttttttttttttttttttttttttttttttttttttttttttttttttttttttttttttttttttttttttttttttttttttttttttttttgttttgccttaaaacatcaatatgctggattgtggcgtgaggtatttttattccctttgttagtactggaaaccgtctggtacatcttgtaaggcaaatgattaacacacggcaggctcttcgtccgtttgcaagttgctgtttgtttccagctacaccagtcagagctccacagagagggtgcgttcctggttctcaggtgggcaggtgctatggtgcggggcgctggaaagaatggggttgaattggccctcgcctccgcttgtttgagactctcgttagaaagggcttaggaaaaccaagggaatggcagccaccccatcaccatcgagaacaggcagacgtttcccgagtaggggccaaagccactggaaaccgtgttccctgtgcagtccgactgacactaccccatgcctggggggaatgagtataaaaagggaaatgtttttgaagacaggcacgatatatactactagagaatgcgcagtttcaaaccacagttgcaggaggatataggaataacgacaggtgccggggactacgtaccatgatttcatagtgctctgcagccagcaggctcactaaacgctcatcacggaacataccacaaatggtgctgatcaatgacacacgggttttcatgcttgtgacacagacagacagcaaaacaccacggcttattatcttcccattgtgtacaccactcacaggacggtgacagtccaggtattgcactggatctcggctttgcttaacagaaaacaaccctgctacggttggaaagagttaccacttaaaacgatttggtcaacttgcaccaagaagtaggttgggaacaggtgttttcaggtgagcgtgaaaccccgcagtggaacgctgtgtgctgcaaattgctt

SEQ ID NO: 468656 - DNA, 1000 bp, Homo Sapiens
tttttttttttaactttaagagattttttttaatgaaggaacaaatcaaaatggctcagaaaaatcagatggagtggatacacaaataaaatacatgttaatgcttaacacattgaatacaaattttctttatactaaagactttaaaatgtccatgtgttaatttcttttggaggtggaaaaatagtttgtccaaaaagacacttttcacagttgaaggaacttgaaagttctgtcccagtgagtcctaatggttttatttcaggcagcagattcattgtcaaatatcttactttttaaggtctgtaggttatgctgaataaaattctctgcaccatgaacttcagagaatctgaagtcacttctcctgacagaccagtttttcatttttattgaattctgaattgtgtccgatgtaaagtagtaaactatagggtcaaaacaacagttggaaacagcaatacagagagtgattgggtacattgtccttactgctgccactactgagcaattaacaaatgtttgtgttctcacaagagaatataaaataagattgatattgtaaggaacaaaacagaaacagaatatgatcaaatgtacaaaaatcatttttaaaaccttagttttgtttattttgcttctacttaatgtaacaggtttggttaaagtttttagcaccatactagaacaagttacatttaaaattagaggaataaaaaatcccactatttcgatgaaaattacaatccttgagagatatgttttccatgtggcttctggaaaattttcaaagcaggcttctgaggcattgttaccctgagagtgggtagactgaacaaaaacggcgggtgcacttcctccgatcacagttaaccacacgccagtgcaaacaatctttgcatttcttttggttcttagagtctttgacttaaatgggtagacaattgccagaaatcgatctacactaatacaggttaagaacagaatgcttccgtacatg

SEQ ID NO: 468657 - DNA, 1000 bp, Homo Sapiens; identical to SEQ ID NO: 158646

SEQ ID NO: 468658 - DNA, 1000 bp, Homo Sapiens
ttttttttttttttttttttttttttttttttttttttttttttttttttttttttttttttttttttttttttttaatgtttgacttatcttttaatatttagataagagatgatacttaacattcacaagttactgtaaatgctggggaccataagcatggggcaggccacggtaaagatcattttgaatgggcaagtctttcaatttcccttacatcacaccaagcaggcaaagcctaaatacagggcaggacttgcctatgtgatgtaccattccagccctccttttcaaagaaaacttgagcagggaccctgggataccaccagcgatggtgggactcccttttgcaatccaaataagcacgatctaaatgagtccaggttggagcagataaggaatggggttgaaaaggagatgtgttcttgaaatcggccaatttcatagcctggaggagacatttgtggttagctgagtcacactgccttgggattagccagctctgctttctgtttcaacaataaaaagtcttgcaaagctgctggcatgtgagacagaggtatccagaaaattttggcatcttttccagcggcataatgagtcttagggaagagacttgttagagcgtggtccatgcactctaccaccggagagaggtccatgttcacataggatttattgcctttcagtttgtctagacttttttcaatgtaaccttctccatattgttgtttgatgtctggagacagctgctcccaaatggcgagttttttttcaattacctttactggatctgccaagtttgttttgaacaatcctggttcaatgcatgagacgtgcacaccaaaagctttcatgtcccgtcttaagctgtcattgaaaccttccactgcatatttggatggagtatagccccctccaacgattgcaaggcgacctccaacactggagacattaataactctcccttgagctttcttgaccaaaggaagcatattta

SEQ ID NO: 468659 - DNA, 1000 bp, Homo Sapiens; identical to SEQ ID NO: 338450

SEQ ID NO: 468660 - DNA, 1000 bp, Homo Sapiens
ttttttttttttttttttttattgaaaatacgtatttatttatttatgtctgtgaattttgcagggacacttctcagtccgtaacagccctatgtgtgttacctaacctttatcccttgtgaacgttctgatgttttaggaggttggagttgaaggtaaaaaattttccacagtcactacactcataaggcctttccccactgtgaattcgctggtgattagtgaggttagagctctggctaaaggattttccacattcactgcattcataaggcctttctccggtatgaactcttcggtgtttaacgaggctagagtggttactaaaggatttccaacactcactgcactcataaggcctttctccggtgtgacttctcctatgtctaatgaggctggagctctggctaaaaaacttcccacattcattgcactcataaggcctttctccagtgtgaactctctggtgttgaaggagcgtagagctatgagtaaatgatttcccacactccccacattcataaggccttgctccagtatgaactttccagtgtgagatgaggtaggatttacaggtaaaggattttccacattcactgcactcatatggcctttctcctgtgtgaactctctcatgtacaatgaggtcaaatttcctgctaaataattttccacattcatgacattcatgagatcttactccagtatgaactctctggtgttggaagaaacgagatctataagtaaacaatttcccacattcactacactcataaggcccttctccaatgtgaagtctccggtgtttaatgaggtgacagctctggctaaaggatttcccacattcactgcacatataaggccttgtaccagtgtgaactctctggtgtgtaataaggctagaactatggataaaagatttcccacattcactgcactcataaggcctcattccagtatgaattctctggtgtgtaatgaggctagagctatggctaaa

SEQ ID NO: 468661 - DNA, 1000 bp, Homo Sapiens; identical to SEQ ID NO: 158648

SEQ ID NO: 468662 - DNA, 1000 bp, Homo Sapiens
aacataaaatagaaactaactttatttctctggaagaagcaggtactgaatgccggagcagcaacttcgccaacaggctggtgggaaaacatggaaccgcgtgggggaattgggtggaagaggaagcactgatgtccctccagggcggctgccccttggtctccttccagccctggggccttgggccctggtccccgccagagaatggtctggcaccctttctccgcttcctgagccacctcaggctatttccaggcacaagatcctgaggccagccaagtcccattcaagtccatggtaaggccacaagtcacattctgcccgacaccccagctgctgccaggggccccctggaagaaggcccagtcctaggaggtcccaccgggtgccggtccgcctctccctgtggccaacacatcccgcctgcccaggtccagcctggtttcctcccagtctgtcacccagggcagggcctgggggtactactccacccacaggccccgcccaggaccagggccagaggcaggtcatacccagagcctgctggggcagccctcaagcctgtcttcacccggccccttccacatcttggcaggggcaccgggactgaaccaaagtgtgcagggacagcgctggtgcaggagggatgggcagggcagggctcccagcctcccgcagccttggccttgctccatccccgggagcagcaggagcagcgggtcctccaggactggatgggggcatctccccactcctggtggacggacaggctcaggtgattccttcaggcaggccctctggctctccagacgcatctcagcgcttgtggtgggcagggccccaggagcccagaaggtggcagccggcctgctccaggttccagtcgaacatctccagcactttgtggcactcccctctgggccgcagacccagcccgaagagctgctccaccttcagatactgggcagccctctgcacgctccagccgtggcactgcagg

SEQ ID NO: 468663 - DNA, 1000 bp, Homo Sapiens; identical to SEQ ID NO: 158650

SEQ ID NO: 468664 - DNA, 1000 bp, Homo Sapiens; identical to SEQ ID NO: 338457

SEQ ID NO: 468665 - DNA, 1000 bp, Homo Sapiens; identical to SEQ ID NO: 338458

SEQ ID NO: 468666 - DNA, 1000 bp, Homo Sapiens; identical to SEQ ID NO: 338459

SEQ ID NO: 468667 - DNA, 1000 bp, Homo Sapiens; identical to SEQ ID NO: 338460

SEQ ID NO: 468668 - DNA, 1000 bp, Homo Sapiens; identical to SEQ ID NO: 338461

SEQ ID NO: 468669 - DNA, 1000 bp, Homo Sapiens; identical to SEQ ID NO: 338462

SEQ ID NO: 468670 - DNA, 1000 bp, Homo Sapiens; identical to SEQ ID NO: 158652

SEQ ID NO: 468671 - DNA, 1000 bp, Homo Sapiens; identical to SEQ ID NO: 335741

SEQ ID NO: 468672 - DNA, 1000 bp, Homo Sapiens; identical to SEQ ID NO: 158653

SEQ ID NO: 468673 - DNA, 1000 bp, Homo Sapiens
ttttttttttttttttttttctgaaaacaagttttatttaaataagggtttaaatacattacacataacattaaaactgaaggggaaaaaaaaaccaaaaaccagtttgttacttcacatggcattgggcagctgctgctattaagttgcaagctctacagctagctacatgactgatggatcagtttgagatttgttcccttgtcaaaagtttaactctgatagaaggttggcctcacattctgatgtttggacatcccttagctaggatatgtctggtcgaacagacctttgtggcaagccagatgtcctatcacctcgctagcggtaagagggcctctttgagctctgtccacctagtcaggttggagacaccaggggatctaccaccaaaagctcccttctagtagtacagctggtgcttctgccttaccccatcctctcctctcagattcaccgaggactgttcaggtggtaacattctcttagggtagggaactctgcagagggagagctgaggaggttccggccatagttgtttgtaatcttagggctctgggcttggctgaaacatgacggtattgcttggtttcaggcttgacactgccaggcgcctattgcttgacctctgtttaaatgagggacttcaagactagacagcatggctcttttcagtttattgcatgaaggagttacactagtccaagttaaaagcggaccccaaatggttacattatacaagctgtgaggtttttaaacctgtgacaagggagagaagggaaattctactcattgcaaggaaatcctcacttaagcttcagtgagccacaagcacttaaaacccatgaaccttcagctgatcgtccttagccagtccaatctctacgaggaactggcatatgttcttgcgttggtcaccctgtagctgaattacttctccatattccggatgctcaattacagtaccattgcaggcaaactttttcttaaacgccttcac

SEQ ID NO: 468674 - DNA, 1000 bp, Homo Sapiens; identical to SEQ ID NO: 158654

SEQ ID NO: 468675 - DNA, 1000 bp, Homo Sapiens; identical to SEQ ID NO: 158655

SEQ ID NO: 468676 - DNA, 1000 bp, Homo Sapiens; identical to SEQ ID NO: 158656

SEQ ID NO: 468677 - DNA, 1000 bp, Homo Sapiens
ttttttttttttttttgctttaaattttatttaaaatctcaacactcagtcatttattccgtttttgcaaccaaacaagtaataaatattatttagcactttgtttttacaaaaataaaacagatgatacactctctgcgaggggcggtgcgatcagaggaagggtgttacacggcagacgctacaaagcccagtttgcaacgcaggcagcgccgaggcggcttgcacggaacgcaggaagcacgtggaggagtttaccatttgtgttaaacgtggcaaaaataaaccaaaatagaggaaagccggcttagactccgatggggctggcagtcacgtgagcaaacagcttagcattgcgcacttacctcatcattgataaatttacacatccaaaaaagaaaattttaaaaagccaacagaacccccaaataacccaaactgtttccacagcaactgccttttaattctgttacgttctcaggtaccaaaataaccaaatcactttgtgcttagagaaggaaagatgagtcggtggggtagtttctattttaaaataataactacaatgcacccgcccctgaaatcggcagttttgggttattccaatccacaagtggttctactctgaatgtctataaacttgctcatactgttgaagaaggaacatccacagatttattagaaaaccatattctcccaaatcaacgagagacagggaggaacggccacagttctaagagggtgtggattgacccagatattgagattggatatgaccatcagcgcttctgataccgaacgccggcttccaactaacttgtggcccctggccttgggccagggacgaccctggagggcgcggtcgggctgttgcttctgcagtgcggctacccggagtctcccacccgccaagaaaggaggaagaggagcaaggccccaatgtgtccccctcccataacaccccctccccccccgaagtgctgcccaagccgagtctgca

SEQ ID NO: 468678 - DNA, 1000 bp, Homo Sapiens; identical to SEQ ID NO: 338469

SEQ ID NO: 468679 - DNA, 1000 bp, Homo Sapiens; identical to SEQ ID NO: 338470

SEQ ID NO: 468680 - DNA, 1000 bp, Homo Sapiens; identical to SEQ ID NO: 158657

SEQ ID NO: 468681 - DNA, 1000 bp, Homo Sapiens; identical to SEQ ID NO: 246460

SEQ ID NO: 468682 - DNA, 1000 bp, Homo Sapiens; identical to SEQ ID NO: 246461

SEQ ID NO: 468683 - DNA, 1000 bp, Homo Sapiens; identical to SEQ ID NO: 338472

SEQ ID NO: 468684 - DNA, 1000 bp, Homo Sapiens; identical to SEQ ID NO: 158658

SEQ ID NO: 468685 - DNA, 1000 bp, Homo Sapiens; identical to SEQ ID NO: 338474

SEQ ID NO: 468686 - DNA, 1000 bp, Homo Sapiens; identical to SEQ ID NO: 338475

SEQ ID NO: 468687 - DNA, 1000 bp, Homo Sapiens; identical to SEQ ID NO: 338478

SEQ ID NO: 468688 - DNA, 1000 bp, Homo Sapiens; identical to SEQ ID NO: 338479

SEQ ID NO: 468689 - DNA, 1000 bp, Homo Sapiens; identical to SEQ ID NO: 158660

SEQ ID NO: 468690 - DNA, 1000 bp, Homo Sapiens
acaaactctagtaaaattattttatttagttgtaatatccatctctaattgtttgaaataaaaatttccatggtcttaattgaactgtatgttactttcttttagaatatcctttttttcattaaaataatttctaaaccactctatgtgttcaaccttctgtttaacactaagatatgggtttttggaaaggccacaagtcaccagctccatgaagtggcgaattggtccttgttttggaaagctctccaggtgtttctccagaaatatatgttcatgaaattctgaaccatcatcatcaaaacctgcttcattgttaattgggaactcccatagtttcccctcttttgtccactggatcagctcttcaaatccattctgaaggggttgttcatttactgtggctaactgcttagcaaattccacattccaaagtgaaggtgatgtgtctgtttcaggtgcttctttagtaactgccatcatgtcaaaaatattaagtcttttccctgtgaatatatttttcctttttttaagatcatccgtcttctcctggccaggataattgtcatagccttcatcaaactgaatccgaagctctggtcttgaacgaactctagctgtagcagatctggcaactttcatatctgatattatgttactgaaactaattttaggtcgctttgcatctctctgtgcccttgactcttcctcatgctgctggagctggctcagcagctctgacttggttgtttgcttatcaaaagggagagaatctgccacagcagatgcagctgccaccaactcaggactcaggggctcaattctcttctttggagcatattctgtagctcttcgaagcctgccaagtgtagcttccaaacttttaagtggtcttcttttggggggctttgttgttcgtacatttactgtgcttaattcaactttcatgcccttaataatgcctaacaagtcttttttcgtattttccttttcactgtct

SEQ ID NO: 468691 - DNA, 1000 bp, Homo Sapiens; identical to SEQ ID NO: 158661

SEQ ID NO: 468692 - DNA, 1000 bp, Homo Sapiens; identical to SEQ ID NO: 338482

SEQ ID NO: 468693 - DNA, 1000 bp, Homo Sapiens; identical to SEQ ID NO: 338485

SEQ ID NO: 468694 - DNA, 1000 bp, Homo Sapiens; identical to SEQ ID NO: 158662

SEQ ID NO: 468695 - DNA, 1000 bp, Homo Sapiens; identical to SEQ ID NO: 158663

SEQ ID NO: 468696 - DNA, 1000 bp, Homo Sapiens; identical to SEQ ID NO: 338488

SEQ ID NO: 468697 - DNA, 1000 bp, Homo Sapiens; identical to SEQ ID NO: 158664

SEQ ID NO: 468698 - DNA, 1000 bp, Homo Sapiens; identical to SEQ ID NO: 158665

SEQ ID NO: 468699 - DNA, 670 bp, Homo Sapiens
ttttttttttttttttttttttatttttaaattttatttatttatttctgagacaagatctcttgctgtcacccaggctggagtgtagtggtgagatcatagctcactgcagcctcgaactcctgggctcaagctatccttcagcttccagagctgggattacaggcctgagccaccgcgcctggccaaaatccaagtttattgagatgcaccctggcacatctggaggtagaagctcatgttctctgcagcttgacctcgcaggctctctcctccgcctcctctcacttttcggacaaaccagcccttctgaagtccctgggttcctgggctgttcctgtgaatggcattcgagggcccttccagctctgccgctgaggcagtcacatcccccggtgctcagagcggctctcgggtccctgaagccctgtcctctccctggagtccgcgtgttctcagctccagggcgggccgcagtccctggagttggggccctccttttttcgggaccaggagctggtgcttcctattgctgtggggactatggggctcctgactctcaagctgaggggttggagcctgccggctccaggcagaggattcttcctgcgactgctcccatccccagctcattatcccttcgcctcccgttcccagggttctttcctct

SEQ ID NO: 468700 - DNA, 1000 bp, Homo Sapiens; identical to SEQ ID NO: 338490

SEQ ID NO: 468701 - DNA, 1000 bp, Homo Sapiens; identical to SEQ ID NO: 158666

SEQ ID NO: 468702 - DNA, 1000 bp, Homo Sapiens; identical to SEQ ID NO: 338492

SEQ ID NO: 468703 - DNA, 780 bp, Homo Sapiens
tcaaaaaaaaagttttattttgaagattacagaacttgtgccatgcccaaccctggcttccattcccagcaatccagggatctgtggtggggatgagagtgagaaaagggagtaggaggggaggagggaggcctggtgggggtggggaagtggagtaacatggttgttgagaagctcgtgccccctaggcctgggcctcactgtctttactcctccatactacaagagtgatgaggaaggggatgaggcagatgggggctatgatcatggccaggagtacatcctctggggggtcagagaaggtgggctgcaccagggagcagttggcaaagtggatctggtgagtctcaaagatgatcctctctgccaagggattggggaagcccaggtcaaacaactctgcaaagtgctccaggcaatctcgcagggtgctataaggcctgctaatcatggcccagtcgcaccaatccttttcgataggatccatttgatccttataatgattccagcaaaattggacagctgtctcatagttcttcaccgtccccccttctgaccctggtgtgcctgtggtgggaagaggctgagccagggcctcgtggggattcaggacagcgcccagcagaaggaggaggcggacggctgccggccgcccgactcgggtcctagggagacgcgggccgccggcgcgctccacccggagcgaggccatcgtgcagcaaggaggcgaggagcggcggcggcgcttagccgggcccgggtgtgggggcgcctatatcc

SEQ ID NO: 468704 - DNA, 1000 bp, Homo Sapiens; identical to SEQ ID NO: 158668

SEQ ID NO: 468705 - DNA, 1000 bp, Homo Sapiens; identical to SEQ ID NO: 338495

SEQ ID NO: 468706 - DNA, 1000 bp, Homo Sapiens; identical to SEQ ID NO: 338496

SEQ ID NO: 468707 - DNA, 1000 bp, Homo Sapiens; identical to SEQ ID NO: 338497

SEQ ID NO: 468708 - DNA, 1000 bp, Homo Sapiens; identical to SEQ ID NO: 158669

SEQ ID NO: 468709 - DNA, 1000 bp, Homo Sapiens; identical to SEQ ID NO: 338499

SEQ ID NO: 468710 - DNA, 1000 bp, Homo Sapiens; identical to SEQ ID NO: 338500

SEQ ID NO: 468711 - DNA, 1000 bp, Homo Sapiens; identical to SEQ ID NO: 158670

SEQ ID NO: 468712 - DNA, 1000 bp, Homo Sapiens; identical to SEQ ID NO: 338502

SEQ ID NO: 468713 - DNA, 1000 bp, Homo Sapiens; identical to SEQ ID NO: 338503

SEQ ID NO: 468714 - DNA, 1000 bp, Homo Sapiens; identical to SEQ ID NO: 158671

SEQ ID NO: 468715 - DNA, 1000 bp, Homo Sapiens
tttttttttttttttggagattttaaaaacactttatttaataaaagttaaacatacaaaactgaaataatacacatcctaaaaattaccttcttccattaataggaagacccttttctatgcatgtatttggcttaaactcaactcaggataactgtgatgatgttcacttacaccaacaaatgcagacaacctgatctaattaacaaaaattacaaacagctaaatgaacataatatacagggaaattatcgtcagattaatgcacaagaaatacaagaaatttttaatgatgaaatattcagtattcttgttcattaatttagccttgtgtttttacaaaaatagtatctacactgtatacagggctatacatcagctttttgttctcccatataaacatcacacatccaaaacatggtaccactgccgtaaatggaaaaaacaaaaaacaggaaaaaagcaaacatacaaaaaacaaaaacaccttagaaaagggagctcatcctaaggtttcttacataaaactaagagtacataaaaataaaacagctagatcaattttagagatggcctaataggcctgggaaacaagttattgaggaaaaacctcaaaacaaactttgccatttacaaattaacctatctttaagcttaactgaacgacagctaagttttaaagctgaaaataagaaaaatgaaaagatctcttttagcaggttggtgtttttgccttggtgttccaatgaattgctagagtatgtgtcaagttcaaagcatctgaaaatttcaagttacaacttacaaaaagtacacaccataggttaagtaggcgcctgatattaggaagatcaataattcatctaagtgctgtatgaaacagcatctacaaaagttgctttattcaacaaactttgagggaaccgtggtactgataatgagaaaagttaaatgaatagcagttatcaaatgcaatttcttcacgtttcattctactgaa

SEQ ID NO: 468716 - DNA, 1000 bp, Homo Sapiens
tttttttttttgtgaggaccaaataatttttattcacatacatctagttcatctacctaaagtgttcagaacaatgttcagcacatattaagcttgatataactgttacctatgatgatgacgatgatgatgataatgataactgtacagtcactgtctttctgaagttgtttggtgatcaagaatgtgtttagaactatctctttattagacaaagtcataaaccaaaaatttccaacttcctgtacatgttgaaagctttaaataaggatccttggatacaaaatatggtccacatggctgaaaattaattctatgacacaatattattctaaagtcatccttattttgaaagcctaaagattttcttttatggctataaaaataccaccaagctagacattttaattctgttgagatatacaaatagaattaccacagcagcctacaccttctatgatttctaaacacttaaacatcaatggttttgggaagatgctgttgtccttcaaagttcattaaaagttcagatgccttttgtgaaagcccaacttttcttctacctgctaaattgtcttttcagaagtcttgccggatgttttctttgtttgcctctccatgttgctgcttaatttgatagatttcattttctagctgaacaatagtccgttcaatctcataattcttactgaccagggatacccaatttgactccatttctctcaatttagatccagctgtgagttgcatgttctttctctgccagtttaaatcttgaatatgttttcttaacttctgaagttccttctgtgcgtgttcaatcatatgaactagattttcattgtatactttccaggcattacatccatgctgtgacattagttccagattctcaattctaactgcttgatgctctaactgggccatagaattgtttacacattcttgccatgcagtaatgtcatttttttgaccagaggagggggctggaagctcatat

SEQ ID NO: 468717 - DNA, 1000 bp, Homo Sapiens
ttttaagaaagacaaaatgtgtattttacttgcttagatttgggagcataattgctcacaaagattcatagatttttttttattgttaagctgcaacgtacatggtttaatacaacaacaaaaaaatttaatcaagtgaaacgtaataaactgaacaataaacactcaaaacattttccattggaaacatgtaaagacaatatgaggttttgttaccatcttactgcaattttcttatgtgttactagtctacataccccatgttttctgtaatcatgcagatgtgaatggaagtttgaatgattaaataaatgaaaagtccgtttactgcagggaatcatttcacaaggcagccaaaccgggtttagagaacaaaactattcaagaaattctccacgtatttaggttcattttagaatccatgaaccttaagctgttcctcctttacaatgccaacctccaagagaaactggcagatgttttttctttggtcaccttgaagctgaataacctctccgtattcaggatgttcaatcacagtaccattacaggcaaatttctttttgaaagctttcacaagtttctttttgtcataatcatctgcaatgccctgaacagtagtcagtgtctttctgccgttccgttgctggattcttatatgaatgtaatcctcagtccctgccgggagtaagtcgtcacccttagttgcatcagcaaaggggtcgaaagattggaggttctggatagtggacatgcgatactagtgtgaggccggtgaggggataaaattcctgcggggcccgcccggatcaccttgtcaggaggctgtagtggcgagaaaacggaaataaataagaaaacgcttcgccctggggttgggattaggctggagtggcggcggcggaagccgggaggaggcaggaagaggcgaaggaggaggcggaggaagaggcgagggcgcgagagaagaggcggcgctgcggcttctcgcacaaaatgg

SEQ ID NO: 468718 - DNA, 1000 bp, Homo Sapiens; identical to SEQ ID NO: 338506

SEQ ID NO: 468719 - DNA, 1000 bp, Homo Sapiens
ttttttttttttttttttaagagattgttttttttttttaattttattttacatgaaaatcttccatcctctccatacatcccatgctatcctccattccccaccctgcttggcccaggctatgcctagaagcaagtcaaaggcaggtagaagcttgggctgaggctgcctgagatgcctcaagcactctggtccacagagacagtcaacaagtgaccgtggtctccaggcccagaaagagtctgaccacatctgatcatggctataaacaggagcctggcaacaggagcaggacctgctgacaggatcagtgggctggtcatgtcagctcccagtcgtaggagtggggcagggtgagggcaggaagagcagtctctgggtgccacactcaccctcacctgtttgtctgcccttacacctcaggctggtcccgaaagtggggctctgtccacaaaacccctgcctggacagtccttgacctacaagttgcaggcatgtgtctggccattggtcagactcactgttctcacgaccacaggaaggtgtccagcttggcctggaagagagaaggcactgtcttcaccctcaccctctgcttaaccttggtcttgggcttaacaggcaatgggcggatcatgactgtgtcagtaggctggatgaattttgtccggccaccgagcccatcgaagcctgtccttaccacatctttgctgcaagaggactctgacctgggcctcttgggctgtttctggcctaggatggcattccggacaaaaatagggaaggcaccaaccagttcctcatctggctctcctgcacagctctggccacccagtgagagctgggactccttcctggggcctttgcatatcttcttggggacatcctgaattggggagtgtgacttctctaggcaaagtttttcgtagtaaccatgctgggagctggagggccgggctgggggagtatccacatcaaaggtagcattgagatcaatatc

SEQ ID NO: 468720 - DNA, 1000 bp, Homo Sapiens; identical to SEQ ID NO: 158673

SEQ ID NO: 468721 - DNA, 1000 bp, Homo Sapiens; identical to SEQ ID NO: 338509

SEQ ID NO: 468722 - DNA, 1000 bp, Homo Sapiens; identical to SEQ ID NO: 158674

SEQ ID NO: 468723 - DNA, 1000 bp, Homo Sapiens; identical to SEQ ID NO: 158675

SEQ ID NO: 468724 - DNA, 1000 bp, Homo Sapiens; identical to SEQ ID NO: 158676

SEQ ID NO: 468725 - DNA, 1000 bp, Homo Sapiens; identical to SEQ ID NO: 158677

SEQ ID NO: 468726 - DNA, 1000 bp, Homo Sapiens
ctctcattaaatcgtgaataataatgcatttacttattctcccacttaaaatgtttaaatcctttgaagaatcttgcaaggtagcttggctagacagcaggcaggacagtccagtgcctctggtggaggagccagggtcttccacttgcctgtcttttggtccagcaagaaggcatttggattgatggtgtagtcctttgtctggacatcgctggcagtggtgacacccccacatacaaacaccttgctgtctccaatggagcatatagcatgggacacatccaaggggcagctgttgggcaagacaggcactgaggtggtcgtcttgcttgccttcaccttctgcagattgatttccacactctgccggtggctgtgcacgcagaggatgttgtcctgttggaaagagagcaggggccgatggttgaactcaatggggaaggtgatacactggaccacgtccccagtgctggtgtcaaagcagtccactaccccgacccgggagatataacctttcaccaaccaccgtccagtgacaatgtacagatgcctgtctcctttagtgatcacggcggtgccatccatggggatgctcatctttcctgccaggcaccagacttccttccgctcatcatagcgatagatgttggagacataccgccttggggcaatgctcccgcccactgagtacactgtccccccacaggtcaccatggtgtggaagacaagcccgatgggcaggtcaggcaacttggtccaggagttgtcatccatgtcataccgccaggctgtcttcagccctgaaatctgctcagtggtgccaccagagatgtagatgtagcgaccagcagaggtggcactaagtgctgctgcccgatagggcatgtctgagagcttcatccacaggttctcctggatgatataagcaaacactccatcattgaactggccgtgggccttctggccaccgaggatgaccacggaatcaagcagggcccct

SEQ ID NO: 468727 - DNA, 1000 bp, Homo Sapiens
ttttttttttttttttttgaaaatctttaccaaaaaatagtttattgcacaaaatttaaggaattcccaagcacacttacatttgtaaaaaatcaacgtgctttttaaagttacactttgtcagacacggtgacccctttcccaagaacagccacaacttgaggactctcttttgtgaggaaatttttaataaaaacaagtaactcaaaagcactgaattttccagaccctctaacacatttccctccggatcctgtgagagcctgagatcacttatgacgagattcacctggaccttccggtcagtgagctcagaacacctcacaccacagcgtcactcaactcaagtccctcctcacatcagagggctcctcgaagggaggccccaggacggttctctcagatttgctggtccctcccctcctagaatcttcacgtacaacattctgtttttgtttttaaagacctcagggaactagaactcggttgtgggaaccctgcaccaaggagagttgagggccagctccttagcgcagcacagcacggactgtgttctggtgggcagggcccctgctggacccacccgaggagagtccatttcacatcctatcagaaacactgcctgatccatattgcagagagtgggaacgggtgtgagtccgtaagacccgtagcatcaatctcacatataccacggaaaaacacatgaaaaccaagttacgttgtttttggaacgtcagaaaaacaagtagtgacatcgtgaagtgccctagcctgttgtgacacacggtgtggggatgaacacgccgccctagcccgtgacacacggcgtggggatgaacacgccacataatgcactggtgaccctgttttgtaagcagtactcccaacttcactgccttttccgtgaggatattccatcattcccacttctgcccacaagaacaaaataattcaaactttatgcactgaagtaactctggaaggtagaagtgccggg

SEQ ID NO: 468728 - DNA, 1000 bp, Homo Sapiens; identical to SEQ ID NO: 158680

SEQ ID NO: 468729 - DNA, 1000 bp, Homo Sapiens; identical to SEQ ID NO: 338515

SEQ ID NO: 468730 - DNA, 1000 bp, Homo Sapiens; identical to SEQ ID NO: 338516

SEQ ID NO: 468731 - DNA, 1000 bp, Homo Sapiens
tttttttttttttttttttttttttcagactgagctcctggcacaggagcttttccatgaaaagtttattagaagggcacttacaagaggaagagagggaatgagaggacacaaatctttaacaataggggtacaatgcttaaacaggtgctctgcttttaagatataaaagttagaaaaatctaaaacactataaatacatacatgctttttacaaagttattaaaaggtcaggctggccgaatagtgaaggtaatcaacacagtcaatgttctattccccatccctccacacacatcagagtccagaacagccgagttgcaacagcagcagtgaaggtgagtgaaggcttcttggatagatggctccatctctctgtaatgctttcacccctagcaagggagtggggcttggttcagaggacccttgtggaagggcccagatttgactcagagctgtctgtttttacacgcggccacttgtttagccagcctggtttggtgtttctggatgctgagccaaaaagccactacaccctccaccaacattcagaactggctgtgccccaactcttccagccactgtccttgggaggagagacctttccaactttcttaaaaaaaattaaatagttatctgtctgaatggttttaagaaattattacataaatataaaaacaccagaatactagagtatacattacttctgcattaaaaaaaaatccattgcagaatcactgagaatttctcaatccagtttacatgaggcaagtttcttttctatgatagctgtgtttttgaaaagttgcctgtttagcccatcatctccccaccatcacctccccatgggagatgcttcatcatcattttggatccatgtcctcttgcgtacgtttttctgctttccctacccacttgagaagcggctgatgctccttaaactgtgatgaaaatacattgtgaagacggttacctgaaaggggcctacaagggaacatct

SEQ ID NO: 468732 - DNA, 1000 bp, Homo Sapiens; identical to SEQ ID NO: 338517

SEQ ID NO: 468733 - DNA, 1000 bp, Homo Sapiens; identical to SEQ ID NO: 338518

SEQ ID NO: 468734 - DNA, 1000 bp, Homo Sapiens
ttagccatattttttttaatgcctattcagagtttaaaagtgtcccagtaacaaaagactgcacagctttgagacattaatttaaactgtacaaatacatataaccattaccactaggataaattactctttagattttaacatttttcaacatcttacatctgaacagttgactcttctatacaaaaatatcattattattttataatatgcctttgtataatgcccacaagatgacacttattacaatagcagttgttacaaagtcacaaaatacataaaaatctcagcagttggtaacattattattctttaaaaagaatttacagtactaaggtccagtccagaaagtggcagatttaaacagagtagcccaaagttcgaagtgtctatttaaaataccagtttggaaataaactaaggaaataatatatgtactatgtgatatcactgccccagcagctgaacgcacttgcttcagagcaaatgtgaaggtcagagctgagtcagtggtcagcagcatgagctggcttgggggaaccagctggcacacttcatctttgtgtctggtagggacacagaaacaaaacaatttgaaaagtccaatgaaccagcatcaaacaaacacagtttccagaactttcttaatgatgtccagccaagagaaccttgacttggttactattgaagtcatcaagccattgggcttgattgtcaccttgaattcatgggaactgtactggtcaagatcaaaacacaagccgtccactaaaatcaagtggcataactttgatattctctatgttaaagataaatttatttctaaaaaaaaaaaaaaaaagctgggcactgtggctcacacctgtaagccctgcactttgggaggccgaggcaggtggatcacctgaggtcaggagtttgagaccagcctgagcctgaccaacatggtgaaaccctgtctctactaatactacaaaaattagccaggcatggtggcaca

SEQ ID NO: 468735 - DNA, 1000 bp, Homo Sapiens; identical to SEQ ID NO: 338519

SEQ ID NO: 468736 - DNA, 1000 bp, Homo Sapiens; identical to SEQ ID NO: 338520

SEQ ID NO: 468737 - DNA, 1000 bp, Homo Sapiens; identical to SEQ ID NO: 246462

SEQ ID NO: 468738 - DNA, 1000 bp, Homo Sapiens
gaattcgggacattgtgacgtgtgatgaggggtataggcagtgattgggctctcacggcagacaacagcacagcggcgcagacggggtgactgcagtggccgtgggaaggacagggggctcgggacctgcctcccagacccccacacactccagagatgccagtggcccaggcttggaaacgggtggacgtctcccaagaggcacaagtccttacaaagagaactggttagccctaaagtcccaggtctgcaaagtggccaaaatcatggcagcagttccaaccttcagaactcaataaaacagggtttctgtggagcagagggaaccgcctaggctcaggcgccctaccctgcagggagggaggaagaggccagcgctctcaagacatcaaggtcagtctttctaaggaggtcatcatcgaagtgccaaccctcctgccaggcttgccttctctttttaacccgctgtcccttctcccacaggctgccctgcagagggtggcacactgacccacagcaggcccccacccccggccaccaaggacaggcggccgctcagacgctgcaggtggcataggccttggctctcccagcggcaaggagggggatgtctactctccagcacgtggcttcctctcccactcccacttcttgtgcttcctcctcccctctgcccagcccctgcctcggcctcccccgtggcctcccgccccaccccaacccccgtcacactcacacaaggttgacatcgtctgcctgtggctccacgaacacaccaaagttttcaaatcctttgttgctgccactgcctctgtgacaacccccacaacagggccagaggtggttggcacccccagtcccttgaaatcccccagaagcagctttcagagcctctccttctccctcttctacatggagggggaagaaaaaagaatcaaaaggaattgcctgaggaaatgttggatgtggccatgtttttgaatgtttttttttaaatatt

SEQ ID NO: 468739 - DNA, 1000 bp, Homo Sapiens; identical to SEQ ID NO: 158681

SEQ ID NO: 468740 - DNA, 1000 bp, Homo Sapiens; identical to SEQ ID NO: 338524

SEQ ID NO: 468741 - DNA, 1000 bp, Homo Sapiens
catttgaatatatatttatttagaatgcacactaacagcatgacgataaactgtcattcacaaacctgtaccaagaagcacgtaatctttaaaatgtgttgtttttcacaagtaatttaagtatagcattattattatttggtacttgagtcaaagacgacatttagattcttcagctttgaagcatttagtaacatcattgtctagtcaggcagaggaaagaaattcaaaagcactttctttttcttctgtcagttcctttgcagtaagatccatcttctcacgtgagaaatcattaatagggagaccttcaacaaacttccaggtcttattcttgattacaacagggaatgagtagagcagatcatcaggaacaccataggagttgccatcagagataacacccatggacacaaactctccctctggggttccaaaccagatgtccctgacgtggtcacagatggcttttgcagcagacatggcactggatagttttcgagccttgatgacagcagcgccacgctgctgcacagtcgtgacaaattctcccttgagccagctgtcatctttcagagcttcataaacaccaacttcctttccttgcaatttcaccttggcatggttgacatctggatactgagtcgaggaatggtttccccagataatgacattctttacatcattagcagtcacaccaagtttaagagcaatttgagctttagctcggttgtgatccaaacgagtcaagcaactgaagttctccttggggatggatggagctgacttggaagcagtcaggcagttggtattggctggattacccacaacaataaccttaactgacttcttggcgtatttatctaaggctgcaccctgggatttgaagattttcacatttgctttcagtaaatcttttctctccatgccttcccttcttggcatggagcccacaagaatggccacatccaggtctttgaaggcaacgtcttctttatct

SEQ ID NO: 468742 - DNA, 1000 bp, Homo Sapiens
tttttttggtccacggacgccacgcgcgttttatttgtggatatacacacaaataggaagaaggaaaggagccccccagggtggattgagtccagccgcccacctccaagcccccaccgcggaggggggcgtcactgttgggtcttctctgaagaggcctggagggaggtggggtccccacgtgccctcgccgtacctggcgagcgctctgggctggtgccaccgggtgatctcctaccggggccagccgtcggccaagggcagccggcgcagggcgggcccaggccgcagaggctctgccagggaccgggcgaggagcaagggataggggaaggtcttaggaaagtcgccggggcccccgggggccggagagaggcgctcagacttgatgctgactgggggggtcggcggggaggcgccgcgggttgggggaccctcctcgcccaggcttcggcccccactggggggcctccggggaggaaggggaagctccccagtgggggtccgggagttgcagtggagcaggggttctgcaggccactgtagaggcttctggaggtgtttagtccccctcggggcccagccaggccaccaggcaggtctgacctccgcccttccgtcggcaggtacagtgggggtggtgtcttgctggtgaggtggcttggtgagaagagagggtgcaccaggcctgggggcccggctttgggggctgctggtcggaagggagatgggcggctctgggcgggcagtgcttccccaagcccactggggtcacagcctggtggcggtaaggccccgtataccacatctgggctgggcatagcaggagctgcaggatacagccggggtcggggcaaggccggatcacccccttcgcctgccagcctccgaaacttctctcctggctcctcaggcccttcatccggctccagctctggcccatcgaggccaatgcccctccgcttcagcgtctcgaggatgtcagtgttggtgcggctct

SEQ ID NO: 468743 - DNA, 1000 bp, Homo Sapiens; identical to SEQ ID NO: 338525

SEQ ID NO: 468744 - DNA, 1000 bp, Homo Sapiens; identical to SEQ ID NO: 338526

SEQ ID NO: 468745 - DNA, 1000 bp, Homo Sapiens; identical to SEQ ID NO: 338527

SEQ ID NO: 468746 - DNA, 1000 bp, Homo Sapiens; identical to SEQ ID NO: 338528

SEQ ID NO: 468747 - DNA, 1000 bp, Homo Sapiens
ttgtcagcttggacattttatttccagtatcatgctaaaaatctccttgttgtgtgattcttttatttcttgacatgcacacatatatggatcaaaaagtatgtacaactagaaaaacggactccaagcaaaaatggaaaacatgtttccatgagcttagatttccgggtatattactcctaaacctaaggtagaagtaatgcattgttcacttacatgtccacttttctaacccaagctaagggctggaaaaagaaagtcagaacagtcccaagtaaatatgggaaaccatagcagtgataaaacctaagatttctcagaaatagttttaagtgggaagcctctaatcctacctggacagtgctttcctgtgggtttctcagcatgagtccaaacctcacaaagcaccttcaaagtctgggctacccagtatcacaagtatagcagtaagtccaatatctggatacaggggccaaggaaacaatgaaaaaaccaaatcaaggaccagatgctgagactccccttgtgttccacagttggaagaataagcagttggaccctaggtagttttccgcttcttggcagatggccgctcaaatacatctcgtaccccagctgccttttgtttgaagaactttgtgttctgggcactctcttggccccaagctgagtcaaaggaggtggtatcttgatccacaaggtgagtgtatttggtgcgacctgagcgtccaaagttcttgacctgcatgactttaggaagaatggttttattgaaatgatcctccagggtaggagcgctgaaatctctcttgtatacttcttcatcctcatccatgaagaaggcaccccggtgataatacttctgtaagaacttgtatttgcccttaacagctttgttggtaatgactttgccgtttgcccgaagttcagctctcctctcttcctcagtcaggtttcgcatgcgttcaatttctgctttctccttctcaagcgcttctcg

SEQ ID NO: 468748 - DNA, 1000 bp, Homo Sapiens; identical to SEQ ID NO: 338529

SEQ ID NO: 468749 - DNA, 1000 bp, Homo Sapiens; identical to SEQ ID NO: 338530

SEQ ID NO: 468750 - DNA, 1000 bp, Homo Sapiens; identical to SEQ ID NO: 158682

SEQ ID NO: 468751 - DNA, 1000 bp, Homo Sapiens; identical to SEQ ID NO: 158683

SEQ ID NO: 468752 - DNA, 1000 bp, Homo Sapiens; identical to SEQ ID NO: 338533

SEQ ID NO: 468753 - DNA, 1000 bp, Homo Sapiens; identical to SEQ ID NO: 158684

SEQ ID NO: 468754 - DNA, 1000 bp, Homo Sapiens; identical to SEQ ID NO: 158685

SEQ ID NO: 468755 - DNA, 1000 bp, Homo Sapiens; identical to SEQ ID NO: 158686

SEQ ID NO: 468756 - DNA, 1000 bp, Homo Sapiens; identical to SEQ ID NO: 338537

SEQ ID NO: 468757 - DNA, 1000 bp, Homo Sapiens; identical to SEQ ID NO: 158687

SEQ ID NO: 468758 - DNA, 1000 bp, Homo Sapiens
tttcaaagttggcatcgtagctttatttgtgcgctgtgagggtgaaggcaatctatcatcaacttttctttccctgatatgctccagaataaagaggggtgcgtggaacagccgtgaacagggccaggtgtgggctgtgtggtctggcaggagtccttagggctatggcccatgtgtgcacatcctgtttcagaagaggggggccagaggaaaaggggccagcaggaccgggcaactgttaagctgaaaggctgcaagtctgatgggacacagacttgggcagaaggagagatgaagtcaggacaggacaggacagggcagggctgcggcttcacagacttagggaggcagagctgccggggagaagttgggatccattcttcaggcaagcttgtgctttgctctcctcaaagtgggctcctctgcttaatgagcgcttaatctctccccaggaaagcaggagaagagaaaacccaaaatgagaaggaaaagttctgggctggactgtcggaacctggttgtctgaaatagtccacaaagaacatgatttctcagttatctggcattgcttgttgcagtcccgctcccacgaccttagtgtcctggaaggcttaagggcctgctggtatcctccctatagaaaggaagccccattggtcattagagatcatctagcagcaggcctgtttgttagtagtagagcaggctgacttcgggtttactgctcaaggtaaacaaacagtgactgtgattaaaggaacctgacgtctttccctcagcctacattgcatcccagctccaggcctgggtgggccatgggtgagaagggcaggtgctaagcccgatggaagtccccccgctgaccaccagtcttgctaatgagcttgatctcctccaacacgatgtccctgctgacagccttgcacatgtcatacagggtgagggcggccactgcagcagaggtcagggcctccatctccaccccggtggggccccgagc

SEQ ID NO: 468759 - DNA, 1000 bp, Homo Sapiens; identical to SEQ ID NO: 338540

SEQ ID NO: 468760 - DNA, 372 bp, Homo Sapiens; identical to SEQ ID NO: 338542

SEQ ID NO: 468761 - DNA, 599 bp, Homo Sapiens; identical to SEQ ID NO: 158688

SEQ ID NO: 468762 - DNA, 1000 bp, Homo Sapiens; identical to SEQ ID NO: 338543

SEQ ID NO: 468763 - DNA, 1000 bp, Homo Sapiens; identical to SEQ ID NO: 158689

SEQ ID NO: 468764 - DNA, 1000 bp, Homo Sapiens; identical to SEQ ID NO: 338544

SEQ ID NO: 468765 - DNA, 1000 bp, Homo Sapiens; identical to SEQ ID NO: 338545

SEQ ID NO: 468766 - DNA, 1000 bp, Homo Sapiens; identical to SEQ ID NO: 338546

SEQ ID NO: 468767 - DNA, 1000 bp, Homo Sapiens; identical to SEQ ID NO: 338547

SEQ ID NO: 468768 - DNA, 1000 bp, Homo Sapiens; identical to SEQ ID NO: 158690

SEQ ID NO: 468769 - DNA, 1000 bp, Homo Sapiens; identical to SEQ ID NO: 338549

SEQ ID NO: 468770 - DNA, 1000 bp, Homo Sapiens; identical to SEQ ID NO: 338550

SEQ ID NO: 468771 - DNA, 1000 bp, Homo Sapiens; identical to SEQ ID NO: 158691

SEQ ID NO: 468772 - DNA, 1000 bp, Homo Sapiens
gaggggacaagtcacgagtttattgtgggtctctttttgggttcatgtctcaggacattggaggagatatttttgggtgttttgagttttaggcgtgttgtggggtagttcatgagaacatttcgcatgccttattaggtattggggagtctcaagggactttgaggcttgttggaagttctcacactatgtggtcattgtatgttattaagggtagcatagggaattatttaacgggcttgcagggatatttgggtatttggaaagatcttgtaataaagtgaggtctcggggtaagtgagagggtcacaggggcttactattataaactgtctgaacacttccatcatagcgggacgatcctatgtcccagttttcctggaatggtccagggtccactggaatgttccagtgttccatctggttagagctctctttcattccttttggctactagtaaatcccaaattgcatatgaggtcccatggctgaggaggcagagggcgggcctgtgccatgtcccaagccacaagggaacaggcctgtgggcttttcccaacaagcaggctcagtgccagcctctgtgtcagcctccagggcacgccaaccttctcatggtgccccaagccccaccccaatgcacacataggaagtctccaggctgcttgggcagaggcacaatcattttagattaaaaaaaattgaacaaagagaccctcttgcgagaggtgagatgaggccctgccatgcaaaggagtcccagcagaggaggaagaattccatcctggagttcaagtttctgtgcagagacaggacctggggacagagaacggtcctccacccaatttcagctggtctgtcctcatcagctttgggctgagcctggggtgatgagaggtggagtctcccctggatggtgaccggacttctggccaaacttgcatttgcattttgcactcatgacgatgatgatgcccatggcgcacagaaccccagcgca

SEQ ID NO: 468773 - DNA, 1000 bp, Homo Sapiens
ttttttttttttttttttttgtttgtcagactgaatgttttatttcaacagacatccctggtttaaaaaaaaaaaagtggtggtggggagggttcaacattttatcacacctgacagagagcaaaactcccaccccagaactcagagccccttcggaggcatcacacaagtctttgctagctccaggacagaaaggagctgaattttctaacttgttaagaaaaatctatcaaatatgttcattctcgcagaggcgagggctgggtccttggggaaagagatcctgggcttagagcagctggggtcccagaggtgaagctgggggccaggccagctgggctggcaggagatcctgggagcaatcagttccagagccctagaatccatatttggcttgggtctgacggcggctgagcttgttctctgaccaggtgttcttcagttccagctcccgctccttggcctgatgaataagatatgtgatctggtgtttccgccgctgctggcctgttggctgctcacctttctttttgctgaatgacttcatggttttctcttctgtcaatgacttagtcatccattgctgggccccactgagctggtcatcacctttgatctccacaaagttgatttcttctctccctcggttcctcttgccctgcagccgcttaaatgcttcgtcatcgatgaaggaggcatctggggcaatttcctggggggggaccagggccgggtcctgtgcaggatagtagccaccactgtaataatcctgataataagcaccagcggcattggcatcgccatatgtggaaaactgattgtagctgtagtcgtccccaggcttaggcatccaaggggccccacttgaacctgctgccatcttgaattcaaggggggcattggctgcatcgtcctggaaagccggctctggttccgtgcctggaggcagctcttcagggacagtggggatggggtaagggtatggctcaactccaggtgg

SEQ ID NO: 468774 - DNA, 743 bp, Homo Sapiens; identical to SEQ ID NO: 158692

SEQ ID NO: 468775 - DNA, 1000 bp, Homo Sapiens; identical to SEQ ID NO: 158693

SEQ ID NO: 468776 - DNA, 1000 bp, Homo Sapiens
ccctctcaaatggctccctagtatacttgcagaatgaaggcaaagggaaaaccaagaataaaactagctaagtactccagcaattgggcttcctgcctattttccctgttctaaagaagagacaccatcctgcaataaatacttcatagacaactgggcttttgcagtgtcagtcggcatttgatgccccatatctcctggttctttttgttgccaatagttggcctggcaatggtggtgaaatgggagcaattaatctgtagatgaggaagggcttcctttaacagttgaagggtaccatctggcacgattccaaaaacttgtagtgtttttagtgtgggaatttctccaagttcaagtaaagtttcaggtattatatcatagcaccgactgagtgataggtgttggaggtagttgagctggaaaaattcctgaaagcagtcattctttagcatgacactatcacttaagtctagatggacaagattggggcatcttctaactaaagtagagagatctgatttctggagattctttctgtagccgctaagattcagctgggtgatggtctctgacacatgcgcaacagccacctgtacatgcttttcagtgaaatcaaaacaccaggagaggttcagctcatccagtctggaacagctgcttagcaaagtctgcagggcaaattcagagaatccagaacacccagaaaggttaagtcgcactaaatttgagttttttgcgagagtattgacaatgggatccgaaagccgcaggccttccaggcttagattctgcaacttggaacactgagacagtatgccgtggagggtggacacttctataactgagttcgataggtccatgtgctgtacacgaaaagggctgaaatgttcagccaatggttggtccataaatgatcgtgggcagcggaaggcaatcaccccttgagacagcaaccgaccagtcacatccgggtgcagatttttacctgtgaggtcta

SEQ ID NO: 468777 - DNA, 1000 bp, Homo Sapiens
gcaacaggatccggtttattctgccttggcagggtggtcctgagagtggtgggtgccaccctgtccggggcggagagagggcccgagggccagttaaggccaatggcgggagaagcagggggctgcagcccctggaatgcggtgaagccaggccgaggcccggaggcagctgtggtaggccagggcagggtggaaggcaccggactgggaccgggccagggctacagggccgaggacccaggccacacgggcaccccgggaggcggggcacagggtcacgtgacacagaacatgaaacacaggcacagggttcacagtaagcacatggacaagtgggcacagggtcataggccagatgcacatccagccatggctgggccagacactgggacacagtggtggtgtcacacacagaccacaggggggacacatggatttgacagccacaatgcacagaccaggctacagagctcgagggacgtgggaaggggccttttggcactactgcactggaatcatgtgagacaaaggtagcaggacactctggcggtgcctggggcggtccccttgcggcctctctaggcttagtccgtcttccacactttgttgagcagcttcaccacttcatcatagatgacaaacactatggccacatccaggcagacccggcccaggcgggggacagtgcctttgtagaatgccttgagcccctccttcttcaggatctgcaagccgcagtcccacgtgttccggtatttgtgcgcctccaggccctgcatccgggtcttaatcacatccagaggagtgtttccaaagacactggctgcgcctgcaatagctccgaagaccccagtgatcagagggttcatgggcttgttggggttgtcccctcggtaccagttgcgcagggaggtcatgacgaagaagcggatggcctggttcgagccctgcttcaggacagtggctgtgaggccctggtacgtccccttcagcccttgtt

SEQ ID NO: 468778 - DNA, 1000 bp, Homo Sapiens
ttttttttttttttttttaatatataaattaactgctttattgaatatcaataaactgtacatataactatacaaaacgtttccttgatacaaaatgtttgaaatataaataccagtgtacctttaaaaatgtaaacatcttcctcccaggcccacctgtcgggcccccagaatagttctgggagacacatcggtcagaccagagcaccccacttgggcccccgacaagtgacagccattactcacagtcccttttcagacattgttaaattgcccgggaaacaggtgccaccccaccaaacaggaggctgaaatagctgcctgggctcggggcatctcagactctagtctgccaccgcctccgcaggccctggggctgcacctgggggtggattattgcatagttagtcacacctcgtggagggtggcctgagggttccttgtgggggggtgtgtgtgaggggagtggggtcccctgagtggggtgggagcttcccagtgagtctgtcagcctttgtcctgtagctcaaagcagctgtatccaaacagctctggatacaaaaacccacgcagacaggccagctcaggaatcccccagggctgggggccagctgccctccctccacagaaatggccatgggaaggcctcttccagagcccaggcagaggacacagaaccagaaaatggtcttcatcaaagtcctgtggggctgatgtggccagaagtggggcactcaggagggaattccatggcagtgagaaggatgtggggtccttcctgctggagctggggaaggctgtcaggcaggggcaggtatggagaggaagagggagcctcgagggtcagcggggacatcctgagcagccggactcttggtgcttgtggagcagggacattcgggagaaggtccgagcacacgcctggcactggtacttcttgacatctgagtgggtctggaggtgggcccgcaggttggagcggtcagcgaaggcacggctg

SEQ ID NO: 468779 - DNA, 1000 bp, Homo Sapiens; identical to SEQ ID NO: 338553

SEQ ID NO: 468780 - DNA, 1000 bp, Homo Sapiens; identical to SEQ ID NO: 338554

SEQ ID NO: 468781 - DNA, 1000 bp, Homo Sapiens; identical to SEQ ID NO: 338555

SEQ ID NO: 468782 - DNA, 1000 bp, Homo Sapiens; identical to SEQ ID NO: 338556

SEQ ID NO: 468783 - DNA, 1000 bp, Homo Sapiens; identical to SEQ ID NO: 158696

SEQ ID NO: 468784 - DNA, 1000 bp, Homo Sapiens
ttttttttttcatgccaaatagtttaatgttagggggaagggagaggtaaggcagggttttcgggagttacccccaaagcaagagggcacagtattcaggctgctggggttgggaggtagaagtcctggttccaagcttgccatggtcccagccttgctgtgaccctgggcaggtagcctctttctctagactttcacctaccctgctctccttgagacagagatggggctggagggggcggggcagaggctgattcccacacccggtgtaaggtccagggtagcagggcttccccccagggcttctggcatcactgggagtcctggccaggccccaggcacaccacagtgggggacaggagccccagcccagctgggagaggcaggcctccttgatccctatcagcccggatgttggggagggggtatggtgctggtcgggtccttgggatccctaggtggctcggggctccagagtacaggctctgatacgtgacaggcctgtaggtggccggggccagcaggacctcaggtgggggcagcagctgatgatggagccaagcaggggtcttggaggtggaagctgaagctttgttggggtctttctccctgtctgtggcacccttcagcacacagggactgaggctgctgtgactccgggctgggacactgagcaggggccgtggggccacaggccaggagtccaggtcactctctctaaagcctttggcaaaagggttgctggcgattttcagctgggtgatcctgtggttctgataggctgtcactgctgtgaactgggtctctgtgaagatgaaggacttgaagttctcctgggcatagcgctcactgtccttgcgtgggtccacgaagaccacgtggaaacggggctggtagcggtgcatagagttgagaatgatgtggccattgtcatccagcaggttgttggtcagcttgagcttgtcaaaggacacaatctggcgcatccactgggcaccct

SEQ ID NO: 468785 - DNA, 1000 bp, Homo Sapiens; identical to SEQ ID NO: 338558

SEQ ID NO: 468786 - DNA, 1000 bp, Homo Sapiens; identical to SEQ ID NO: 158698

SEQ ID NO: 468787 - DNA, 1000 bp, Homo Sapiens
cacaagtatcttgtacaccagtctgtaatttttaattagaattagctaaaagacattgtacctttcgcgtgtatgactgagcataacagtgcttaacagtgtctttattaagtgaatgcctgaaagtattcaacattaaattcaatttatttcacattaatgtttgcaaatacatcatcaattcttacatatttcaaatcaacttcaagtacagaaggcttcctctcaaataagtctcctgaggtgacataaagactgaaagaagcctatgacttgagtccaagtctcttaaccaacaatcaccatatcgtcactggtgaactcatacgtggggacttcaaggttgagaggagcaggacccaatctgatcctgccagatgcatcatagtgtgacccatggcaagggcagtaataaccaccaaaatctcctgcatttgcaatgggtacacagccaagatgagtgcaaacacctatcaggataacccattcaggtttctttactcgatctagatcatgctgtgggtccctcaactgtgataattcaactgcagcttcctgctcaatttccttctgggttctatgacgcacaaacaggggtttgcctctccatttgaaagccatgttcttgccttctggaatatcggataacttgatttcgattttcgccagggccaacacatcagcagaagcactcatgctggaaacgaactgggtgacggcattcttggcagcatatgcgacacccacagtagttactccagttaccaaataggagaaacctttcctagcctcgctgctttctcttgaagacttcgtactatctaaaacttcaaggcggcggtattcagagaagtcaggcaccttgatgtctgtgtgggaataacaaacagaagcagggacattgaggcccacggaggcgaccaaaggccggcgcacggcctggccgctcagcgactcccggctgaggaagggccgcttcaggtccaacacaggctgctcc

SEQ ID NO: 468788 - DNA, 1000 bp, Homo Sapiens; identical to SEQ ID NO: 158699

SEQ ID NO: 468789 - DNA, 1000 bp, Homo Sapiens; identical to SEQ ID NO: 309033

SEQ ID NO: 468790 - DNA, 1000 bp, Homo Sapiens; identical to SEQ ID NO: 246464

SEQ ID NO: 468791 - DNA, 961 bp, Homo Sapiens
tttttttttttttttttttagtagcgcagttttattttctgtagtaacaaacatttaagaaccagataaaacatgaggccctcccaggaaagtagcaactgtgggaattcctgccctagggaaggatggacgcactgcctacaaggagacgcaaagtgggacctcgctccatttgcccaggccaggcttagcgggaaacggggggcccaaagcgctgcatggtccgcaccaccagggaaagctggtcaagaaagttgatgacggaaattcggagcaggcgacagtcttcagctttccagcggacgaccaggatcctgccactcactgtgagatccttcccaaccaccctttggtggggctcggcatctggtgccagggacccatgggcgatttccgcctccaagggggtcgggaaaggcacgctgagggtgaatatgtgcggccgcattcgtgaccccctggccgcagacgcggcgtctctgcccggacctggcgcgtgcgctgggggagctccaccggccggagctgcggctgtgtccacgcccccgcggcagctgtggccaccccggccatccccgccgtcagcgcctccgcctgcgtctgcatccgcgtcccgcatgaccgccgccgcgccgctccgactccacccccgaagcgcaggtcctacgccccgccctctctgtggctccttcccgaagccccgccccctgcgcacgactccgcccacacgcgcctgcgcaggtccctggagagcctgactggcgcgtggtcagttcccgccaagcggccctgccgggggccttctgagacccggtcagcggttgagaggctgcggtttcctccagaaactctgccctttcgcgcgtaactcgattccagagcgctggtgcaaactgacccacagtcggtccggccccaggaagccaaccctgacggggcttttgaagacaccgtggtcgcc

SEQ ID NO: 468792 - DNA, 1000 bp, Homo Sapiens
ttttttttttttttttttttttttaaaatcaagtgagtttattcatggagaaaacagtaacaaaacacccttgggacttttttattccaacaattaaaattgcattaaaaagccaacagggagtttggagaccgaaatgacatgtagagaaactaaattcccctttccttgggtttacctatatttatcttttaggcaagagagatagttgtgattaatttcttttctaaaagacaagattttccagttccattgttttcatgtgtaaaggattcttccatgagagccagagaggtggaagagaagatcaaagaatttgatgatgcctgagggagttaagaagatgagactaatagctggttcacagaaccacaattttaccataaattaccagatggagtggagggaggggtactgtatttctcattaataaaatctgaggtatttaaatactctgcaaacatggaaactcacttctaccttcctcaaaggaaatagcagaggctgagaaggctgttgtggaagaacatacctccttggactgacttctcaacatacattacagccaacatgtaactaggaacagaccatgtcaaacacttctctgagcaaagtggatgagtttacttctgcgtgggttccaaggcaacagtgtgatcaacaatgagttcttccctgtctctgtttttggcttgtctgggtgctgaagtccacggcaatacacaataacatgatcatttacggtaagcaggtgcctgagtaaaaaggatgggatctccaagtctcagctgtcagggtttatcctggcccgttttacttcgctattctggtcatccagatggcagaaaccttctgtactgatgtctctttttttcatcctcgatgggttctagagggaaattctggtctgtggccaggacctgtcggacagtcatgttaacacgagcggtcttcaagtagctggcacacacctgccagtcctccatagaacaaggctcta

SEQ ID NO: 468793 - DNA, 1000 bp, Homo Sapiens; identical to SEQ ID NO: 338564

SEQ ID NO: 468794 - DNA, 1000 bp, Homo Sapiens
ttttttttttttttttttttttttttttttttttttttttatcaacatttatatgctttattgaaagttgacaagtgcaacagttaaatacagtgacaccttacaattgtgtagagaacatgcacagaaacatatgcatataactactatacaggtgatatgcagaaacccctactgggaaatccatttcattagttagaactgagcatttttcaaagtattcaaccagctcaattgaaagacttcagtgaacaaggatttacttcagcgtattcagcagctagatttcagattacacaaagtgagtaactgtgccaaattcttaaaatttctttaggtgtggtttttgtcatgtagcagtttttatgtagatctatatataaaagtccacacctcctcagacagccaatgaaacaactaaatttcaatctgtacaacctaaatagtagttacagtcctctattgtacaaaatagttacactacatacacaaatatacaataagcaaaacaaccttcatggtaagatagcctaggtcccagctacctgtcaccattttgtcactctcatagttttgtgtcatccattgtttgagaagaaagaggcacagtactattgttttttatgaattttggtgacagttgtcaaatttgtacagtgaactctgttccccctcattttagtctttttaccctcctttcaagttcctcctggggggaggagaggagagaggcgagtccagtgaggagctccatcgcttcacaaccccatgtaggacactaagcgcaagcaggagagagaacccttggaagtgaggggtagggagccggaagggatggaaaggcacacagctcctgagcatgaattaaaccatttctcagatatctgccaagctgcatgaggtcccggtatatccatgctaattctcggattaacctttaattcacccaactaagaaatttctccaagccataagcatatgagtgtttaatactggaaaa

SEQ ID NO: 468795 - DNA, 1000 bp, Homo Sapiens; identical to SEQ ID NO: 338565

SEQ ID NO: 468796 - DNA, 1000 bp, Homo Sapiens; identical to SEQ ID NO: 338566

SEQ ID NO: 468797 - DNA, 1000 bp, Homo Sapiens
tttttttttttttttttttttttttttttttgaaggcagaaagccttttattttattttttttgagacagggtcttgctctgtcacccaggctggggtgcagtggtgcaatcatggctcactgcagccttgaaatcctgggctcaagcaatcctcccacctcaacctcccaagtagctgagagtacaggcatgagccactatgcccagctatttatttatttatttatttatttatttatttatttatttactggtagagatgtggtctcactatgttgctctggctggtctcgaactcctgggctcaagcaatcctcctgctatggcctcccaaagcactgggactataggcaagaaccaccacacccgacccagaaagctttttaacccactattattccccctcctctctctcctaagtgccagcacaattactgaagaacacttcagtcttcacacgccgccccacagtgcccagagggagcacagagtgatggtgtagatccccagcatgaaaaggtagctttggaagagcagtcggtcaaagcgggacaggaggaccagccactctgcctcctgttggtctgtctggtcctgagtttggaggtagttgctgatagattgaagctgcgaccagacttccttcagggttcctggctgggccaggtgctctccatacagcgaggactctgttaccacagcacgttgggccctgggttccactctaggcctgtcagcatcggtgtcccctcgaaggcacaagaagggctgctcctgtccaccacgctgctcatcatggaggaatttgaccaacacgatggacttagctaagctgagaaccaagaaggccatgcagatggtgaagaagtgcccaatcagaggggtgctccctacactccgtggcacctggttggacatgttgaccctgaagacggtgtagcccaccagcacactggtcttgaacacaatcctggctcggcagttgggtggcaggtagaa

SEQ ID NO: 468798 - DNA, 1000 bp, Homo Sapiens; identical to SEQ ID NO: 338568

SEQ ID NO: 468799 - DNA, 1000 bp, Homo Sapiens; identical to SEQ ID NO: 338569

SEQ ID NO: 468800 - DNA, 1000 bp, Homo Sapiens; identical to SEQ ID NO: 338570

SEQ ID NO: 468801 - DNA, 1000 bp, Homo Sapiens; identical to SEQ ID NO: 338571

SEQ ID NO: 468802 - DNA, 1000 bp, Homo Sapiens; identical to SEQ ID NO: 158701

SEQ ID NO: 468803 - DNA, 1000 bp, Homo Sapiens; identical to SEQ ID NO: 338573

SEQ ID NO: 468804 - DNA, 1000 bp, Homo Sapiens; identical to SEQ ID NO: 338574

SEQ ID NO: 468805 - DNA, 1000 bp, Homo Sapiens; identical to SEQ ID NO: 158702

SEQ ID NO: 468806 - DNA, 1000 bp, Homo Sapiens; identical to SEQ ID NO: 338576

SEQ ID NO: 468807 - DNA, 1000 bp, Homo Sapiens
cgcccttccacggtgcactcagctgggtctcagcccagcccttgtgggagggtggcaccccaccagcccaggctctgcccagctccggctcccaacagcgactcccaagggcacccttccataggccaactggacaggcagctggtggggggccagactgacccagggccccagctccccagctcctcccgccctggccctgcccacgcgcctggctctattcttgctgctcattcatttccatgtctgacaccaggatgttcttctcagtggcctcggtggggctggagctgctgcggctgtagcgggcaccctcaaaggccccgcgctcgatgctctggcgcctccggtaaaggatgagggctgcggtcagcaaggccaggagcagcagcaccgccatcagcaccaccaccagggccgctgggttctctggaagcgctgatggggagaagctgctctgctcagcacgaggaagcttgcagacgacacccatggtgatgttggtgcaagcgccggggcgccatagcccgctgttgctctgaatccagtagcagctgttgtggctcagcatgctggggcccaagcccgggggcccccagttggagtagttcacagctgtgttgtcctgccagaccagagtgcctcctttggggttgaagttcatgcccagccaggcgccccgactctggccctcatagctctgcaggtgctcccagacaaacacattctccatctcatccaggatagacaggacggccccacccgctctctggcagcgctgtcgcgcctccttgtggcccagcagcagctccatgtggaaagaatagcagtgctcccggaagggaatccacgcggagtctgccagtccctggggacagctgccatggtagcttattcttcggggaggagggggcccactgctaaccccacacacagccccctgcagcttggtgtcacagctggtggtgcgccaggccccgtccacatctacgtaggtaca

SEQ ID NO: 468808 - DNA, 1000 bp, Homo Sapiens
taatcaggttgcattaagctttataacaacacggttttcatttagcgggagaaatgacagtttaataacagctgaacagatttaactccccccactcatacaaatttccagttttactagaacaattcctggttttggagatctgtgaacaagtgctttatgtcaaatgatgcattttaattgaatcaaactgatgggaagggacacttcattcagcagctcttgatgggggtttctgcagacagcccttgctcacccccaaccctcataaactggatctgatgaatggagtcagctttctcgccactacctcactctctgccatctctaaatagagaaaatgaagcccgaggaggtggtggtggggcaaattggaagaatgctgactgctcctttctccattacatggctaaggattattcctaataacagacttgtcaactctctggtctttgcccttctagggaccctaggggacagagtccaccccaaaaacatgctcagaactacagtgcttgggagagatggtcttcaggtaaggtaacctcccaccaagaggacaggatttcttcttttacccccagatatggccactcatctctgccaaccccagagctctgacctcggttacaattactctactctttgagcagccctgtgggcctgatccgaacacaagggcatatgctaagcttctgcacaacccaggatactcatgaagagtgagacccaaccccatttagagggctcttggaaagaaggcttcgaggtgtgtcagctttcattttcttctgtgtgtgtgtgtgtgggtgggtgtgtgttttctttttcagtgaggaatgtgcatgcctctgccttcatgatgtggggagggaggaagtcaggggttgtgggatgagacctttaaagagaagactagaaacaccttagagggaggagcttgctccctaggagtcctggagcactcagccacaaagtgcattctggggagaagcccaag

SEQ ID NO: 468809 - DNA, 1000 bp, Homo Sapiens
ttttttttttttttttttccaagatttatttttttattttaatgatcaaaaaggtgtatttgaaagcactatgaaaactgtgacgggtacaaacatatgataatactaactgggaaataatttaagaaaaagtggcacgggaaaaagggagaaaaatataaggatagatatcaattttatcagggccttgtattttaaaaaaagagagagagatgtttaacctcaagattttctgaaaacttttaatgacaactgatgcttatactttatgactgggtatatagaacataaaataaaaactgaaaattgaaagtgtttagacgagtgaaattttccttttctgttgatccacgtgtttggtgttggttatacattaagatggggcgggagtgagaacaatctcttaacattcattgaaaaaaatactgaaacatattttcagcacaaatattaaactgtctcttctctaccgattggtaaaaaaatatattatattttgattttttttttctttttaaattatatggttatccatcccagccaaagtcgtgcccggtcatctggtagaacttgaggttgaaaggccggtagaactcgcgcagcctgcgcaccacctcgcggtcgatctcaggatgggtcctgcccttggtcttgcccaggcaatggggccggctgctgccctccgccttcttcaggcaggggaagcccttggtcttgttgaagtagaagtgcttgtccgtgatgatcctcttgaggcccaggaagtcttgcacgcggcccagctccccggccgggtcgctgatgagccgctcgccgctcacgaagagcatctggcggatggggaagtggcgcagccagtgctccaggtgcttggcgtagatgccgatctggatggcgctccacgacgtgtcgatgaggcccgctgtcctgtttttgaacgtcaagctctcgaaggtggggatgtcgggccgcttggacagcgtctgcgtgtagtccgaga

SEQ ID NO: 468810 - DNA, 1000 bp, Homo Sapiens; identical to SEQ ID NO: 338577

SEQ ID NO: 468811 - DNA, 1000 bp, Homo Sapiens; identical to SEQ ID NO: 158703

SEQ ID NO: 468812 - DNA, 1000 bp, Homo Sapiens; identical to SEQ ID NO: 158704

SEQ ID NO: 468813 - DNA, 1000 bp, Homo Sapiens; identical to SEQ ID NO: 338581

SEQ ID NO: 468814 - DNA, 1000 bp, Homo Sapiens; identical to SEQ ID NO: 338582

SEQ ID NO: 468815 - DNA, 1000 bp, Homo Sapiens; identical to SEQ ID NO: 158706

SEQ ID NO: 468816 - DNA, 1000 bp, Homo Sapiens; identical to SEQ ID NO: 338584

SEQ ID NO: 468817 - DNA, 1000 bp, Homo Sapiens; identical to SEQ ID NO: 158707

SEQ ID NO: 468818 - DNA, 1000 bp, Homo Sapiens; identical to SEQ ID NO: 338586

SEQ ID NO: 468819 - DNA, 1000 bp, Homo Sapiens
aaagcccttgatcctctgtctctcttccttcactcagtgcattggtgcagcaattttgtttattcccgtttccaaatgccacacccttctgtgagcagagaaatccatgactcaagaatggtatctttgtaaactccatcttttcaacaaaactcaaatgtttatgaggaaatatatttttaagaccgaaggggaataattgatttatagaatttataatgactccacatgaacacaagtcagccttgatactgctgaccgggaatattgggaatattcttcaagtgcttttctattttttttcttggagggcttcccagacatttgattggtttagaattcatttgggtcagtggttctcccccaggagtgatttctcctcgcaggggacagttggtgatgtctggagagtttgggttgtcaattcggggtgctactggcgtctattgggtagccaccagggatactgctaattatcctacaatgcacaggagagctcccgcctaacaaataagtagtcagcccaaaatgtcatagtgctgagactaagaacccctgtttggattaaatgctgaggtacttatgtacaatttcctctctgttgcttcatttcaccttgggacagtgttggtgaagacaagtactgtaaatatttgaaatggtatattcttcattgcctaggtggttgagagtaatgaccttaatgattgatagcattaatcttgaaggagacccttgcttgttgggattagaatctccacacaccttcctcgggcttcagtgcctccatgtcatagcacggatgggcggggttctcacctgcagtgccatttgcctcctctttcctaggggatctggtggcattactctccgaaggtctggctcagtccctcaattgccctgtgcattccaatatcctacaggtgcagagccagccatcctatgtatgtgtggacacacatgctggcttgcctttacagtaaagagcttcaacatgttt

SEQ ID NO: 468820 - DNA, 1000 bp, Homo Sapiens; identical to SEQ ID NO: 338587

SEQ ID NO: 468821 - DNA, 1000 bp, Homo Sapiens
ttttttttgccatttgaatttgactacttttacttacaagagacttttccccatcaaacgatttccccatccatttattacacttctgaagtaggatttctgaagtcatcttatggcatgtaattcttagtataatgcacaggattcctgtcattttgaagcacgaggagaggtttttgatatcttaaacatttttttagtgtagatgcacatattctccacttccaattgtaatagaaaatcagtttaaggataccctaatgatgcaaatgaaatgattagcaaacaactcaaatttaggagccttctttacaatccattgagtgaaacagattcacaaaataatttgttcaactgaagatttaatttattattagaaaatggttttaaactctgatcattacattgaagagtcaatgactgaggttttcttacctactgctcatctcttagacaataacttcttgaataatttctacatgagtgtctgtacaagcttttaaaaaacagaataaattaaagccccattcaccaaacaaaccacctcccaatctattatgttttgtcaccttgttcacagtttagacagtttgaagagatttaaacgtgttgctaggcaactagctcctgaagcataacgtatttccttcaacatcccagcccattcttttttatcatcttcatacttccatatgtcattgacttcagtgggtgcaaattctttagactccagttgaatcatagcaaaaccaccaattgcatacagagatccagccaggctgaccaaactgatggagcttctttcttggggaaattcggtcattacatcccatttatttgttgtaaggtcaaaagcttcaactgaagctgaaagaccatcttcagtgacacctcctgcaatcacaattttgcctttatggactgctactccaaacatggaacgaggaattttcattggagccagatctttccaatctccttttttggggttgaagataaa

SEQ ID NO: 468822 - DNA, 1000 bp, Homo Sapiens; identical to SEQ ID NO: 158708

SEQ ID NO: 468823 - DNA, 1000 bp, Homo Sapiens
caacagaatccatttgggaaagcagagtggagaggagctgaaaaactgagcatttactcaaaagagactgtttcaatttgaaacataatgattaaaccagaagagactgggctgtctctaactggcaggctaacctcaccgcctagctcagttccccagatgaaacattgtttttgttaagtctttcctgaaggcatgaggataatggaggcacctccagacagttacttacgactgtactattcaccatcatccaagtaaataatggtttcttaagttgaatttcctaaatttttttaagatttcacatcattgttttcagtgactagtgttaatttcatattaaaagcggctctaatgttagcccaaaagagcccacgtttgcttttctccttgggccactgcaaataagtccgctgcgtcatgagagccttcagcttgtggtacttgttgggaatgctgttctgtggaatgggttccagtaagatgaggattaagttattagatccttcatgaaagagattgtgatgggcaaaatagagttcgtaatggcaccactcactctggacaaagttgggagacaaaacaaagatggacttgtaactcttctcaatgcagttgatgatattttccacaatgctcttgccagggacaaagttcctctcatgaagacaaatctgtatatcttctttttctaggtaaggtaccaattcacttttcacccaggcagaatcatgttcactatatgaaataaaagcatgaaactggaggtttctttggagttcttctaagggtatgttcctggccctgcgccgagtctgggtccactggcacaccatcctgagataccagggcagatccaagtagatgcagagggaggtcacagtcacagccaacaccagcatggtggcaccgatggtgacgatcagcagagttatgttgcaggataattcagacatgtgaaagtcctttagtgggcttcctctataactttctgggt

SEQ ID NO: 468824 - DNA, 1000 bp, Homo Sapiens; identical to SEQ ID NO: 338592

SEQ ID NO: 468825 - DNA, 1000 bp, Homo Sapiens; identical to SEQ ID NO: 158710

SEQ ID NO: 468826 - DNA, 1000 bp, Homo Sapiens; identical to SEQ ID NO: 338594

SEQ ID NO: 468827 - DNA, 1000 bp, Homo Sapiens
tttttttttttttttttttttaactttggggatgtttattgcaaatggttataatttaagtgatatttacaattgtttaagacagagggcaaacaggctctgagccaggcctcagctttagaggcccatcctggagaggaaatggcacttgcagggaacatgagctcaatcactattgctcactaagcacagggtcacactggagtcatcttagggaggctgcgaggaagaaaagggagtgcacagagccatgaagcaactactttaaattctgaatcttgctgtgttcccactgagcatgctgccttcctagagcaggccttggagccatcccagggactaacacagatccttcctggggcgcaggcttctcacactagcgtagggtgcctaggtcatcctcatcattgtttatcatcacagacttctttctgcctgccagatatcttccctacttgtggctttaaaacaccagcaggagggaagtcaaggaatgttcttgttagtataaatccatagcaaaaacgatttgagaactggatgcttcccagggttggcaggtgtgtggatggttccctgaattctttatccacaggatgcttgaatgggtggtgctgttgaggctgacaaatgtctgagctttacagacttgttcatgtttttgagaacctatggggatactcattgggcagaatcagagcccagcagaacacggggacggggaagggtaaagaggggaaaccgacagagtcctgaggtcatcccgggaggaagggagactacttccagaagcagcagcacaaagggctctgccgagactctgcggagggggtccagggtactgggggtggaggggtcccctcttgcagtgtggggttactgtttgggtaaagcgaagtcccaggcagtttcctgtgcacatttccacatggcctgcatgaggcgagtgaaacccatgtctttgggcttttccaggcctctcatcagccgttgcttcatg

SEQ ID NO: 468828 - DNA, 1000 bp, Homo Sapiens
cctctcgcttttttttaaagtttgttttcttccctcgtttatattttcccacatttcctgttgttttgcttctttgttcctcttatattttgttcttttttttaaaatttacttgttatgttttttctctttttttgtgtgtgtgtgtttttttgttttttgtttttttgttttttttgttttttgtttttgcttttggaaggtctcccagcggagggtctgggtctccccgccccgccccgcccccggggaccgcgccctcctcccgcggtcttctggcgaggcccgcggtctttatacgggggtggtccggcggttggctgtgttggagtggagagagtccttgttctccttctggatacagttgtgaacctggaggaagctgttatccctgtcggagttgtaggtggcggtgggcgtggtggcggccttcagggggtccctgctgagcgtgtacatggagatctccgtggacggcagggtgttgaagcccttgatgcccacgggggaggcgtccctggagtgtgagggctccgtggagcgcgagctggagcggctgcggcgctggtagcggtagcggtagctggggatgcgggtgatggcagaggcctggaggtagtccgtggcgcgggccgtggcccgcagctgtttgtgccggtcgataaacatgtgcaccgccagcaccccgaccatctcggcgatgatgaaggacagggccccgaagtagaaggaccagccgtatgagtaactattctttttggagtcgctcttggaggggtctccggcattggcagatatgtacactatgatgccaatgatgttactcagacctgcagacacgaagaagatgccggcactcaggatgatgttgtgtcgagttttgtagaactcgctggctgcgatgcagaggccacccatgaaaagcagaatcacactcaggattgggaaaatgctggaggccctcacggcccggaggaaatattctgctgtgtcagcttcg

SEQ ID NO: 468829 - DNA, 1000 bp, Homo Sapiens; identical to SEQ ID NO: 338595

SEQ ID NO: 468830 - DNA, 1000 bp, Homo Sapiens; identical to SEQ ID NO: 158711

SEQ ID NO: 468831 - DNA, 1000 bp, Homo Sapiens
cctctttcaaaaaaattttattttaagtccttagtgaatatctaagagaaaaatataaagtgcttggctttagagttgggaggtcagggaagagggaaaggccccctgggttcacaccatttggaatttcctagtcccttacagatgaaagagggcgtatatctcaaaaataaaaaaaaaaaaaggataaaaaattagccttgagttctccaccagccagtgtgtgcgaggattttcaggacacgattatcacggacaactactgagaattatcacaaagaggacaggtcaatcgtgtgaagaatgagtctacttcaaaggagacaggaagaacaaagaggtgaggtggaagatgggtcccccaggctctacaccagggacagaatggctgcctgctgctctggagtctgctccagcaagtatcgggcaaaggcctgctccatcttcactgtgataagattctgtggagtatggctggagccatggctctcttcccagaaattcagtgttacctggaacttcggtggggggcccaggccctgaaagtacctgaccaagtctctgcagaagtaggcggttctgaagagctccacgcactcgttgctgggcagcagatgcgggcctggcccaggtggagcctggggtgcattccaggagatggggatggggcaaaggcgctgcacgaagaggcctcgggggttgctggccactaggatgcccctctcaagctggctcagcaggcgctgcgtgggctccagtgggccaggcttggggaacagcacctgctccatgctgctctcagagcctgagggctcagccacaaggcggcaatccaggctttgcacctgggcctcgcccaccacgcgcccgttgtagatgaaggtgagcagcagtgagtagtctggctctggaggaagcagaaactccagggacctctgatccccttgaaagggggcctcagttgtgtctgtaacttcctgtggctcagggctgctgctgc

SEQ ID NO: 468832 - DNA, 1000 bp, Homo Sapiens; identical to SEQ ID NO: 158712

SEQ ID NO: 468833 - DNA, 1000 bp, Homo Sapiens; identical to SEQ ID NO: 158713

SEQ ID NO: 468834 - DNA, 1000 bp, Homo Sapiens
ttttttttttttttttttttttttttttttttccatgacaacaattaatttatttattgagggtgaggcagggaagcggggagggagggtaggggtgacctctcttcctcacaggcaccaggccttgtttctctcccagataagctaaggtcggcaggggctgaggggagtgaggcagggaggatgcatggggcctgtgggaatcagagagaagctggggtcagaggtaggagctgacgctgtggggggtggggggtgaaaggtgaggcaaggtcaaaggtgaactgcagctcggagggaggggtccaatataaaccaggacttgcaggtgtagaagtaaaatgggactcatagagggtgaaagagaagttggagtcagaggggattcagagatcaaagagaagttggggtcagaggtaggagctggggctcaggtggggggttaaaggtgaggcaaggtcagcggtgaagtgcagctcagagggaggggtcaaacataaaccagaacttataggtctagaggtaaaatgggattcatggggggcagaggtcaaaggtgaagcagaagtcaggggtgaaggaaggtctgcaaagttaaaggtgcggtttccagagtcagaaggggtgaagcggggctcctcctgggaatgtcaaggttggaagagctcaagggggttaaagataaattagggctcaaaggggagccagggtcggagatgaagtagccagaggtaaagcgagctccaaaggtattgttagggtcagcggggagtcagccttggagggaaagcggggctctagggttcagagatggggggcctagcggatcaaaggtcagaagcctcgaggggacaggtgggaagcgatgggagcagcctaggccacctcctcctccgcctcctcctcgaactcgccctcctcggccgtggcgtcctggtactgctggtactcagataccaggtcattcatgttgctctcggcctcggtgaactccatctcg

SEQ ID NO: 468835 - DNA, 1000 bp, Homo Sapiens; identical to SEQ ID NO: 338598

SEQ ID NO: 468836 - DNA, 1000 bp, Homo Sapiens; identical to SEQ ID NO: 338599

SEQ ID NO: 468837 - DNA, 1000 bp, Homo Sapiens; identical to SEQ ID NO: 158714

SEQ ID NO: 468838 - DNA, 1000 bp, Homo Sapiens; identical to SEQ ID NO: 338601

SEQ ID NO: 468839 - DNA, 1000 bp, Homo Sapiens
gttttcagtattttattaacaaatgagcgggcaagaggacaagtgatctagtagtatcacccccaccctcatggagcagccaccacaagcccaccatggtggggggtgtccaacatgctctgctggcccagttcccagccgatcccctgagtcttggcgcccgtttagtcacccttcagctgcttgggaggcaggaagagacttcccctcttcacgaggtaagggagacaaaagcagccatttggatgccagggccacaggggcaagccatgccctatttctttggagggacagaatcacttcttcccaaggccagacactgtagcccatggtactcagccttctagaggagggtagcctagcagaggagaagccctgagtggaagcagcattttgaaggcatcgtcattcttagaccagctaagagctgagggcattctctatctttgccagcagacagtgagactccaggattaaaattaaaagcccgtggtgcatcctttccttgacattaactttccacaaaaccttggaggagtcaaatcccacactgcacatactccggtgtctccagctgtgaagtgggaccagtatcaatacatgggaaagtgctgagaaggaagaaaatatttcaggtataatactaatccatcaaacacgttttattcaagaagcttggcaccaactttgtgccacatcctcaactcttcaatgaaaagagcggtgaccaactcgctcccgttggtccctatggcaggtgttggaatgaggtgaggctggcctcctctgtttgctcacagctttattcctctagcttcagataaaaataattataataggcaataaagtctcttcacagtgtatttactgtaactacaacagctcgcaagacacattctttttctgcagaattgtagcgggtacttagggagtttgccgaccagaccttctgcacaggaagctggcttgcatcatggaggcagtggactcctgatagtcc

SEQ ID NO: 468840 - DNA, 1000 bp, Homo Sapiens; identical to SEQ ID NO: 338602

SEQ ID NO: 468841 - DNA, 1000 bp, Homo Sapiens; identical to SEQ ID NO: 338603

SEQ ID NO: 468842 - DNA, 1000 bp, Homo Sapiens; identical to SEQ ID NO: 338604

SEQ ID NO: 468843 - DNA, 1000 bp, Homo Sapiens; identical to SEQ ID NO: 158715

SEQ ID NO: 468844 - DNA, 1000 bp, Homo Sapiens; identical to SEQ ID NO: 158716

SEQ ID NO: 468845 - DNA, 1000 bp, Homo Sapiens; identical to SEQ ID NO: 158718

SEQ ID NO: 468846 - DNA, 1000 bp, Homo Sapiens
ttttttttttttttttctggaagacatctggtgtggagacctctctattgcacacaacgtcccagcgcactccactctccacccactcctggggcctctctgtcctcccttccttggccttgggtcattcgttattcctggctcgggtccactccgaggtcctccttagctgccagtcatcacaggggatggctgcctccacactgcctgctccagggactcgagtccactccacggagagccttgcccagctgtggccagcctgtgagtatcttggcccggcacaccctggctttcccggctgcaagtgcctgctccagctccagtcccagcccctcctcatggctccagctctcgggagaggcgggagagttcccgctggttgtcaatgaccttcagctgctggacataagcccaggtgctggctggactccgggtgctcagggactgctccgagcatgtggaaatcctcgccacctggctgtcctcgtggaggtgggaaactcggcttctgagtggtgagagaggcacagggttgtggcttcggcagtggtgcagcatccgcgcggctctggccatcattctcatcttctcaaagttgatgagattctccactagtgtgtggtttccctcatgaatgaaggtcatgtctttgagaagaaggggcatgaaggggatgacaggaggggagagcttggcgagggccagtcggtatacccggtggttccatgagggatccagcagcctctcgagggcggagtacagcttccggactttgtgaggcagccgctcccaggtgtgggctaggcggctgatggccgagttgctgaggccaaacatgacggcaaagaaggaattgagattcttctgctccttgaggtgggccgccagcttaatgaacttcctgagcagctgggcccgggggccgggcacggggcagagacacagctcggtggccacccagtactgcagctcattgaagcggcgcatgaagcgctcc

SEQ ID NO: 468847 - DNA, 1000 bp, Homo Sapiens; identical to SEQ ID NO: 158720

SEQ ID NO: 468848 - DNA, 1000 bp, Homo Sapiens; identical to SEQ ID NO: 338611

SEQ ID NO: 468849 - DNA, 1000 bp, Homo Sapiens
gaagttaaggcaacatttatttgatttccttataatcatattatctaaggcagaagtggtggttacttggcaagaatacgatttcttttaatgtcttctatagttgagttttagctcagaaatacatcatatttcactggttcaaatctgagagaatgtacttctagcatgggctcctattcatgatcaatgcatttttgtgtcaccatggcttgatcaaacttaatcactgtttcaatggcagggcatggccagttgtggcagctgctctgaaggtcacttgttttactgtggcctggccaagtagagtaaggatgggtcacagtgagctcactggtctcttcaggctgtgctctgaatgatgacagcaataccttggccacctccaatgcaagctgatccaacggcatattttccacctcgacgccttaattcgtgaaccaggtgtgcagtaattcttgatccagatcctcccagtgggtgacccaaagcaatggctcctccattcacattggttttacttatgtcaagatccaaactcctctcaacagccaagtactggggagcaaaagcttcattcacctctaccaaatccatgtccttaagactcagtcctgctttcttcagtgccccactgatagcagggacaggaccaatacccatgatagagggatcacatccagatacaaagtagcccacaattcttgccagtggtgtgaagttatgtttcttaacagcatcttcactagctatgataacagctccagcaccatcagctacacccgatgcattccctgcagtaacagttccatctttcttgaatactggaggaagtttctgtaactgttccagggtggtttggggccgagcatgctcgtctacctgcattgtctgttttcctttctttgtcttcacttcaattggtgccatttcatcattaaagtagccagcatcattagcagctttccatctctgctgtgactgcagggcatatttgtca

SEQ ID NO: 468850 - DNA, 1000 bp, Homo Sapiens; identical to SEQ ID NO: 338613

SEQ ID NO: 468851 - DNA, 1000 bp, Homo Sapiens; identical to SEQ ID NO: 338614

SEQ ID NO: 468852 - DNA, 1000 bp, Homo Sapiens
ttttttttttttttttttgcttcacattgcttctctttattttcaacagtttctttacaacagtctacacagggattaactcctacatgtacttcccaagccagaatctccctttagaaattcagattctatttctaactctataagatgtatctccccaaagatcacattaactcctcaagtcaacatctgcctatccccaacttcccctttttttcctcactgaacatttgtctgaatgttttttcctcactgaacatgttttcctcactcacactgaacatttgtctgaaactgtggctgctttgttgcttcaagatgcatgcacatcctggctttagtgtccaagtatgcagaatgaagcatttgatatgtgcacccagctagttaggcatgaaacaggggcacaggatgggctccgggtcatagaaggttctgtccccacagtgaggacaggggttggcactaagccagaccatgctgggccgccccaactcacacagcaactccctgagcctggcatgcagataggcaagcctctccaggtggagggtaccatggatgtcctcataactctccagggggacaggatacagcacgtgggtcagattgctcagcccgatgaggtgctgcaggagactctgcaaggcagatatggagatggaattcccgtagaagcttaaggttgtaagctgggagcagtggctcagggaaggcaggagggcaaggagctgatcatccgtgatcccacactcatcaaagaccaggtcctggagggtggcagaggctctctccagcagagcttggaggggctcgggacttacatcggtcagcatgaccccacttagactcaggacacttagctgactgacgctgggactctgggacagatgcatcacatccccttccgaaagccggcagttagttattgagagggtttccaaggggttcatcacgtgcctgagcaactgatccaggcggcctctaaggaaaaataaag

SEQ ID NO: 468853 - DNA, 1000 bp, Homo Sapiens; identical to SEQ ID NO: 338615

SEQ ID NO: 468854 - DNA, 1000 bp, Homo Sapiens; identical to SEQ ID NO: 158723

SEQ ID NO: 468855 - DNA, 1000 bp, Homo Sapiens
ttcttttacctcacaaaacacccatccaggttagacagagccgtaaacaagggcgatcgagacatggagaatttcaaatgcagtttattgcagcaaaacaaggaaatggggagtttaagacctctccacaaaagaaaaacaacttgcttacaccttatgtacaaaaccaaaacagcacagagataagatgctaaggagctgtccacaccctgggtctaactggtcctactctggctggcttaaggaggtgctttgaaatgtcatgtgggtggtggtcactgctgaactgtttctcagggaaagaacaaagcagggtcatagccaggggactgagattgccactgatctgaaaacttcattgggaaacagcagaaaagaaagagctgggggaataggatgagctagtgtaactaaccatagctcttttctccggtaaggctgggacaaatcgacctcggtcttgccaagcatatttgttagtgatgctgggggagaactagagctaatgaaacagagggcatctctttatctggttactccggaataagtggtagaaacaaacctcacgctggaactgccaccagaggacttgacacccccagagctggatccccggcctcctatggagcctccagagctcccgccgccagagccccggccgccagagctgccgccgccgccgcctccagagccacctctgtagcccccactgctgcttccggagccgtagctgccatggccgccgccgccacctccagagccatagctgccacctccggagccgtagctgctacctccggagccatagctgccacggccgccgccgccgccacctccagaaccatagctaccacctccggagccatagctgctacctccagagccgtagccaccgccgccacctcctcggctgccacctccactgatggtggtgtggcttgtgctcacagacacactcacgttcggggcacattctccagacatcctgctttcttctccc

SEQ ID NO: 468856 - DNA, 1000 bp, Homo Sapiens; identical to SEQ ID NO: 158724

SEQ ID NO: 468857 - DNA, 1000 bp, Homo Sapiens; identical to SEQ ID NO: 338617

SEQ ID NO: 468858 - DNA, 1000 bp, Homo Sapiens
gcaggacgcaggggtccctcttttacttcacaacaggaaatgtcacagacaccatcaaaatgggagggggtagggcacggggaagggtccccggtccgcggacgggcacagtggggagaagagagcaccagttctgtccggccagagggaggtgggccggaatggcagagtggaggtggggggttggtgggcaccgaagcccccatcccattccgtccaaggtgaggttcctgagtaacaaggggtccgggaggcctggcaggcctcactggggggtccggtttcttttctgcactcggaatttgagctggtgggggcgtccccgagggggctgcagagctggcctcttttcctacagtgcccaaatgccccggaaggtggcaggggtcagactgaaggtcttcaggctctttcttctccttcttggcttagggtctcctcggtgggtgtcccaaaagtccaaatagctcccctcctggggggccagagtcagatgccccgggccctgagggctgagcctcgatgcccccagtgggggtcctctgcaggtttcttgtgcgatggggcaatgtgtgtgcacatgtgtgtgcgtgtgggcgtgtgtgtctccgtgcagggctgagggtggggcgggcacagtgtcgaccagggcatgggggcagagcagtaactccaggcctgatagatgtgagtgtcggtcccctgccccctccaagactgagaagaagtgggccttgaagccctttttggacacggtgttgtcggacttgaactccacgcgcatgttgttgtactgggaggtgatgacctcgggcttctcagaaccacagaacttgccatgcagcttggagtcagctgtgagtccactgcgcacctccacgaagtcgtacttgcacacatcattgccctctgtctcaaagaagtcaaactgcagggagatgcggtactgggtgggggccaccagctgccagatgcagttcttgttgggggggtactcctt

SEQ ID NO: 468859 - DNA, 1000 bp, Homo Sapiens
ctggggggtccggtttcttttctgcactcggaatttgagctggtgggggcgtccccgagggggctgcagagctggcctcttttctgagaagaagtgggccttgaagccctttttggacacggtgttgtcggacttgaactccacgcgcatgttgttgtactgggaggtgatgacctcgggcttctcagaaccacagaacttgccatgcagcttggagtcagctgtgagtccactgcgcacctccacgaagtcgtacttgcacacatcattgccctctgtctcaaagaagtcaaactgcagggagatgcggtactgggtgggggccaccagctgccagatgcagttcttgttgggggggtactccttgggccagcccgggctggtgatggagccgttgagcttggtgaggaatccgccacaagcagctgcggggacaaggaaggtggcatcgtctgcggggagcccctgccatggggaagggctgagatgtgggctgagatgcagtaaggagaagatggggagcctgtggactccccaaggctcagggacctgtgtctggtccctctggggcggacgggaggaggcagggtggcctgggtgtcctcaggggtgggcctgtagggaggagtgggggagctaaggggtcataagtgtggccatttctatcttctctgcaaatgaacaggccaaggtcctccaagagggagtgagcgggaataagggactcagggaaagcagttcagggaggggcggtcctgggaggtgcaggaaagggagcagctcgggggcacagcaggatcggcctagtgagctggagccattagcctcggagtgctgtccccagcatctcgggaccatgcgtggagaggcggaaacagtgtctgtcccacaacaggggtttcccaacctgtagatcataacacccctcacagcggcgcttgtctggggccagctcgtacccggggtcacagctgcacttgtagctgcccagggtgttgag

SEQ ID NO: 468860 - DNA, 1000 bp, Homo Sapiens; identical to SEQ ID NO: 338618

SEQ ID NO: 468861 - DNA, 1000 bp, Homo Sapiens; identical to SEQ ID NO: 338619

SEQ ID NO: 468862 - DNA, 1000 bp, Homo Sapiens; identical to SEQ ID NO: 338621

SEQ ID NO: 468863 - DNA, 1000 bp, Homo Sapiens
tttttttttttgctgtttcacattttctttttattttcatttaaccctcagagcaaccgacaaagtagttgttattattacacctattttacagatgaggaaaaatagatcagagagattagataatttgcccatgttcatacaggtaataagtgacagtttcagaatttgaacccagatgtgtcagattctaaaggccttattctttagttctctactttacagtttcccattgtcctttgaagaacacatttgggcttgctctcagactcgccaacataaatcatcatttacatatcagggcatgtgtgagttccagcagttcactgaaataaaatccctgagccttaaccctcccatctcaaatacagtgaaaatttattttaatgataatgatggtaattttttatttgacactttttataatgctgatgttaaagtcaagaagcatttctctgtaatggaaaaaatgtctcatttttcttcctactgggcggtcagaagttggattttagaaaaaatatattgaatagggattataccgccttccttccttaaacctcataaagcaatggagtaggtggataagaagaaatagaaccaatttctggaaacaactttggagtaatgatcatagaagttacagatatccaagaatgcctaaagaaatatatctgtccttccatacccacgacacacaaataggatttatagttaggagagaaaggatagagtcagtcaaacgtccaaggttcttgtgattggtgccatgatagaaggattgagctttacgagcaggcttatgttctcctgagtttgtgggtgaagctctgagtcactggagatttaaggtcaaatattcatgctctcagaattaaggaggtattcttgattacacagaattgggaggtgaggaaatttcctctcttgaattacagcagtttgcattgcaccacatggctatggtagagatggttacgcataattccagcaaggtgag

SEQ ID NO: 468864 - DNA, 1000 bp, Homo Sapiens; identical to SEQ ID NO: 338622

SEQ ID NO: 468865 - DNA, 1000 bp, Homo Sapiens; identical to SEQ ID NO: 158725

SEQ ID NO: 468866 - DNA, 1000 bp, Homo Sapiens; identical to SEQ ID NO: 338624

SEQ ID NO: 468867 - DNA, 1000 bp, Homo Sapiens
acagtaaacaaatgaatgcattttacaaaataaaacatttcccttggaaagttgagtgaaaacaaatatgtaaatagcttctgtttttatagttaaagctttttaatctctggtgcataacaattgaaagaatgagaacttagacaaaagtatttggtggatttgagttaatgggccaagcaagctttttttccttggcttctctgtcaaatgagtcatagatcgagtctttggtaatagttttggccatggaagggatttctgaaatgccaacgtagttttttttggccatccttgaacttgttgtgatagtataggcattgcttcggtaacatttcatagaggacatgcaaaaagtctctttcatccctctccgaaaattggcattataaattgaatacagagtaggtttagaggctgaagaactaaaggatatccatgtgatagctgtgaaaacaagggaacttttcttatagtcttgttcatgggggtgccatagctgagctacatgaaaaggcagccaggagagcaaaaacaacagatttaaaatgaggaacatcttgatagttttcacttttgtccgagggacaatgttcattgtcctcctcaccgttcggccatctgtgcctattctccaaatatattttatgaccttttggtaaaataaaattatgaggacagatggaatcacaaagcccaccaagaagtggatgacagtgtaggcagtgccttcccaagaggaggggaggaaatagttacaatgactgtcccagttggagccatagaaaaagagcacaggggtcacaaagcctgcatcaaagatccacgatgccgcaatcattttcttggctttttctctggacaccttgaagctcagaggatagacgatggtgtagaaccggtctatgcagatggagaggagaacgtagatctggacacctggagtgagatattgaaaatatcgcacaaccttgcacgttgcactacccagcgtccacct

SEQ ID NO: 468868 - DNA, 878 bp, Homo Sapiens
tttatttgtgaaaagattaagaagccacagtaaatgaaaggaaacggttatttaaactgctcccttgatagtcataattatccagttgaggtgtttctttgagagaagaatatagacaccaggcccacgagggtctccgcatttattttcaaggccaaaggaagtgacccctcggaaaacaccctcgcacaacaaagggcttccagaatctccattgcacgagtctcttccacctcggaggcttccagcacaaaccatattcattccaatcacagggttaaaattatagtgatttcgatcattgcagacttttctgtctatgatggtgatattgacttctctcagagtatcggaccaagatgcactattgtgagtcctcccccaccctgcaacttggcacatggttcctggtttcacatcatccccctttttaggtagatgaaggatagtcacatatttgttaatttttgctttttccgtcagctgtaaaagtttaaggtcaccttcgcgtgtggctgggtcatagcatggatagggaaactctttcttaacaagcattatctgttttgttggctcttccctggttattgagtgagccccaagaatgacctgggaccttttgttcaagttacagtgagctgcagtcaacacccagtcttttgcaatcaaagccccagcacagatggtttttctgtcaagactaagtaggaccatgtagggtcttgaatgaggagttacttcatttcctccaataattttttcacagacatcttcaggaattagcaggagagaaacgacaactgagagagaggatgccagaaatctataggagttcctcattgtggctgctgtcccacatcaatcaacctgaaaatctg

SEQ ID NO: 468869 - DNA, 1000 bp, Homo Sapiens; identical to SEQ ID NO: 338625

SEQ ID NO: 468870 - DNA, 1000 bp, Homo Sapiens
taaaaattatacttttatttgagtcaccaggagaaagattcacttgtggttcaagtcaaatgttcagaatcataacaggccagaaaggtttgatcccgagcacaagcccacgagggaggggaccaaaacagaccaaaatgagacaacaaccccatataaaaagatgaactggcggcttcacacactcacacacatacacatacacacggatgaaatgtttggacagaggcaaatttcacgtggtcatttctgtttctttttaaatacaggtttgtagggtggtattttgttttttccagctataaaaaaaggcccaaaagtgcatgtgtgaggggggaaaggcagaaattaagcaataaagtcattttccctggagggacatgagagggagaaaacaggaggcagtgctgggagaacgcactttcctcaccactgggcttcttgttattcttagtattggcccacaaaagttatattcacattctagctttgatgcctctttcctgggattaaatgagctgaaagacctctgtgaactgtagagaagaccaggggctcagcccagcccagcccagcccctcagggctctgtgctcttctagggatggatggttttggtaaagaacagacgcccagcagcccccggtcactcagcaccagtgtgacagtccctcctctctctgggggtgtgtaagaaaacggcccctatttttaggacaggaagagtagagggagggcctgcagcaagattccatgactggcttgccttatctgggaaggagaattaagctgagtgaaaacaggctgcttcttgctgctcctcccttccactcaccactctcccaaactcaggtcctctaaggggatgtgtccctgacctttggtccccaaatccacattgtgctttgagatcaagaggaaacagaatgcaccagcgccacccaagactcccaagagattctctgcctccccgagcccccaaatcgcccaatataagatat

SEQ ID NO: 468871 - DNA, 1000 bp, Homo Sapiens
gagacaccctcagacattttattaggggcttagaaaggagtcctaggggataattctgttttcccatgagttatggccccaggaatagattagatctggacataggacaaggtgacatcaccctggatttccaatgtgtccaccctctggaaggccgagaggcgatgggcaaagtcaaagaggtgctggccattggcgtaaaccttgaagcgatccaagccacagcgaatggacagatcaaagaactgtccgggaccaaatgggttgtgggtgatcttcttctcctcggatccccacgagccattcagaaggctgttccggaccacggtaccgttgcccatgcggggattaatgtgcagagctatgtcccctgaggagcccaccttgaagttgatagcaaagctcttgcctgtgggaggcacatagcccttgatgatgatggttcttcgagctgtgagccctccttgcagcctcccgaaatatggcacaggcgggttgaaggttgggggtccttccatggtgggcaggctgttcagctgttgatggcaatgtccgggaccagggtaaggtggcatcatcgggggtccctggggccggaggggctggcctccgatgaagttgattgattgaagttgcagatccccatccacttgcaggtgggtgaccatctgtaggggaagccggtgcccgtactcatagaagggatttccatttaccaccaccttgtagtgctcagccaggactatgaagaccagctcaaaggcggcaccctttttgaagggcatgctcctcttcctctcctcgctgccccacttcccgccctgcaacgtgttgaagaccaccttgtcccagccgtcaaaccgcggattgaagtggaaggcgacgtctgagcccggatcctgcccaaccacaaagttcacgaagaaccgcttcatgtgctcgctggccactccttggatgtaaacagacattcccacgttgagcccgcccgggatgggct

SEQ ID NO: 468872 - DNA, 1000 bp, Homo Sapiens
tggcctgtaaacgtctagttacttatttggcagtgattccgaggtctgcttttggagggaacggtgtcacgcctagcatctttagtcagtcatcagatgtttttgagcacttctaatgtgctgtgcaccatgctaggtgccacaggggaccctcggaggcaggctgaagtcctggcccagggagcttacaatctaggtgagaggacaggaagaaagataaaggttaagggccaagacttgtggagggaagaggacaggtaacatccagcaagctggagcagaagggcatctcagcggggctaagtcttgacagaaaggagaagccactggagctgagtgtaagagctgggagggccgaggcagccaccctggggcctgagcaagctgttcatccaggggtatagagaggcccagctgcaaagaagggctgggactgggatatggagctctaagggaccaggtcattgaacttgcttgaaatggccctgtggaccaaagggaactttcctgtgcagcgcgggcccctaattcttcactgaggcccagggtgacaggtccagcttgtcgatggctgagcaatccacgaagtcataggggtagctgttggcccagaatgggtcccgtgggaccttggtgatgcgggtgttgtcacagacaaggcgtgagaaggacattttctgtagagagtccttctgctcgttcgtgaagaccccagggttttcccaccagaacctgtctccatcacggatctgctggaactgcttgcccaagaggcaggccaggagaggccccacccgacccctttccaccagcggctcagcaatggcccctatccagatgtcgatgttgtcaggggtcccgtagagacccagtaacttcttggccagcatcttgctcttcagcactgtgttcaactcctctagtgtctgcggctgtgagaggtcacagaaggctctccaggaattgtacccaggttgcccatggtcccggcaacgctgtg

SEQ ID NO: 468873 - DNA, 1000 bp, Homo Sapiens; identical to SEQ ID NO: 158726

SEQ ID NO: 468874 - DNA, 1000 bp, Homo Sapiens; identical to SEQ ID NO: 338627

SEQ ID NO: 468875 - DNA, 1000 bp, Homo Sapiens; identical to SEQ ID NO: 338628

SEQ ID NO: 468876 - DNA, 1000 bp, Homo Sapiens; identical to SEQ ID NO: 158358

SEQ ID NO: 468877 - DNA, 1000 bp, Homo Sapiens
tttttttttttttttttttttttttttcacaacaggcaactttattttagaatttgatccataaatcaacaaaataaataaaaggagctgagtctctctctattatgttagtacacaaaataaaccaaaaaatacatcaacatttaccatgagatcatttaaatgtatttgcaaatgatctgataagggaaacatgatttacaacacgggaaacttcttttaacaaccattgacttaaatgcacggcactgtaggtcacctagactaggttagcaagaatgagcaaagtggtaggtccaaaaggcaacctccaaacaccgtcctcaggtggaaactttggcaattatctgtggttaaaaaaacaaaacaaacaaaaaaaccaaactaccgattcctatccttaatcacgttggatggtcatttcgtccattcttctgcgttgagtccactgtaaatacttcaattattttgaagacactcaaaatccacagaacaacagactcttccattcttgcatttacaggttgtgcagggagatccagccatcgtccacactgagccactaagccgtgaaacaccatagctgtccaggcaagtttttctgatgtcataggtgatgttatcagctaggcaggggtcactgacacagcggggacaacattccccttctaagatagctgtatactcacagctcaagttggggcaagtgagtggccagcaatctacctctccttccagacaccgacactgctgacagctatgggtccaattgtctccacttcgatacagcttgtgaccattttggtctaaacattgacttgtgactctggtgtcacattctgggcaacagaataggtcagcacttggattctggcaatcacaagctgtccgtcggcagaatatcttgccatccttgcaggagcagacagaacacctgtcttctttcaaggtccacacctggccattgtgcttcagccccccttcatgaggacagtcacca

SEQ ID NO: 468878 - DNA, 1000 bp, Homo Sapiens; identical to SEQ ID NO: 338631

SEQ ID NO: 468879 - DNA, 1000 bp, Homo Sapiens
aaggtaagagaaatatttatttaattttgcacaagaacgagcttatactgaacaaattcaaccaaataatattaagtgcagtaaaacaaggaaatagggatgacttttcctgttagaaaatattaagtaaccatgcctgtgcattatttttatcattacaataacttgtttcagatttcttttcagagtgtactgtacataacatgttatagcttctttgctttacttctgaaaatataattcattcactgcctgacattttatttcttgcagtgaggaacctaactgattctgaagattctgatctagaggaaaattttctgcaccagtgaagctagaggctttcacagatccaatgggctcaggctttctatccagggttcaggatgtcacggtatatactgtacgcccattcttctacatggtgatgtgagacacagtagaggcagacttgaggtctaattttgccccagtaattttccttttgtgattttgtcaagctccacaaatttcataattgaaagttcactcagctattaacaaagctgcatttagctgcccacaaatcacccaatttaagttttaacttctttttggtcttttaatgaaagaacattcttttaacagaaatctcccatgagacagttaacttcacagttcctgaaggcactgtggatccactgagcaacagatgtggccattcttgcactggcagagagtacactcagtgccatgtttgatccaagaggacccggtgaagcgaaccacattcatttcgtccaggcaagtcttggtgatgtcattgcggatggtgtcagcctggcaagggtctgtgacacagcgcgggcagcactcattctctgggagaatgctgaattcacactccacatctgggcaaggcaggggccaacaatcaacttccccttgcaagcagcggcactgttgacaattctggacccaggtgtcaccactgttatacaaagtttccccattttgatgg

SEQ ID NO: 468880 - DNA, 1000 bp, Homo Sapiens
ttttttttttttttttgtatgtttgtttgtttaaaaaaaggaaaagggaaaaacggattctagttacaaattgtcttggcctctctctttcctctcaatccacttcccctcccgccaaaattaaaatcgcaaaacgcggagactggaggttgggggtgagggcgttccaggcccgggctccggcgccctaacttctaccctcttcaagaaagagggagcgcctggctcctttttgcctcggcagctgggtgtctgtttttaaaataataatgagagggggaaacgcgttccattgctcagctgcccccttaccaacgccttgggcctgcagggaggagggggaggaggaaacctcagcgaagatattgggaatgggggaggggtgcctccagggagcccccggagagaggtccctggagaagcactccttgggagagaggaggagggaaccccttgcggagagagaaggcgagtcccctgggggaagcgaggcccctgggacaggccacccacaggtaacaggactgcgctgccccaggagagcggcaggaccggtggcccgctccccgcgcccggcgccggggtaggatgggggtgtccctgcgctctgggggctggggacagggggggcgggcaaaggcaaaagaaaaagaagggagccggcgcgaagtctcagttatgaaaaaacgcattgagctcctcgtacatggggccccggtcgtggtgaaggtgcatatcgtaagacaagagattctccgagtggacgcccccgcgcacagccgacgagccgaagactagcccgtggcccgtgggccgcgaaccgggcagcgccgagtagtgcatagagtagtggtagcttttctcgtggtcgggcgaggagtcctgcttgagtgagaagttgccattgagacagagcggggggctgagcgggccctcgtactcggagctgttgtagtccgggctcgcgccgccaccgcctgccgccgcatacagcgtctcg

SEQ ID NO: 468881 - DNA, 1000 bp, Homo Sapiens
tttttttttttttttttttttttttttttttttttttttttttttttttttatttttagtttttatttacatgaagcgtctgcagtacaaaaatgtaaactttgatagctcataatagaataaactctttatgtacaaaaatacattttcatatgaatgaagcatcttgaataaattaaagtactctccagccctgtgcctgaatagctaagcaagagtctccagttcttcctagagcgagtctgcagtggtgggggtcgggatccataatgcatgaagcccactccttgtctctgctttttaagccttttcattgtattgtcagccggctcaaaccgaattttcatgctcgtttttcttcattagagttctacaaattgtaaaattgacttttcacctcgtcttcaggggctgatctgtcccttttctaaatcacactgaagtggtggctggggtcagttctgagccagtcacaaaggaggttttgtggagttcagaaagtgcaaaaggaaaggccgtctaggggcgggcaggaggggcgctgggctgagggccggagaaacagaccaagagacatccgccgcgagggtgcggcgacctaacaagcggctcaggtatccccgactgctttaaagctcccgcttcctccctccgcctggagagggggtcccgaggcggcagctggggccccatctattgcctgctgactaggggagggggaaagtaacagtgtctacaaagggcctagtggtaaggaatgaaacagggcgttgtgtggagcaagtctttgggcaggcttgggaaggagaaaacagggtcgccggggcggtaggtgaagtcttcggaggcggctgggctactggggtcagagagcggggaggcggcggcggcacctgagccccaggactccgcgtcgctggcggggcttgggggaccgggcaggcaggggacgcactgcggcggcaggaggcgctcccgggcaccgcctccgggcagccct

SEQ ID NO: 468882 - DNA, 1000 bp, Homo Sapiens; identical to SEQ ID NO: 338632

SEQ ID NO: 468883 - DNA, 1000 bp, Homo Sapiens; identical to SEQ ID NO: 338633

SEQ ID NO: 468884 - DNA, 1000 bp, Homo Sapiens
ggaattccggttctgcaatttcaacagaatattctcctagattggtagagagcagaccttggaaccctggagtgaactttctcagggtgctccactatggcacgtggcagcagaatccaggccacgaatccaggccaccgttgccatcacccctcgcctggctgccttgaacaggcaagcttaaaacaatgatgcaacctccctggtcccttctcagccagagcagaccaggcatggtctttcacggaagccatcctctctcataatcattgttgctcaggtgcctgtttaggagacggagctgtagtcacaacaacagtggagactgctttggaggagccagaagctgttccctgttggagatgggatgcagggacagtctggatgcgcacctgtgtggcctgaccttgctgctgaagctgctgcaactgctgagcagtgaggaaactaacaggcttattgccagcaatgagcttagtgcctgctggcatagttgtgaggatgatgttgcggcccaacccactgaggttggctccaaggttgcctttgatgatgggggctgtgaccacgctcttgcccttcattggctggctgatcacagagaggggaactgtgatccgtgtaggcaacttcccagcctgggacgtggacacaaccgtggtgctgacagggacctgccgcacggtgggggctcctgtgctgatgctgatgggggtgcttgcagccccagaagccacagctacagtcttggacacagcagcattcatactgggtaaggacaccgctgaagtatggacagttccagacccactggccaccgaggccccttgcttggcgtgggttgcaacggtgatggtctggcctgctttgggaggcatcactcccagtccctgcacgatgcggatcgtggcagctggttttgcttctgaagaggccactgtgctttttcccttctggtcagccacactcacgccaagagctggcatcaagcgaaaagccg

SEQ ID NO: 468885 - DNA, 1000 bp, Homo Sapiens; identical to SEQ ID NO: 246466

SEQ ID NO: 468886 - DNA, 1000 bp, Homo Sapiens; identical to SEQ ID NO: 158729

SEQ ID NO: 468887 - DNA, 1000 bp, Homo Sapiens
cggcgttcaggatgagctctccggctcggacgcgtgcagtaggaggccgccgccgccgccgctgctggacttgtgcttcttcaacagctgcgtgattttctcgtcgtccgagttgggatccagaggcttattgtagtcgtcgtcctcttcctcgttctccgaggcccccttgaggcgctctgtctccgagtcctgcttcttcttggccgtggccatctcggcagcgtgcttcttcctccacttggtccggcggttctggaaccagaccttgacctgactctctgtcatccccaacgaataggccaaacgagccctctcgggccccgccaagtattttgtttgttcgaaagtcttctccagggcgaagatctgctgtccggaaaaagtgggtctcgtgtgttttctcttcccgtctttgtccaacaaaatggatccttgatgaggggtacaggccaggcgtgcgtccctccagggcgggctctgcatcactccgggccagaagatgggcgtccggccaggcagctcagccagcggcttggggtaccggcccacggcggccacggccgcggcgctggggctgaagtagagcccgggcggcggcggcggcgggctcaggctgctaaagcgtggcagtccggccagcagccccgccggggatgaggcggcggctgcggccgcggcagcagccgcggcggcggcagaggcggaggaggcagaggcggacgaggaagaggaggaggaggaaccggagggcgaggcggagggcagggcggcccccgaggccacgggcatggagggccggctcaggatattgttgatgccgtgtggggtggcggccgagagctgctgcggggggctgccgagggatgagagcccccccgtggccgggggcttcaggccgcctgggttgtgggtgcccagaggcggggagggcgacgaggaggacgacgacgaggacgaggaggagggggggccggcaggcagcgggggatacgcggca

SEQ ID NO: 468888 - DNA, 1000 bp, Homo Sapiens
tgacaggtcaaaggaattgctttaattgaggtcacaggcatcacaggggtctgctcagcttcctcgccaccagggagaaaagtccttcgttgttggccatggtggaagaataactttgcgagatcacctcaaaccattcgattgtgtagccagcctctttcacagcagcctctactgcctcccggcccagggggaggctggagaacttctgctcaccaatcatgtagtagctgctcttgagcgcatccatgatcaccaggaagccccctggcttcagtaggctgccgaggttcctgagcgccctgcagtaggtggggaggtctgggcaggcggcatccagacacagtgtgctgagcacgcagtcagccgggggtaaggggacggcccccagtggctggctctgagtcacatcacacttcagcacctgcttgaccgcctgtctcaacttctcctccttctctggacccttgactctgttcccttcaagatcacacacataggtcaccactggggaccagtcaaaggcctctggctctttcttcagccacttctccagctcctgcaggttctggtctgagtagtcagtgacgacgatctccttaaaggattcacaagcagagaggagctgatagatagtggggccagagccgatgtcaatcagcaggtctcccttcacaccgtctaggcagaatatcttgaaaagatttttcagaaggtgcttaagaatctggctttctgcagagtgcctagaaccaaacttgtaatatttttctaggtaatcccgagggttaaaatggcttagataggtgtccttggaggtgaagcctgattccattatgtctcacttctgtaccactggagcactgccctccttctctttcctccagaagccagggagtgaccctgcagaagttgtcttcctgagtctcaggctaacagcattccttccatcagttcagcccttcttttagaacagatggttggttaaacactaacagag

SEQ ID NO: 468889 - DNA, 1000 bp, Homo Sapiens
tttttttttttttttttttttttttttttttttttttttttttttttttttttttttttttttttttttttttttttttttttttttttttttttggttagatataacttttactttcaacaaaaaatacaattcatttgtttataagacaacatggaagtggaaggtaatacaaccttctaaagtgaaattacagattggattgacactgactgcacaactaaataaattaatcctactataacacataaaattatcttccatatattatgaactgacatttgaatccagaactctttcacataaattaaattccatgttaacaaaatttctatttattatatgtaaatagttatcataaatatattttatatgaccccagcatttgttctttccttggtaaacagtgagaattattacatatgaagacagtgtataagggacactaaatcagctttaatcccattattaagaaacccatatagaattggattaagacaacaggacatcatgcccaacaaatgacaaatgcaatacaccaacttgaaatgcctatttgaaataagattgtcattaaaatcagttaccacatggaaaaggtgtagtggcatccaactaacagcaaatactaatatcagtatggtcagtctgtagaaaacacttcgagatctcttttttattcttgtaacagaacgttttactctcaattcatgaacatctgaattttcttcaggttttatctcaaagcaagtggggacccctggtatgaacttactggatgaagagagctgacttcttacagagccaaagttttctggaagtattctggagtggttctcttgagaaggtctttctggagcaggtaacacacatgctgtcttcttgctatatcttcttctgtgttttttgatgaatgaataactccatttatggctgccagagagtttcacctgaggcccactctttttggatggatgaagagttaagttgatcatctcat

SEQ ID NO: 468890 - DNA, 1000 bp, Homo Sapiens; identical to SEQ ID NO: 338634

SEQ ID NO: 468891 - DNA, 1000 bp, Homo Sapiens; identical to SEQ ID NO: 338636

SEQ ID NO: 468892 - DNA, 1000 bp, Homo Sapiens
ttttttttttttttttttttttttattatatcatcatcattattaccctcaagttgctccaggagaactcctattcaacctccaaaaccccatgtggtttcacccatcctgcagagattgagctcaaaatcagagaattgtgattttgtgattatttgatgagttcccaaactggggtccttagatcagctgggccatccctgaggtctctcagcatccagctctgttattttcctgggcatgggtctcaggcccggccagtccggctgaggagtgtgcagacgcaggcagtgtcaattcgaatccatcgccagcccacacggccctgggcatcagcggtcaatgcccgcacataggactgcttggccttgcactcagatacccagtgcctcctgtccactccccggcagccccctccacctgcccccgggccaccttcctcagcgttatcagccttgcagcgggtttcaaagaagtactggcggaggggactgccgccagctgcaggcacctcgcccaacacctccacctcgcgcccacgcaagtccacagcggtccggcggtctgtcacccagccactgactgcatcgcacacagccagctcaccccgacgactcgctggtgcagtttcgctcaccccacgccggctgcggttggccggggcacctgctgactcccgaaaggccccagcctccagcaggaagagcagagggggcccagcaggggcacccctagacaggactactcggggggagagaaggtcccactcaggggccagaaaagggggcaatgttgagggtgggggttgggactcaattggcacactggggaggaggaaaaggaggaggatggggagggagcatgaggggagagggagcatctctcggagcacctgtcagcacctcctccgcctcggagctctggggctgggagtccccaggcttcggggggcccctgtggaggacacaggtggccccctccttcctgacatctcaggaga

SEQ ID NO: 468893 - DNA, 1000 bp, Homo Sapiens; identical to SEQ ID NO: 158731

SEQ ID NO: 468894 - DNA, 1000 bp, Homo Sapiens
tttttttttttttttttttttgtatgatgccatttatatgaaatgttggcaatagatgaaatacacagcagattggtggtttctagggattagggagagaatgggttggaggaatggggaatgactgctaatgggtttcagggtttccttttagggtgatgaaaatgtctggaattattatgatgaatgcatctgtgatatggctctagttatgaatatgctggatataagtcttatgaatagacaccaagtataaatcttatgaatatactcacaccactgaattgtacactttagaagggtgagagctttatggtattgacttgtatctcaataaaaactttttaaaaattaaacacacacacacacacacacacacacacacacaccaatttctttgcagtcctgcatttcttaggattcagttctggacttggtcttcactttctctgccttctggctgcaagaaatgcaaccctcttttaccaccaaggaggccctctggctctctcacttagctttcaattgctgattgattgcatttagctttttactacttttttccccagagtcttggaaagagccacctaactgcattggtctatttacgtaccagcgccatgctgtttaagtatcagaggcttcatagtatgttttaatattggctaagactaggccctgctcagaactcttctttccctgtgttttcctagctattgcgtgtgtatttttccataagaactttagcgtcaacttacctggttccatcgaaaagcatatgtgggtgtttttagggtgaccattaagcctatcaatcaactcagggagaactgacatctttatgcagtcaagtctttccatccgagggtgtggctagaccgggaagcccccaaaagttacagtggggccaatatgccaacaccagggtggccattgccaaagactgagggcctggaatgaaatacacccctgttcagatgagcaagccctcctctctgcc

SEQ ID NO: 468895 - DNA, 588 bp, Homo Sapiens
tttattgggtgatttttagaggcattgcctgtgggggaaggggggcttacagaagttgtcagggcatatacccacacaccaagaaagtcatgaagtgactctctcgtgacctcgctaaaacaatgagcaaactgcagaaggttttcagggaaaattaacaaattaggtagggatgggatgtggggttccccattcccagggctttggaatcttccaggtgattatccctttctctcttttctccagagactggggcttttaagaatgcaccatttcctggaattcctctgctccaattttcccatctccatcattatccgccgcagccatcaaggacttggtttctgactcggtcagttctctggcaccactctcaaacttctggaggaaaaacttaagctcttcttcatccaggtacccgctctggtcgttgtctatgaaccggaaaacatccttcacctgattggctgacatcttggagaggcctgatgtctggaagaatttttggggttcaaaagtgtctgggtcttggcattcctggagcgctgctgcaatgtcatcagcactgagcacgtccgtgatgctcat

SEQ ID NO: 468896 - DNA, 492 bp, Homo Sapiens
tcagagctggttaaaaaccacggaggccttgaggttggcgggctccacaccctcgccaaaggtgacgaggaagtacatgaccttgcggatcttggccaggtccgacaggcgctccccaaactccagggcgtcggcctcattccaatctatggcatccgagtcctccttgcgccagaagatggcagtggggtccagcagctggcgtgtcatgaggttggtgaggtcaggcgtccagttctgcgaggtgcctgtgatggtgaccttgcccggcttgtccagcacgacattccagcgctcgaactgtagccgctgctgctgggtgaagttgaggcggtacacagactccgctggctgcagcagcttctccccatcctggcgcttctccccgcgctgcttcaggctctccacgcgtagccgcatctgcctggtcaggccctggtccaggaccagcggcatgtccagctgcggctgctgcggcctgtcctccgccat

SEQ ID NO: 468897 - DNA, 1000 bp, Homo Sapiens; identical to SEQ ID NO: 158732

SEQ ID NO: 468898 - DNA, 1000 bp, Homo Sapiens; identical to SEQ ID NO: 158734

SEQ ID NO: 468899 - DNA, 566 bp, Homo Sapiens
ttttttttttttgaattcactcatcgtaacttcattttattacaacatcaaggaaaatagttgcaggaggaatgaaaatggagagaaacatagagattaagctactcacaattccattgtctataccttcctacaagggtataaatatcacaggtttctgtacatgcattggaggtttgctatgcgtgtgtggattgtgtgtggatgacttctctctagggtgttgttcttttaatttcttgacagatgatggttgaatttggtgttttcaggtggactaggagggggttctcccactaggactgagacccagccttcttcttctggaattttctgaactgagactgaatggccaccgctgcacgttctgtctctggtgcatccatgtcaatgtcaaattcttcttgaactttcttctgtccatcattttcaccagatgtcttgtcttttccattggttgccccagcaccttgtcgctcactcatgttggctctaactcaacagctcagtcccgccgctcagcacagagaacactgctcaggggtcgctgctccaccggttctggc

SEQ ID NO: 468900 - DNA, 1000 bp, Homo Sapiens
ctttttggcttttttttttctttttaataatatggaataatctataagtctacaggaacaaagaaatctaagatggctgctcagccttgaaatgtacatgttttgcagcaaagttgttgaagaaccttccgttggcacagattgttctttttcacaagcatacagaagcctccttccgcccaggactcttccgttgcatccttgcaaatggctcccatttgacacattcctaagtctaagagatacccactagggcagcttgtacagttcttgaatcctgggccattgcacgtcaaacaactgatatcacattttttgcaggatttgtatccattctctgaagagtggtcaaagtaatagctgatactacagctctgcacgcatctcccatcctccatgaagtagccctctgtgcagttaatgcacccatcagctcctgccccagcacaagtggcgcagaagcggtggcagggctggcagtcctggccgttgaaataccgtccatcttcacaggagacagagcaccgggatccctgcaggcttaacccatccctacattctgtacagttatggaattcagtacatgtcttgcagttttcactgcatttccggcaaagatttttcttggtatcctgatatgacccatcagggcagtgagtaacacagctgttggtttcttcattcagaaagtatccatatttgcaggacatgcattggtcaccatggctcccaaagcaggactcacagttgggggcacacttcctgcagcgcttcttgtcggcgtggtagtggccaggggggcagctggagacacagatcctggtattgtttttcagcttgtagtagtagtgcaaacagtcattgcagtggtctggtcctggcccgtcacagccaacctcactgcactcagggtcgcagggacctgcataatcctctgtgccatagtcgtctgtggggtcttcaactcggctatagcggaaccgttccactttcggaaatt

SEQ ID NO: 468901 - DNA, 1000 bp, Homo Sapiens; identical to SEQ ID NO: 338642

SEQ ID NO: 468902 - DNA, 1000 bp, Homo Sapiens; identical to SEQ ID NO: 338643

SEQ ID NO: 468903 - DNA, 1000 bp, Homo Sapiens; identical to SEQ ID NO: 338644

SEQ ID NO: 468904 - DNA, 726 bp, Homo Sapiens
tttcaaggtaaatatctcctttattaaatatgaggaggtggggagtgacataaatgttgtcttaaaagtctactattaatcataatgaatgcctagcaaaaatagatttaaaggacttacagataaacaaaatgtagagaaatattgatgacttctaactagctggtaggaaaaggtggtcaagtttgaaatgcatccactattttgagctgtactgcaagagagattctgacagtaagagaactcttagtagtaactgatagggaatgaccttgaaagtcaaagaaaccacttccaatcagctgaatttcaagactccggcagatcaacagggcaaaagcaaccaaaattacagcagatgtcattgagagtggcagaacctctggcacttcagataatcccaaactgagcgagctcatgcaattccaggtggctgaatgcctcccatggacaaatcactgtgatatctgttcctagcccctccattcctggaatgtcatctccaaatcctttcacacctttctttggaggtttactcttgaattggcgagtctgcctctgcttgaacttgggagggcctttgcgtggggtggtaggaccctggtttgaagctggagcaggcagagtagtgttgtcactcattttaactccccccgggcggctgatgtttccctttcagcctcggagctgaatgttgttcctatcagctgcccagctgccttcttt

SEQ ID NO: 468905 - DNA, 1000 bp, Homo Sapiens; identical to SEQ ID NO: 338645

SEQ ID NO: 468906 - DNA, 1000 bp, Homo Sapiens
aaatacaaatacaaagtaagattttataataggtaagtatattcaaagatcgtccctcaaagttgaactcatttgaaccattaaatctaaagaaatccaatcaaaaaattaaaaagaaaacacataagattaataacttggattttgaggggatatacagcaaagattgaaacaaggtctcagaagtattttggcttctgttaattttttttttgattacaatgaaaagaaatgaaactccaagttaaaagatatccagaaccactttaaaattctcataaagatagtcacataacatgggctaccccaaccctactataagtctactgtttgcccaatgccatcaaggtttattaccaatagtaagaaagattcaaatatctggtatccagacaatgttcacagctacttctcctttaagagaagcagaaaggcagttttaggtgtggtctgtctttattcccccgaacttgatcaatgtatacaatgcttacacattcaaatatgtgcaagattcaacaggaacactctccactgctgtgctgagtacgcaagtttccctgagatgtccgcatcaccgagggctccgttctaactctggtcgacagtttctgaacaatgcaatagtgtagctagaggactatataaaatataaggttctctcaaaaagattcatggtgtttggggataaaaaacatatcagtcttcttggctaaaggttggcaaatgtgttttcaactttaaaatgtctgaaactggctcttttctttgttgatagaagctgagtccagtgatgtgctcaacatctgtgatccgtgctctgtgtaacattaacaattcttcaacccatgaggagtcatgcttcccatgcacacagctctcgctgttatcagtcctgtgaggcaaaatgaaagctaaggtgtctaggttttcacagtgcaaaggcgtctgagatgtatctttacagcttgttagcacaataaagaagtgagttggaatc

SEQ ID NO: 468907 - DNA, 1000 bp, Homo Sapiens; identical to SEQ ID NO: 158735

SEQ ID NO: 468908 - DNA, 1000 bp, Homo Sapiens; identical to SEQ ID NO: 158737

SEQ ID NO: 468909 - DNA, 1000 bp, Homo Sapiens
ttttttttttttttttttttttttttgagacagggtctttctctgttgcccaggctagagtgcactggtgatcacggctcactctagccttgaattcctgggcccaagcaattctcccacctcagcctcctgagtagctgggactacaagtgtgcaccaccatgcctggctaattttttgaatttttgtagtgatgggatctcgctctgttgcccagggtggtctcgaactcctggcctcaagcgatcctcccacctcgacctcccaaagtgctgggattacaggtgtgagccacctcgcctgggcccccttctccatatgcctccaaaaacatgtccctggagagtagcctgctcccacactgtcactggatgtcatggggccaataaaatctcctgcaattgtgtatctcagacatttgtgtctttgatcctcaccctgtgaccctaagggaagaaagcctgagtgtcagtaactctgggcctcccctaaagagaaatggagatggtggctcatctaggaagtagaggagcagggggttcctggttctcaggccacgtgtgatctctgcccacccagggcctgccccagcctgcaggtattgctgtgtggtgggaacacccacttcccttgtgcacagcctttgagaggggatcgtggcctcagttccaggggttcctggccagggccaagtgctccttctgcagaggcctgcacgcatctcacccctttgacttgtatttccatggcttcccctccccacctgccccctagccctccctgactggccagcccctcagtagtcctcctcggccagggagaggagcacggccttgggtgtgttctcgaaaagggctgcccggttctgctgctgccccttcttcacccagtggccatagattcggaaagcgtaggcgtcgatgagccggcgcagaggccggagggcataggggtctcggatgacgatctcccgggtcacaggcttcacccggcggtactg

SEQ ID NO: 468910 - DNA, 1000 bp, Homo Sapiens; identical to SEQ ID NO: 338650

SEQ ID NO: 468911 - DNA, 1000 bp, Homo Sapiens; identical to SEQ ID NO: 338651

SEQ ID NO: 468912 - DNA, 1000 bp, Homo Sapiens; identical to SEQ ID NO: 338652

SEQ ID NO: 468913 - DNA, 1000 bp, Homo Sapiens; identical to SEQ ID NO: 338653

SEQ ID NO: 468914 - DNA, 997 bp, Homo Sapiens; identical to SEQ ID NO: 158739

SEQ ID NO: 468915 - DNA, 1000 bp, Homo Sapiens; identical to SEQ ID NO: 338654

SEQ ID NO: 468916 - DNA, 1000 bp, Homo Sapiens; identical to SEQ ID NO: 158740

SEQ ID NO: 468917 - DNA, 1000 bp, Homo Sapiens; identical to SEQ ID NO: 338657

SEQ ID NO: 468918 - DNA, 1000 bp, Homo Sapiens
cgcatcagcaagtgccaggctttatttacaatgccgacactgcagggaatgaacagcctccatctgggcctctctggtcaaaaccacttttttgagtcaggggcccagccccaggcctcccaggtcatcgtcctctgccccgaagcccgagaagctgatgggctggcaggccaggctgcgcaggttcacaaggcaggcggtctgcgtggcactgaagtcagggacagtcaccaacagcactgtctggtcctcaggacctcggatgattttggagccaaagctgggggtgttgccacaaaagtagacatgcgggcactctgggaagatgaacgggtcagttttgtagaaggggtaacaacctagagtgtccggggctgtggggctgatgtgacggacccgcagggtccactccaggatctccaagtgatcctccatgctgctgtatcggaaaatgtcactcacgttctgtcctgatgtccccaaaaatctgactccatcaatggtggcctggtaggggttggtgaccagctggagcgtggagtaggcagtggccagcgggaacatgcaggggtggaggggctgctgggggagcgtgtaattggtgggatcaaactcgcctggcatcacgtccacgggcactgaggcgctcagctgcaggaggatctcatccagcatcttaacagcctccacgctggctgcctgggttttcttggtgaggtatttggccttattgatagaatccctgctctgggtgctgtggctgaggaggttgccagcgaggataacccgggagacgtgggcggcgctgcactgctccccttcgtccccaagctgccccgtcaccacatccaccagcagctgggtgcccagcaggctctcgcctccaccgccacccaggcccaggccggacaccagtagcacaaacctatctgtgtcaagtgggggtgcgggcttctggggagcaaggtcagcaaagcaatagtcctccaccagaaacttc

SEQ ID NO: 468919 - DNA, 1000 bp, Homo Sapiens; identical to SEQ ID NO: 158742

SEQ ID NO: 468920 - DNA, 821 bp, Homo Sapiens
acagtaaatggactttttacaaaaaggggaggggcagtctgaaaaagtaaagtttaatttaaaaatcatatacataaagcttctgattcattttcagctctcccactgtgtctttcacaggcgagtcagtttcccattgagtggaggccagttaaagatgccgccacggtggacagtgagccagcccttcctcaacaggtgagcaagagcggctgccactcaggcttgaacaatgcccatgacctgagtgacttggcagagaggctggcttcaggcgaggttcagaaggctagcttcttcatcaggagataaactctggagtccacctcgaatccatgcaggttgttggcatccccctgcagcctcatgagcaggcccccataggacacgtacgcagagaggcgtgttgctgcttcagtagaagtttcatctccctcaatcctgtacacttttccatacattacatactcaaactggtcagccctggaaggcctatcatcagtggggttgtattcaccatcatccagggtaccatcttcatacaaggtactagctatgaccaaccggaacttgtcacccaagtctacagggtaaatttgaatgtttacatctaagattagatccatcttgaaagattcactctcacaatgcagtcgagacactcggtcaaacttcttgccctccgggtcaatatccttcacatcgaaaatatcctcaaacaggatgcccgccatcgcgagggggccacgagagcagcagaaggggtgagagcgcgaccacagttgggagtacgtgcaccccctagcgtggacaagaccgga

SEQ ID NO: 468921 - DNA, 991 bp, Homo Sapiens
tttttttttttttttttgggccgatgggggtgggggggggtctttcagtgaatatttttattaaactctactgtggacaagaagcctgtggaaaggtgtttcgagttatgcaggaagaagtgttcctgctttgactgacaggcaggcccaggagttgaggcttctagagcagagactcttgggagctcatgggtttgcacacttctctccggctcagcacagcccccgcagcagcccctggaccccggatctttggtccagaatgaattcatccctgccagccggacgcccctgaaacaggtcatctgcctgcatcaagcctgacaatccatttgcttgcgaagtcaccgctgctcaagtccacatccaggtctctcccgctatactttattaggaatataaaacctaatctatgtacaggacacgtcggtgtcagggtgaggggtggccacaaggcgggccatggctgggaccggccgctctcctcggtgtggtacctggagcggagggtcaggcacaggtaggaacggggctcacaggccgagcagagccccctctggcccctactcaattccttcctgcttgtcttttatggccacccgaaagcgctcctccagcagggacagctcactgatgaggtcggtgatggcgttggtaaaggcttcctgggggctgtagtccggcgtggtctgcactcggatgatgatcttgtgctccaaggggtgggggactttgtagccagcaaatagcacttgcgggtcttttaggagttgtgatttaatgatgtttcccagtgtgtggtcttctttgttgatggtgaataaacaggcattgggtaccttggtgtccttgttaatggtgatcttcttctcgccctcgaagagcaagaacgactcgaaggctggaggggcgttcatgctcccgccgccgttgcgtccagaccccaagggtccgccgccgccgccaccagagccctaataagaggcctctt

SEQ ID NO: 468922 - DNA, 1000 bp, Homo Sapiens; identical to SEQ ID NO: 338660

SEQ ID NO: 468923 - DNA, 1000 bp, Homo Sapiens; identical to SEQ ID NO: 338661

SEQ ID NO: 468924 - DNA, 1000 bp, Homo Sapiens; identical to SEQ ID NO: 338662

SEQ ID NO: 468925 - DNA, 1000 bp, Homo Sapiens; identical to SEQ ID NO: 158744

SEQ ID NO: 468926 - DNA, 1000 bp, Homo Sapiens; identical to SEQ ID NO: 338664

SEQ ID NO: 468927 - DNA, 1000 bp, Homo Sapiens
ttttttttttttttttttaaggcaaaatacaaacatagactttattaaatgctgctcaatcccccaatgaagatctttcattacaaaacagttttccacacaactgcaagttaagagattggaatggtactctgataacaaaagatgtgagaaatacttgaccaagtaaaaacatacaagacctctatatagtcaaccttttcagagctctacagaggaagcctactgcagttcctttaaataaagccaggcagtgacaactagtgctctgtatcaccacactgtgggactcaaagcctccatccctgggtcaggagggactaggtgaaggacaggttgtgaggactggaaaggccctgccttcagcctttgagaggaagaggaggaatgaattgagaggcaagctgggtaattcacctgagctgcctctacccatctgttaccactctggagaattgcagaggaagggggatattcatgaggaacaatctgaagaattttggtttactttcccagcttttatttatattttgtgctttaaaaagcctggagatttaaggttttgcctaaattccagagtacagtaatgtatttattgagggaggggttagggcaggtaattccccccatcatatttctgggtgagacaaagagaagggtaaggatgataccttagttttattttaggaagtattttttcctaggatgtaactaaggtttgcagcagtgtgaaaagcacattataaaagggaaaaatatacagagcagactaccatatctatgtgcaacacaatcaaagaagaattcaagtcataattcttaccactcccataattatctcactcatatcatagatgataaaattcattcatttctgtgaaacttcagaagtgacacaataaatccaatgattagacaaaggttacaatatactatggccatgatacagcacagggctacgtttagtccatatatttttccatttacagttgccagaaaa

SEQ ID NO: 468928 - DNA, 1000 bp, Homo Sapiens; identical to SEQ ID NO: 338666

SEQ ID NO: 468929 - DNA, 662 bp, Homo Sapiens
gaaattgcaagctgattgttttattggtatactgaagttagagcatgatgccatgtttcacggcatttgaaacactgttatcttcttattcacttcctgtcattgaatcctggattactgaggagactgcccctgtggaggtccttgtgggcggcccccttggggaggtggtccctggggctttccaggaggaggtgggggaggaccttgctgatggcctccctgttggggtggtccttgtggccttcctcgaggaggacggggatggcctccctgttggggtggtccttgtggccttccttgaggaggagggggatggcctccctgttggggtggtccttgtggctttccctgaggaggtggtggaccttgttgctgctggcctccttgttggggtggtccctgctgagggccatcatcctggttcccatcaccagcagagggttgagattgctgtcctcccaaaggtggtccctgacgctcctcatctatgaactgctcagagtctcctccatctgatattacgaggggaacatcttcctggctgacatcttcatttaaatcctgagctgagctgaaggccagcagggccactgacagcagaatcagaagcatcttgcaggaggctctggtgtcactcccaactttgtgctccccccccc

SEQ ID NO: 468930 - DNA, 1000 bp, Homo Sapiens
aagttgttgcaattccagatgttccaatattaatttgaaacttgaaggctcttaagataaatatattattcagggaaatctcaagataaaaatcctgagttagttacagctgtttttaagaaacctgaaaattgtggttacctgttacatgaccacagtccttctgttgaatacactaggcagtatttgtacaaatactgttagaaaaacttggcttctgaaatcttggaggcaggtttttaagatttcaacatttaaataatatcttactcgtggttcttttactttttaatcttcttttgttaaaataaattgggggcataaacacagcataaagcctactgaaatttaggaagtaaactagatttacctacaccaaacagcaaagcaaggaggtgttgccaaaccacccttacattgagatggttcgccagtgtggtgtgttaatcgtctgtagtgaactcattattgtaattaaaaatcttcattgatattaacctattaaagatattgcctatgtgaatttatcataggcacaatagaattacagatttctacaagtaaataagatgtcagatattttgttttcagtaatttcaatagcattgtgtgcccctggaaataattcatgtttctcaattagtattgcagtggatattatccaaaagtaagataaaaatttaaagaatataactgattttcatagtgcaataacagaaagaaactagagacagatcaacgggctaaagtagtaatcagactggcacacatttcaaaaaaatccatggtgtgactgcccaggcgaggtgaaactgaagacaatgtgcttccggtcaaagagccagtgagagagccagaaagtgaatggctctctgcagttgtggaatcaaaacttgatcttggtctgtgtaagccagcagcagaacaggaacgctgaggtgttgaggaaccagatctctgctccactacttcatcatcaatgcttttaaagtccaaaaga

SEQ ID NO: 468931 - DNA, 1000 bp, Homo Sapiens
ttttttttttttccaattatttttacaaagttttattgaaacttgtccatcaaggtgacagtaattcactgttttgaaaagtcacaaaaaagggtacccccaaactcaggtataccaagtaaatactggaacccagggagctcactcctccctctcccaccaggagcaaagggcataacgggagcttccgctgactcacagcaacctgggctagtgggtacatctgtggcgactcccgggaaactgagctgcgtataaagaagtctgctttggtccaaaggacatcttcctgacccagactcagaaggctgctgtcaagttctacattcctttcagaataagcaacagcaactgctgcagtcttgctaactaggggcagaggtcctgagcaaggtgccacgggaccttgtaaaatcacgctgtgtgattttatagggaagagggcagagtgcctctcaagttttcacggttaacactgtcacctattatgactggaataaaaagctggacaacctgccagctaactggtcagtcctgaggatcatccagctgaatggagaaatccggcagcaggttgaaaagtctgttctgagaacagattattgctgagcagagttcatgtgacttctagacgtggtgacttaaaaaatggccttaaggctgcagagccagccacctctgcttacaaaaagagtacttagtgcacatgactgtaagaaacaattgtaaaacctcatctagaaatcagaaagcttctaatttctatagaaatgacacctccctggagccgagagacaatctgttgttgattttgaaggacaggcaagaccaacactgtatttagttccatagccaggcctcaacagggacaagtggctggccttaaaaacacacagatgactggaaatgatgtgtggcctcagtccctgtttcccagaattttactggcaaaggagttagcattcatttttggcttaagaaaaatcgagaatgtaggttt

SEQ ID NO: 468932 - DNA, 1000 bp, Homo Sapiens; identical to SEQ ID NO: 338668

SEQ ID NO: 468933 - DNA, 1000 bp, Homo Sapiens; identical to SEQ ID NO: 338669

SEQ ID NO: 468934 - DNA, 1000 bp, Homo Sapiens; identical to SEQ ID NO: 338670

SEQ ID NO: 468935 - DNA, 1000 bp, Homo Sapiens; identical to SEQ ID NO: 338671

SEQ ID NO: 468936 - DNA, 1000 bp, Homo Sapiens
tgcactggagagttttctcttgacagcattttatttggttcaaatgtgaaactcagaccctggctcacccacttctcatcgtggctggagtagatttgtcctgaggggggatcattggcttcttatcgggacatgaaaagggaagcacataggtcacatcaagtgtcagggcagggagaggcccagcgactgctggccgggtagggcttggccataagccaggaaagggatgcctggtaccaccttttagacacatgcagagggagaggagacaattcaggagtggtcttagggtttgggctttgagcaggcctagggcagagtcaaggctccggaccaaggggttcagtaactgtgggcagaagacttgtccagctcactgcgctgctccttctgggactctgtcaccacctccccattccgggtctcaatggtcttgatcagaaccgtcttccggctgtggctgtcctggggaggctccacctcaggcacagtcgtctttatatttaaggaggcaaaagaatggacgggcacggagatccggctctcctcgccctccagcagcttgcggtaggtggcgatctcgatgtccagggccatcttgacgttgaggagctcctggtactccctcaggtgccgcgccatctcctcttttagctgtcgcagctcctcctcgagccgcgcagcgcccgcctggtagccccccgcctccagggcgaactgctcctccagctctctcaactgcctgagcagcgcctcgttcgtgccgcgcagcccgtccacctcgcacgttagactctggatctggcgtcgggactcgttcatctcctgcttggcctggcgcagggcctcgtggttccggttggcagcgtcggacaggtccgcgtacttggacttgtaccactcctccgcctcctgcaggttcttcgcggcgatgctctcgtactgcgcgcggatgtccctcagcgctgccgtcagctcgggcttcaccgtggcttcc

SEQ ID NO: 468937 - DNA, 1000 bp, Homo Sapiens; identical to SEQ ID NO: 338673

SEQ ID NO: 468938 - DNA, 1000 bp, Homo Sapiens; identical to SEQ ID NO: 338674

SEQ ID NO: 468939 - DNA, 1000 bp, Homo Sapiens; identical to SEQ ID NO: 338675

SEQ ID NO: 468940 - DNA, 1000 bp, Homo Sapiens; identical to SEQ ID NO: 158747

SEQ ID NO: 468941 - DNA, 1000 bp, Homo Sapiens; identical to SEQ ID NO: 338677

SEQ ID NO: 468942 - DNA, 1000 bp, Homo Sapiens
aagaaactatgagattgtcgtggatatcttataatcatactttttatcaaatcagtagttaaaaagaataagtgaagtactttgaggttatgtctattcaatttattcaccaatacagtcaatatacattttacaccaagctaacaacattttttaaaaaggatataattcttgtccttagcacattttgatgccctgagcaaaaaaaatcatagataccaaaaaaaaaaaaaatgtaagttcagaacaaaaccagatagaaacttccaaaataagagaacctgagtctgtaattgttggaaaaacaaaaaacagagacattatgaaagtcaaactggttatccaagggtaagctttctagagtaagttcattttgaagaagtggaaaattcttagaggttatctagtccgtattcgtcacatgtgcttcatctcatgggaaaaaatgaattgacaaagaatgagtgtgctgatattgaaattataaatcttcttgttctctactgctttcaagatcagttaaatttaatatgtcttcctcttcccaaatgaaaagattttcaccctcaaacatacaaagttctaaaatatttctgttgctaatatttaaggaggtctcaacttggcaaatatctaagaggcaagcttgaccaagcatttcaaagaagtaatgacagttgatattttctcttactacttggttgagatttgttcttgagccctggaatctgttatttaataagttgttattctcatcgactgctttaaagatttcatttgtctgaccgctgaggtcttgtgtatttgaatccacattacccacaactaacaatgatgtgtgcaagaaattcatacaaaacctttccttcaaatctggttgaaatttctttaaattaccttcttcctctaaccccaagaagttaattcttttttgttttcttcttttacccatcaagtcaaatgtgttactgaaataaaactgatcaaatatatcaccaat

SEQ ID NO: 468943 - DNA, 1000 bp, Homo Sapiens
ctttttattgaacgcaggccctcgcggtggctcagagcccccggtagtgccctcggaagccgcatgtgctggaggcacgttggaggcaaggatcctgcagccgcgacttgaatcgcatgggtcacggaggccacgctggagcccccagagctggctcggattgcgagttctgatggagttgctttttccaggacgctgccagcgctgagcgttcacctggtgatcaggcgcatcccgggaagcaggccgaagccaccacgcccttgcagggccacaccggccaaccagctgttatctgcatggatgaggaacgcatttaaagaacagcagtgttttcaaataatgctggataaggctttgttttttaaaggtagtggaagttttaagggtgccccggggtaatttctgtagtcagggttccctccgggttagggtctacacggccatggcgggctgcacggtgcacgctttatcactgagacctgactcctaagttactgttaacaagagtccctggggccagtcagcttacacacaggcctaatatagcagaaagaatgatgcaggccgttaaaacagcctttggaaagaggttttcaatttttcaatcacaaagcaaatcaagcttcctaattagctacaacacggctggaaagctcagctcctactaggctgcaagcccttgctgtctgctttcttgcatgaccgtctctgttacaggaaaggtttggctgctttctaatctcactcatgttcaaagaactcgtggcaggcagtagtaaccatggcaacaaaggccatgaattcctggaagtcacattcgccgtctccatcattgtccagtgtttccatgactttgtccacaacctcctgctctttgatttcctctaagaaatgggaaagctcattgttgatgagctccttgagttcggatttcttcagcttgtgcttgtctccctcccttccagaatattggtggaaaacgtcgatgagggccacc

SEQ ID NO: 468944 - DNA, 1000 bp, Homo Sapiens; identical to SEQ ID NO: 338681

SEQ ID NO: 468945 - DNA, 1000 bp, Homo Sapiens; identical to SEQ ID NO: 338682

SEQ ID NO: 468946 - DNA, 1000 bp, Homo Sapiens; identical to SEQ ID NO: 158750

SEQ ID NO: 468947 - DNA, 762 bp, Homo Sapiens
gcctgtcacaataaagtttattatgaaaacaggctggtgtggggacatggggacagataagtacatttaggttgggtggctcaggtgaagtagtgcggcttcttcacattgatgccatactcgctgagggcaggggtcaagtcctccatggttagagtgtacttgcggtccttgctcttgctccgggagctgccggaggccgtgcccttcattttgcagtgctgtagggcatcattggcaatatctgagatgaatttctgggcagctaaggagatgagccgaattatgcgtgggtctgaggcctcaaagccagcacggttcaggtagtaaccagtcactgcatctgggatcgtaggcgtgtaatcttccagctgcatcaagaagtccaccaaaggcgtgctggacaccacgggcttcacgtctccgttggccgcgctcggcagtacgtaaaccccgttagatatggccccctccgggggcgccgcgccacccgccgacaccggagccgccccacgccgctcagctggctccccggcccgcgccgccaagggtcccgtgcccccagcagctgctccagccccaggtccccccgctgtccccgcggggctggccttgttctccgcggcggtgctggagggcagcgcggcgggagccgagaccgggggcgcggggcccggggccgaggcggcggaggccggcgccgcctcggggtccgcgccggagccgctgcagctcatcgggccggtgggagaggcggcgaac

SEQ ID NO: 468948 - DNA, 1000 bp, Homo Sapiens; identical to SEQ ID NO: 338684

SEQ ID NO: 468949 - DNA, 1000 bp, Homo Sapiens
ggggggcttaatctggttacaggctataaaggagataatcatttacatgatcatattctcaaacagatggtcaccaaatggaatcaaaggactgatttgatgtagccggtagtatgataatttgtagttaaatgaaaatacagatagatccagaaaataagtaatttcccagtagccagttaataaattacagacctagaataagcaatttaacaagattagaaaagcaactctgatacaaacgtgttgataacaagtacaataagcatagaaaatttaatgaacatattaattaaaacgattttagaagaaaaatagaaaatcatagtgaaacatttcatataaaatatttagtagaattaatgttacattgctataacaaattcacatatttttaacaaaaatttcttcatatgctattttcactctctgcttctttctttttcttttggttttaattaggcctccttttgatattctttggatgaaaccttttttacatgccctcagacattcttgtttggaagtaaaattgttttcatttcccccacatccactgtacttaaatgggcggcatttcccaatgactgaattgtagtagaatctgttctcattggcacgacacaatcctctgtctgctggagtgagacaccatgagggaccgtgaaattcaaaaaggctgggaaccttggttgattgcggagtcagggagttattcacagcattgagctgggttccataattatccacctggaaaccattcggaccatcttcacaaatgttcttgcattcttccagtgtctcaaaattgttcatattgcccaggcatccaccatacttgaaacgttcacactgttttgtctgattgttataaaaatacctggtaatataacctcgacatattccaggatcttcttccaaaaagcagaaatctggcttttcttgttgcaatgttgtctttataatcctgtttgcattatctcttgtacacatttttttg

SEQ ID NO: 468950 - DNA, 1000 bp, Homo Sapiens; identical to SEQ ID NO: 158751

SEQ ID NO: 468951 - DNA, 1000 bp, Homo Sapiens; identical to SEQ ID NO: 338686

SEQ ID NO: 468952 - DNA, 1000 bp, Homo Sapiens; identical to SEQ ID NO: 158752

SEQ ID NO: 468953 - DNA, 1000 bp, Homo Sapiens; identical to SEQ ID NO: 158753

SEQ ID NO: 468954 - DNA, 1000 bp, Homo Sapiens
ttttttttttttttttttatgcaacaaattttatttagcagtcccaacattcagcacaaaaagtttacagaggatagaaagtgcattaataaaagccagtctttaccaaaagaaaacagaaaatatattattgattcaaaatattttacacttgaatgataaactgcaataacttattctgggcacctactgataaaaggaagagaagaatactttaagaagagctcaacctccagctggtatcagagaagtcagtagaggtcactgagaccggcagtctttcttgctttttgcattagtgccctcagctggaactgtttacgggacagaagacgtacatgcttcaggaagacatccaggtctatcacgccccttctcaaggcttctcccaagtaaaagatagtgtcttcaatagcgttttcttctgcatacagattcaggatctgtttgtataagggagctgtgggaatgataacttcatcgatatcattgttttcagactgattttccattttttccagagcagaactgagttcttcatccttctttttcaaaagttctatgtttttatcaacctcggctacttcttgatctaaacgggtaaccatctcttccagtttctggtgaccctttttcaggtcttcttctgttcgtttcaaggcattgagctctgcctgggcacgatccatttcctccttcatccgccatctcagtttgtcactgaccgcagagatgagagaggctcggatggtgtcctcgctgattgtgccatccctactgggaccaacagtggtcacaggaggctgagaagggtactgagaacttgttgtggcaggatatggaccaccaggtgggtaaggacagcctgggtaaccactgggattgggagggtatccggatgggtatggagagattccacctggcatgcctggcatgtaggaagtatttggtggccccgttgcctggtatggcggataggatgccgaaataggacgagaga

SEQ ID NO: 468955 - DNA, 1000 bp, Homo Sapiens
agtcttcaattttatttctattttaaacagcaactaacagcttggaaatgtccctaacagctaggacccgccccatgcattccagaggctcccccaccaaggctggggtccaggttccaggaattccccctcatcaggcctgatttctctctggagacttgggacagaagaggctgtccagttagaggggaagttggcactaaaggtcaccgtttagaagggttgggctcagacacagctgcctttgttagtcttaggatattttgagatttggtagcgtgctcagattgtgggtatggagaagggttcctgaactcctctccggcctcacttgctcctgggcaagcctcacagcaccccttcctcttgctggctcggcacgctgcctttggaagaggggcacctgataggctgggtactccagcatgcctttgtgtgacccggtcagctgcagggaagcatgctcccctcaacttctcctggcgtaggcagggtgcggaatcagaaagatggtgaagattcagacctgagataccaaccccttaccaaccctcacctaaaagggaatattacaaggacatctctttgtgacttggaggggcacacctggatatttaaaccccaagtgtggtaatagctgggccaccaggctggaggcagctcaatgcatgcacttaagcagcaggggcagctcagcaggagggtagggcccacagagctggacctgccctccccacactgccatccacacccatggtaaccatggaaacataaccaccccactcctgccagctgcctgggttcagacaaccaggactggcccacttccatcaagccaaggcctaaactgatgccaggctggccacagagtggttgcaggaagaactgggattgggtgatttggtcagtccgggcttcccagcacagcttgggaggactaccacaggagcctccacaccttgctgtctgggctggggtcagacggggcttagtcagccag

SEQ ID NO: 468956 - DNA, 965 bp, Homo Sapiens; identical to SEQ ID NO: 338689

SEQ ID NO: 468957 - DNA, 1000 bp, Homo Sapiens; identical to SEQ ID NO: 158754

SEQ ID NO: 468958 - DNA, 1000 bp, Homo Sapiens
ttttttttttttttttttttttttttttttttttttttttttttttttttttttttttttttttttttttttttttttttttttttttttctagtacaaagcaattttattttttagagtgtccacaaactttgttaaaatatgttctctttttaaagccaattaccttaaaaatgtctggaaggaaacactgaaataagaatacaacatttcggtgaagagctggaaacttaaaaaattatcaaaaggaattttggtatcatcttcagagaaaaaataaagcaagaaatactaacatcaaaaggacaggtatgatgatgcgataataataaacatctgcgtttgtctcttcactaagagtaaactgggaaattgtaggccaaagtccagttgaactttctaagtctgtgatccccgtgctgactgtggaagtgtatttataccaagatggagatcttgacttcttgaatatatctggactggtaaaatcttgatgaggctcataaaatgagtttgggaattgtgtatagctgattttttgtgggaaactgtttacttcattcaaaggttcttgagactcttgatatttctgtcttctccttgtgctttcctgagctgcttcattgttcatcaatccaatcagtttctcctctttctgcactttccatgttgcacaggactcagcgcttctctcactgtggacttttttttcgattaacctattgtgtgccttgttgacttgctttgttgcagccttttgtgaatcaactttttgactgtttggagtatggacatttatactctgtccttttgtggaaaagtccagtggtcctaaaggtattccatgagggttcaaaattttcttgagggcttgatagtttggcttttcatcatatgctaaactatgagcacataccaaaaattgggctatttcacagcaactgcttccagaaggagcccatttaagcactgactgggggagctcgtccaacagatttgt

SEQ ID NO: 468959 - DNA, 1000 bp, Homo Sapiens; identical to SEQ ID NO: 338691

SEQ ID NO: 468960 - DNA, 1000 bp, Homo Sapiens; identical to SEQ ID NO: 338693

SEQ ID NO: 468961 - DNA, 509 bp, Homo Sapiens
tttttttttttttatatcaaaacatttattttttgtgttacaaaaacacaaataaatccaagcagataatgaaataaacacatttttttagtgtcccatcctgggttctctgccctagaatgtattaagcaggtcaagtttaggttacttcaacacttcttctggatgctatgaagtctccatcttataaccatgtttctctagttcagctcgtaactgattagagaagtcatcctctacattgtcatcatcccaattatcctcccagacatgtgcatcttcatcttcatctaagccagcccagtcttcggcagggaactcttcaaactcgtcgtcttcctctaacagacctaagtctaccggctgctttttctctgacatctcgactgtccgcgcccaacacctcccagataagcagaaaagttggaaccctcactcttcctcaaggaaacgccaccgtcactaccgcctccgacgctgacgctaccatagagacttggggaaagaat

SEQ ID NO: 468962 - DNA, 1000 bp, Homo Sapiens; identical to SEQ ID NO: 246468

SEQ ID NO: 468963 - DNA, 1000 bp, Homo Sapiens; identical to SEQ ID NO: 338696

SEQ ID NO: 468964 - DNA, 1000 bp, Homo Sapiens
cacattgacatttttattaacgccaactgttttttaattatttttttaaaacaatagcacaaaaatgtttcaaggaagcagtctcacaatctgatgaccttctgaaataccgttaagccacaccaaatatgaatttctgttaataacacaaaatatttttttaagaaaaaaagaaaaaaaaggtagggaaagaagaagggaatgagatttagatttaaaactcattggattaaataggtgaggcttattagtaggatatactgttgaagcaaacagtggcacacacaggcttacagtctttgttttttaaaccagttaccactaatgtattaagccctgcagcagttaccactgacttctcgcacgcataaaatgaaccgggagaagccagtgttgatactgttgtgaagaggttcaagagctggcttttcagacaactaagaccatttttagcagaataactccttcagaaaggcctggctgaagatctttttatttctattgtctcacctatataaatttcagggttcttataagtcatctttaaaaagaaaaaaataatgtatatcagtttctcttatttaatgtggctatgaaagatgtttccttattatttcttcatctctaagaaggacaccagggaatgggggttgggggtggaactaaagggaggaaaaaaaccagaacagggtaggtttttgttttttgctttttgttttttttttggccaaggggtcggtcacacagaagggaaggcaaggaggaaaactaaactacaatccttggttcagattgagttatgcaggaatatatcttcctgatcagtccccgtgccaaaaaaaaaaaaagccacttggaattatgcactgactccaactatgtgataccagctatcagccttttgtgtttaaccattcccagaaatggacaccacccttggctttataggctccttgcagaacccacttcacaaaaatgctcttcaccaagaagcctctag

SEQ ID NO: 468965 - DNA, 1000 bp, Homo Sapiens; identical to SEQ ID NO: 158755

SEQ ID NO: 468966 - DNA, 1000 bp, Homo Sapiens; identical to SEQ ID NO: 158756

SEQ ID NO: 468967 - DNA, 1000 bp, Homo Sapiens; identical to SEQ ID NO: 338699

SEQ ID NO: 468968 - DNA, 1000 bp, Homo Sapiens; identical to SEQ ID NO: 338700

SEQ ID NO: 468969 - DNA, 1000 bp, Homo Sapiens; identical to SEQ ID NO: 158757

SEQ ID NO: 468970 - DNA, 1000 bp, Homo Sapiens; identical to SEQ ID NO: 158758

SEQ ID NO: 468971 - DNA, 1000 bp, Homo Sapiens; identical to SEQ ID NO: 338705

SEQ ID NO: 468972 - DNA, 1000 bp, Homo Sapiens
cggcttgcgtatcaacttcacactaagcatctaacattcaaacaaaaagtgcaaaatttgtaattatttttaacagcaagaattcccaacctcctgccatccactgatgttccatcctgtttgaggttctacattaaaacatgattacttttgccataaaagaaaatattacccttaaaatatctatttgatatgtacaaaccacatttttattctgacaggtcacagattttgagcaagtgcttccctaggtgaccctacctagccaatatgaaggtggagcaaacactgctttagcttaactgcactaatatttacaccatgtaacccttctaaccaaatagaatactgctgacctgtcatcatcagtttgtgtgacatggctcaaatgtacaaaaataaacatagggagaaattaacccaatagatttcaaattaagtgataaaagcaaggcaattcaaatattaacatggcataaaacttccctactttagtggtttccaaatgctatttataaacaagggatgagttcacttgcttagatatttgaaatacaactttattctgattctaaagaaaaggaatgggaatgacagtaacaaacaagatttcaccactgaatattgtgatgtgactgcagcagtcttatatatgaaactcaaggaatcaactgcgtccaaacagctaaatatgcaggtccaaacaatgaagttattttttaaactgccacattcactccgaagcccactcatctccttcagcatcccacagataaagcacatgttccgcttagctagataataatgaggtggcacacacgctgcaccgctgacatcacaggacagctgcctataaaactagacttctgacgctgggctccagcttcattctcacaggtcatcatcctcatccgggagagcagttgtctgagcaacctctaagtcgtgctcatactgtgctgccaaagctgggtccatgacaacttctggtggggcgaga

SEQ ID NO: 468973 - DNA, 1000 bp, Homo Sapiens; identical to SEQ ID NO: 338707

SEQ ID NO: 468974 - DNA, 1000 bp, Homo Sapiens
tttttcagaattaaattttatttcacattgatagaaaccatgaaaaacatttacactttcccatgttacagcacaatatttcaatggaatatttcttgccataaataatatcttgctgatttgtagaagtgaaataacagtttatgttcttcaaggtaaagaaaaatgacatagtaaatgattgtttaaaatttttaaatccagacataaacatatggcttcattattaacatcctgtatagtccattactaaattatttccattatcaattagcacccatttataaagatgcattcttaatattgttttggtcagctggaatacagcagaaaaattaacacagttgagaaatatcaagcatacatttttgctacatattaatctgtatggtaactacactttatggtatagggttctgactagcctttattacccataagtttgttttcaaataatttttaccagtaatctggaaattttgacaatttaaaatgattgctatttttatgtctgcatcaaaaactaatacaaaaaataatttgactaaagtgaaaatttcaaataagtccactggcagatgaaaataaagcaaaaaattacaatagattcctcatcttctacagtagttggtttcaaacgtgtacaaagtaaactctatactatgagaagatgaaatcatcttagaagttagtttttaagatcagtcttaaagatatttcagaacatactagaatatgatctaattattctttcagttgtttacagaaaaatgaaaccacagaattattcctgttacctgggttgaagatcctaatagctaggtgtaaatttggataaggtacagtaattcgaaataagtagtgcatgaagttttaatgtctggtttctctataaagcataaatagattttaaataccttatatctgtgacccagaatgtcaaattacagcatgtattgacagtagctgtctattgcagagaggcaatacttggcctgct

SEQ ID NO: 468975 - DNA, 1000 bp, Homo Sapiens
tttttttttttttttttttttttttgcaagaacagtattcataggataaacaaatagcaaatgtacagccttggcttccccaaactccacagtctcagtgcagaaagatcatcttccagcagtcagctcagaccagggtcaaaggatgtgacatcaacagtttctggtttcagaacaggttctactactgtcaaatgaccccccatacttcctcaaaggctgtggtaagttttgcacaggtgagggcagcagaaagggggtagttactgatggacaccatcttctctgtatactccacactgaccttgccatgggcaaaggcccctaccacaaaaacaataggatcactgctgggcaccagctcacgcacatcactgacaaccgggatggaaaaagaagtgccaactttcatacatccaactggaaagtgatctgatactggattcttaattaccttcaaaagcttctgggggccatcagctgctcgaacactgagcttgtgtaaaagttgaaccatgaggccacaaaagcggtcaaaggttctgggaattcgggtctggggattcacttcaatcagaacattcttctgtgtatggatataaacctgtagcaagccagctcggttcaggggactatccatcagcatcagcaaactctggtgggtgatatctggccgcgcttccccagggtcccgtccattcttcaacaatatagacttgtgcttgtcacagttgagtagctcatatgtcttccctaccttgactgtctccagactggccccttccagcaccacaataagcctacggcctccgatcttgtttcctgcccctagtcggggccgcttgggtggcagagcatcccagtcctgtgcctgctccccaccgcttcgttcacgaggcttgaatccatcactgggcgcggccatcttgcaacaataccggaagttgcgctaacgctcttaaataagaacagcgcggcttctaatcacaaatttccttcc

SEQ ID NO: 468976 - DNA, 1000 bp, Homo Sapiens; identical to SEQ ID NO: 158762

SEQ ID NO: 468977 - DNA, 1000 bp, Homo Sapiens; identical to SEQ ID NO: 158763

SEQ ID NO: 468978 - DNA, 1000 bp, Homo Sapiens; identical to SEQ ID NO: 338710

SEQ ID NO: 468979 - DNA, 1000 bp, Homo Sapiens
gcaggagaagcctgtttattaggcaggagaagcagcagggcagccaggctcccctcccagccaccagctggccaaatgtcctcccttaactcaggggtacccaaggctccatggccatgtgaccagaggcgtgtaccctcaagaggcggcccctcagccctgggcagcccagccactgggtctcgcccttcaggggcctgcgccccactctgcccggccctgcctagaacagctgggatccagtccaggccagactcaagtggggcaagaccaggcagccggggcctggatgttctctacacaggaacgcacagatgatgacagaacaggctacatgggaagggcgggggaagccaccagatgggcagcactgcagatgtggccatcagctgaggaggggggcagacctgtcgttggtcactgtcggcttcagctggacgtgggcaaagggattctaactctagtcaggcggctcagaatctggccacttccacatcggcgctgctcatggaccgcgctccatagtcatccaggccctgggagaaggcgggcacggccacactgtagggcctctgcttgaagccgctggccgtctgggcggggaaggcccgggaggcggcgccgtaatcggggggtgggatggccaggtcgtccttgtccaggaggttgcccgtgctgctgctcttcccttgctgcaggctcatgtgcagcctgtcactgccatcgctgtccaagacccgggtgtaggagaagggaaaccagccccgcatcttggtcttctcactctctccgtagtgccagccatcgcgggcctcaggcaccagcagggtaatgaggtcaccctccttgaagctcaggagggtgctgttgtccccagcagcgtgggagaagatggccttcacccgcatacggccattgcgctccaggccggctgccatggagctcgagcgaggcagagtcttgttctcggtggtggcatagctgttttttggggtcacgc

SEQ ID NO: 468980 - DNA, 1000 bp, Homo Sapiens
ttttttttttttttttcagcccagcccttgggcccctttattgaaacaactcacagcacagtatttgagacagacagtgttggccggcggaaccccaggaggctgagaagtcgaggttgcggcatccctcactgccctcctgggggaggcatcctccaagcagacctgagcggccccgggctggggcgggcgatccacacacagaggcgataagagcacttggaatcagggcagccatgcagcactgccctaggcggggatcccccaaagtctgacagtttgggcatcagtggggtggcaggtgccccctcagctgcctttatgagcgcgctcttccacgtaaagctgcatctttaaaatgtccgacgtcatggtttttagtggtatcagccgggggtcatgcatgtggacatcctgctcatccgccaggatccaggggaaatccttgatgacctggatcttctccatgttgcgagtggcggcttctctcgtgtgcaccaggactgtgaaggtacagcctggggggttgtggtccaggacggcatcgcacacgctgatcttcaggatgaaggcccggagcagctgctccacatgagacaacagcgagtctgagctgatggacagcagtggaggctgggtgatctcaaagacgaatttctccactgggcggtgctctttatccaaaatcaccaccaccactttctccacatcattcttctccaggagtggcttgacgcagtgcagcgtgtcctggatatactgattcagctccgggtggcaggacatctggaccggcacgttgtacttcttgcgtttctggaagatgcccacggggtagacctcgcgcacgtagaggatgagatgcacagccacctccaggaactcgcagagcacagcggccaccacttggccaaagttgaggtcttgtcgtgtgagcgtggtcatccttcccgctaccggctctgcgctcggttcccgcccgagatcgggcccggccccg

SEQ ID NO: 468981 - DNA, 1000 bp, Homo Sapiens; identical to SEQ ID NO: 158764

SEQ ID NO: 468982 - DNA, 1000 bp, Homo Sapiens; identical to SEQ ID NO: 338711

SEQ ID NO: 468983 - DNA, 1000 bp, Homo Sapiens; identical to SEQ ID NO: 338712

SEQ ID NO: 468984 - DNA, 1000 bp, Homo Sapiens; identical to SEQ ID NO: 345096

SEQ ID NO: 468985 - DNA, 1000 bp, Homo Sapiens; identical to SEQ ID NO: 338714

SEQ ID NO: 468986 - DNA, 1000 bp, Homo Sapiens
ttttttttttttttttttttttttttttttttttttttttttttttttttttttttttttttttttttgctcttctgcaattcggtgttttattctttccaaatctcaggcttatgcacaagatggaagagcactgttaaaataaaaaaatggacctaaagtggcttggctgacgtggctagcgggccactgagccgcgggtcccgggtcccaccctgctgtggggggagtccctgggccctggggcctcttggcactgtgtgacctgtgtgcaccccaggtgaccaggcgccgggacccctgcagggcagagcaacagggcaggggttggccctgcgggggagtgtctccagctgccgcgcacccgcaacagcccgttgtcccctcccgggccagctggtcttgcagccgtcctggcagagctgggggcagagcccgcagtcttgttcccagaggtctggagttgccgcaggtggtgttgcggtgcctctgtgcctgatgacccaggccggggctacctggctccggcaccacactcagagaatctgctcggtgctggaggccgagatgtccaggagccgccaggccgcgtaggggttgagctcgtcctggtctcggcagagcgcccacacgtacagcatccgcagcaccttgtccgggtcaccctccaccacctcgcctttggggttcctgaccaccatcaccagctgtgcctggaaggtgatgatcagcaccggcccctgctccatcatcttgcccatggccaggtcgacgttgtcaatgtctaggatgcgagaatggaactggagacccagtgccttggcctgctggatggggtgggccagctggctgtaagtagcttcatagcaccagtctttgagaatgtcaagctctccagaaatcatggcctccaggacattggggatgatgtcgttctcgcactgtttcagaaaccggtccttgtcaaaggccgggtccacccggaggatctccgtgagca

SEQ ID NO: 468987 - DNA, 1000 bp, Homo Sapiens; identical to SEQ ID NO: 158767

SEQ ID NO: 468988 - DNA, 1000 bp, Homo Sapiens; identical to SEQ ID NO: 158768

SEQ ID NO: 468989 - DNA, 1000 bp, Homo Sapiens; identical to SEQ ID NO: 338717

SEQ ID NO: 468990 - DNA, 1000 bp, Homo Sapiens; identical to SEQ ID NO: 338718

SEQ ID NO: 468991 - DNA, 1000 bp, Homo Sapiens; identical to SEQ ID NO: 158769

SEQ ID NO: 468992 - DNA, 1000 bp, Homo Sapiens; identical to SEQ ID NO: 158770

SEQ ID NO: 468993 - DNA, 1000 bp, Homo Sapiens
gagtggttatttgcaaggctataacttttttaatgacagattttcctaaaagaaaccactataacatctgtccaagtactccagagaaaacaaaaaatacataaagattaaaagtctattactttaacagcacattgccaaacacggacaactaggataaatgccaagaaaccttaaaaaataactttaaaagatgcaacgttcaagccattcaaacgcgtaggttccacaaacaacaggaaaacaagtccaagagcagttctacttgtgcatgatggtaactcagactgtacttcatcaaagttcattcaggtgtttcataggcgtctgagcagagtttgttttttcttccttgcttggagatgtgtacacagattagaggagaggaaagtcttccagatgctgatgtaagcacagcaggcttggttccccttgataaagtatgaaggcagatttagttgactcaagctttatcagtttccctagtgaaaagtcttatgcatgctgaaatagacgagttactgaatttgtcatgcgaagtatttacataaagtgaggtcagtaacccgacagaataaaaaaggtagttgttaaattatttataaccttttacaacttgaataactttgtgggtaagtgacactgacgttcaaactcctcaaacatacattaacaagaaactatttactgcgtgaagaggcacacatcatgtaaaacatacacgtcatgggagggattcctgcatagcaggaaagtcgctaccactacataacaaatggctatgccaacagtcaaagctgccacgaaagggtacaacattagaattcccctaaaatctcaaggagtgtttgcaatagcacagatagatgcctttcggagagtaagtacatgttttgttcagaagggtatttttcactggaaaatctgaacatcatgtaaataaatcaatgttctaactggataagatttaaggcaatgctactcagacctgagggaaaaa

SEQ ID NO: 468994 - DNA, 1000 bp, Homo Sapiens
ttttttttttttttttttttttttagtttataatgttttactatgatttagggcttttttttcaaagaacaaaaattataagcataaaaactcaggtatcagaaagactcaaaaggctgtttttcactttgttcagattttgtttccaggcattaagtgtgtcatacagttgttgccactgctgttttccaaatgtccgatgtgtgctatgactgacaactacttttctctgggtctgatcaattttgcagtagaccattttagttcttacggcgtcaataacaaatgcttcaacatcatcagctccaatctgaagttcttgctgcattgtgtcaaaagaaatttccttattttctactgccattcccataaaagtaagtagtctcatttttgccatattctgttcatgtaacaggccaagtgaatcaatgaagtctttattattctgataaaacttgacatatgatgccaatttagcactcacaaaaatggttaaaagatcatgaataagctcgccttccaaaaacttgactggttttaaagtaagaaggtggtcaaaaagaaatgcatttggatctttcaatgctcgtacaatacacctgtgggcatcaactcgagcctgggaagcattgtcctctgtgtaacttccgagcaattccaccatgacttttgaagcagcatcactcttcttacaatccacaagtgcctcataaagtagtcttaaaagggtgtgctttttttcagtggtgagattccagtcagaaatccattttctaacttgatccagctcagttgggatgtactggatggccccacaagatgctgccactttaataaggctgcaatacactgtgtatcttacaggagtattcttatccatcccgtggaaaaggttgcttaacaactgcagtctcagagacgggcgttcaccttcgcgaaatttgaccagcttttcacataggctttcaatcaaagcttcttgcttgtctggttccaggat

SEQ ID NO: 468995 - DNA, 1000 bp, Homo Sapiens; identical to SEQ ID NO: 338722

SEQ ID NO: 468996 - DNA, 1000 bp, Homo Sapiens; identical to SEQ ID NO: 158771

SEQ ID NO: 468997 - DNA, 879 bp, Homo Sapiens
caatattcaagagtctttattgaagacttgagatgggacttccaactcagaggatgtgggaatcccagctcaaatgatacaggataaactgggatgggctaggatggacaggctgtggatatgggagtcatgggtcaaagtcttatcccagatggctccaggtacagtgggcttcctgggctggaagctgggtcctccccacttcattctgctcaaagcttcttgaaggagctggtttgacttcaacttgctagagcctagcctcatctttcagtcaactgggaaggcttatcagagggaatccagcccaaccagatgaagtacattcttctttttggtctcccaacttagccatgccaagccaagagccaaagagctggtgctatagccatatagatcttggttagacatggagaaggacttcccaagacaggaataagcaagatcatggaatttctcctgatcatgctgaggagccatcacatcggggacttgagaggtcctgagtggcaggacgcagaggcaccgttctgtacacctggtggagattccacaatggcttgtgctgcctggaggacgaggagatgaaggcgcccgggagctgtccgtggtgctggatgtggctctatcgtccacacggaggaaggagggtgggagggtggtgcagaacccacccgccccaggtgagaagcttgactcccaaagctggaaaaggaggaagttcctcaagttaaatgttatgagatcctcagtcaggaacatgccagagagctgccctttttacattcccaaaagccataggtggccacctacgatgacaccagaaaacaaatgaggctgcttcttcttggatgcccagctccaggcttctgtgaggag

SEQ ID NO: 468998 - DNA, 1000 bp, Homo Sapiens
gcggccgctttttcaagtttggtattaactttattctattttctgtataactttaagtacataaaggtttatttccacaggcctcaggaaatgggtagaaatcacaggacaatctctcttcccaccaaaaaaaagttgcatattttggtaagtgtttgtcctagagggaaaaacaactgaaatttacattagcagtgctgtgcaagattcttacataattcaagacctaaaaccagcctgcagtggaggtttcagtcctctgttcaggtgcttagacagaagccataagctgatgagcatgacagggaaaaggaggcagtgaagacaggtgacaggcacctggcagggaagaaggattcaggaatgccagactccttgaaatcatgtgggtttttttttttttttccttttaaagtcatctctataggaaggtgctgggcagggatcccagagaaagaaagggtccaagactccattaactgccctggatgaagggcactgctacagcagctagtaccagagactctcctatctcacggttgaggcagacccaggatagaatagagaataaaaggaatgcttataggaaacaattttgtatggaatgctagatggccaagcctcagcctttggtccagtgcaacccttgcctcgcttgtcaacagtgaaaaattagtttggttagaagaaccatctggaaacacaccagcttctgctaccttcatgctcattgttaaaaaaagattaaccagtgtgaacattctgatctgttaattccagggactgttttctttccaatggactgtttgttggtagaataacccccaaaagctcaaagctaaaatgcatcatcagtcctagtcggcagttccttaagaatggactggcggcgtggttgagctgatatggaaaagctgcaccttcctgcagaagatcaactgacctgctatcccaccccaaatctcagcctgaggtatatttcagtgaaggcaggtagctg

SEQ ID NO: 468999 - DNA, 1000 bp, Homo Sapiens; identical to SEQ ID NO: 338724

SEQ ID NO: 469000 - DNA, 1000 bp, Homo Sapiens; identical to SEQ ID NO: 158772

SEQ ID NO: 469001 - DNA, 1000 bp, Homo Sapiens
tttttttttttttttaaagaagtcataaacagcatttattaccttggtatatcatactggtcttgttgctgttgttccttcacatttaagtggtttttcatctttcctccctcctcccacagcctggctatacagtgcatccttgaactgtcagcccacagcagcaatatgcttattctatccacatccctaacatcatgcattcacaaggtcaaagttctggtccacaaacccttccctatagaagttcaatggctgcgaaagaatttgtagtaaaccaggcctcccaggatggcgagctccagtaagatgataatggaaagcagcagcttgttggttgtcacttttctggacattgaacggagaatcttccgacttttgctcaagttttcacttgtgtttaccagtctactcttggtacgttctaactggtctcgttgttcccccagctcttctatgatttctgagccaatctggtcagtctctgtggcaatccgatgagaacgttcaatactttgggtggcccggttcaggctttcagtgccctgcagaagcattgccctttgagactgtagccgattcatatgctcattctctacagcatatatgccatatttcatgtctcctcggcctccaggtgtggctgtcaaaggtgtgcttctcacctcccgatggagtttagcaaggtccttccggtagtttcgaagcttagacatcatggggtttcggaaagacaggggtgcataacgtagctcctcctccatctctgccagcgtttcatttgcttcctgttgcttttcatcaaaatccctgatcaatttcttcttttcttcggtccccgccgtccccagcagccgctcgggcaccccttgtaggtcttcatggaggccgcggaagatctcgtgcagcttctcgaaatgctccgaggaggcggcggaggaggccatggcgcaggccgcgctggagcagcggccaccgagattcgggccctgggcccttt

SEQ ID NO: 469002 - DNA, 1000 bp, Homo Sapiens; identical to SEQ ID NO: 338726

SEQ ID NO: 469003 - DNA, 1000 bp, Homo Sapiens; identical to SEQ ID NO: 338727

SEQ ID NO: 469004 - DNA, 1000 bp, Homo Sapiens; identical to SEQ ID NO: 338728

SEQ ID NO: 469005 - DNA, 1000 bp, Homo Sapiens; identical to SEQ ID NO: 338730

SEQ ID NO: 469006 - DNA, 1000 bp, Homo Sapiens; identical to SEQ ID NO: 338731

SEQ ID NO: 469007 - DNA, 1000 bp, Homo Sapiens; identical to SEQ ID NO: 158774

SEQ ID NO: 469008 - DNA, 1000 bp, Homo Sapiens; identical to SEQ ID NO: 338733

SEQ ID NO: 469009 - DNA, 1000 bp, Homo Sapiens
tttttttttttttttttttttttttttttttttgggatgcaaaagtgttttactaccaggagttcacaaatctgtggacagcacaccagtgaggattccacggtgttggggaggcaggcagggtggtactcatgacccagaggcagagacaggagcaagagcccttgggcccactgcacccacagcttcacattgtgaaggaggccgggagaaggggaacaggcaggggtgggaagcagcccaaccttgggttttggaaaaagattgcatagctcgttaaaaccctgacctcttttttttttttccgctctgtcctgggtgaccagggtgtctgccagcacttggacacgtcagaccccaccacctcctgttgggttatctgcttttccctctttgggggggtggggagcatttctggagtaggaaaggactggggcatggggcggggtgcggagggcctggagagaggccatgggtcccggggctggaccacagcggggctgtgggaagggtcctaaccttcacaggcccccttcctggttaaggttttttttttgctgaaagggccacaggatatatttgtggtgtaaaccccagaggctgccactgctttcctggggagcttggaggccacacccatgtgactgcagggcaggatggtggacttctaggcccctacagcctcggcagtgtcctcagatccggatgtggaaagtgctgaggaagtcaggggccttggcaatcatgtcctcgaagtcagcaaagcccagcttgccgtcaccgtccaagtcagcctcctcaatgaccttgtcgcacacaagcaccacctcctcctcatccagctctgacttagtgagccgggccagcgtcagctccaggtcctccttgcagatgaagttgtcagtgttgaagtcatagatcttgaaggcatagtttgccttgagctctcggggagccgactcgcagagcacggaaaacatgtccacaaagtcgttgaaag

SEQ ID NO: 469010 - DNA, 905 bp, Homo Sapiens; identical to SEQ ID NO: 338734

SEQ ID NO: 469011 - DNA, 1000 bp, Homo Sapiens; identical to SEQ ID NO: 158776

SEQ ID NO: 469012 - DNA, 1000 bp, Homo Sapiens; identical to SEQ ID NO: 338737

SEQ ID NO: 469013 - DNA, 1000 bp, Homo Sapiens; identical to SEQ ID NO: 338738

SEQ ID NO: 469014 - DNA, 1000 bp, Homo Sapiens; identical to SEQ ID NO: 158777

SEQ ID NO: 469015 - DNA, 1000 bp, Homo Sapiens; identical to SEQ ID NO: 338741

SEQ ID NO: 469016 - DNA, 1000 bp, Homo Sapiens; identical to SEQ ID NO: 158778

SEQ ID NO: 469017 - DNA, 661 bp, Homo Sapiens; identical to SEQ ID NO: 338742

SEQ ID NO: 469018 - DNA, 1000 bp, Homo Sapiens
ttttttaaataaaattaatcaaccaacacccattctatttaaggttccaaaaggaagtagctggacccggctgcagagcacactcccaccttgcttctgtcccaaaagtacatcccctacgtgtggttctccttaaacaattttaatgtctgggttggggaagcaggtagagcgcgtagaggcagctgctagaggctggttgctgactccaggccgcgttccaggaaatatcggtgggaagaacggggacgggcttgggacccttcattgaggaagtaggatgtgatcttcctgagtccctcctgattctcggatgctgagtcctcccatataacatcttccgcctctttctccaggatggtctgggccgtgcgccagctgaaccggacaaactgggggaagccgaacacaggctccacgtgctccttcaaccacgcttttgtcttgggatcattggggtagcctgagccataatcagtatccaagtcctgcagtttctccacgaactgccatttcttcacggcctggtcccgggccaccttggcacagatgctggcagcactaaccaccgggtagagggcatctgctttggccttgaccgtcacctcaatcccgggaaaactttgctgcagccgcgcctggtatgtctctggcatccctacggtgtccacgaatacctgggtgacgttcacgccctggtccaatgcatactgtataagcccagtggctgtatcatgtgacagggagttcaggttgtatttgacccgcccaagcatgctggtagagatgaggtttggagacagcacatccagcgcccagccgacaaagtccgtgtcctccattttcgcaaacagcctttcccgctcgctctccaatagggtctttgagtctgccactttcagcgcctccagatctgccaggcgaggcaggggacaataacagatggcgtagaccatggggcccagcacggggcccctgcccgcctcatcgacgcccagga

SEQ ID NO: 469019 - DNA, 1000 bp, Homo Sapiens; identical to SEQ ID NO: 158779

SEQ ID NO: 469020 - DNA, 1000 bp, Homo Sapiens; identical to SEQ ID NO: 338745

SEQ ID NO: 469021 - DNA, 855 bp, Homo Sapiens
tttttttttcctccaaacagatttattgaatacagcaaaattctatatacaaagtgacctggacctgctgcttcaaaacatgatcctttcttactaatatcttgatagtcggtccatagagcattagaaagcaattgactcttaaataaacagaaaagtgcctaatgcacattaaatgaatggcctaactactggaactttagtagttctataaggtaattaacataggtaggatccagttcctatgacaggctgctgaagaacagatatgagcatcaagaggccattttgtgcactgccaccgtgatgccatcgtgtttctggatcataatgttcccattatctgattctagacacaccacaggaatatcagtggggtcagaggttagcttagctgcttgctgggctagaacagatatcactccagcatgctcatctgacagggtcccgcggcaacccagattaagtccttgtgaatctgtgcacaggactccaacaatggagggattcttcattgtgtcttccaagtgctgctccaaggtcgcctccatcccacccaccgaccactccggctcagaacccagcggcacggcacgtccttctccaccacaggcctcagtcacttgacgcgagcggggcgtggaccgtaacggcgcctccaaagggacaaaattgatcacggtgcaacgtccgcgttctttactggaaaacatcactgcgcttccgtcgcacagagcctgacgaaggcttgggctccccgcgcggtgaccgtcgaggtgacctgcacctggctccatggcggaaccggccggcacggattattcccctctcgggagaggtctgcagccgggcctc

SEQ ID NO: 469022 - DNA, 1000 bp, Homo Sapiens; identical to SEQ ID NO: 158780

SEQ ID NO: 469023 - DNA, 1000 bp, Homo Sapiens
ttttttttttttcctttttcttaataaattttattttggtaattgtaaaaagaaaaatcaggaccaaaactaaaggcaacttaaaaagttcaaatatataatccttatgtgatagagatttataatttccaggccctctctggggaaggaatgcccaaagggcaaaagggaaggcaacaatgccatcacacaattcagtcaatcagaagagaagctggtaggagagttcaacagggcatgaagaaagggagagaacagcaatagttctgccatacagaactcagtccatcttgaggttaacatagatataccggatgaactttagggaagaaaaaaaggagatggtgcccagcatgaggaagaagacataaccagtgagtaaggagtagccgaagaactctactgtctgtactgccccagacatgttggagcgccgggcataatagaaaactgagtagaggaagatgaagaggccggtggagccaacactcagcacagatcgccaccaccagcggtaatcctccccagacaactggaagtaggtgagtgcaatggagatgcaagcccccacactcagcaggatggcgaagacaaagaagaggatgccgtacaaagtgtactgctcccgaccccatactgtggcaaagatgtagtacagctccacagagatggcactgaaaggcaggaagcctccaacagtcatgtggatgacagtagacttgtaccagggctggggtggaatctcccgggcgatgttcttggtgcgacagggtgcatcaaaggggctggcgttgttcttcccaaagatgcctccaatgacagtgaggggaaagcccaccagcagccaaaccgtcagaagcagcaggatggttgtggctggcagagcctgtgtcgaaccattggcccaatgcactgagttcaccacactccacgtcaggaagaaaggcacagagaagagactggtggtgagaatgatgttccacacccaacgctcgcctcc

SEQ ID NO: 469024 - DNA, 1000 bp, Homo Sapiens
tttttttttaaataaagtctcaccaaaaaaacctttaatcaattttattcttcatatgtgggtaagggtacagattctagaccatgtctgtgaagtcatggtgatatcactgtgctaaagatcatggctgtaggttggctgagaatttaaaatgcaagaaaaatcagaagcagcacatcattgcttcttattctaggacatacagagagtttcttcagtaagtaccactccagttgtcttcacaatttaatgctacagaaacctaaatgtttctacttcagctacgaaatcattcaattggcaggcaaaacattttttattacctatttataaaaacatgagaaagggaggaaaaataatagaatgtataaactcatgctatcataattctaatgtctagctataaaggcatatggttgtaacaattgctatctaaaattttttattagctgcagtagctgcattccattttcattaccattttttaaagtctttttgcttggtcatctaaagacgtttttcaaatttcaaaagatcagctattattgtcctccttgtgcccctaaggaattaataaaatgcacattcatttccttctttctaaatgttccagttaaaaacgaaacaatgcaaaaatggcaaacattttcttggaccatttttttcactgtaacaacaaaaaatgtgcaaggtaaatagaactcaagttttgttttattttttgtctgtttgtattttaataagtccgtccagaataatacaggttacatagctgtaaccatcttaaggaaaatgacattaagtttgcaacaaatacttgctggtgaaaacacattactagcatttcaaaaatttacaaaaatgtaacaaaatatcctaaacagctatctttatatttgtaaaggaagtatgaacaactggcttaaccagtttccactgcacatcaaacaggtggcaaagtgatagagatcatctttgatttttaagagaataataaaaa

SEQ ID NO: 469025 - DNA, 1000 bp, Homo Sapiens; identical to SEQ ID NO: 338747

SEQ ID NO: 469026 - DNA, 1000 bp, Homo Sapiens; identical to SEQ ID NO: 338748

SEQ ID NO: 469027 - DNA, 1000 bp, Homo Sapiens
tttttttttctctctctctctttattttcagtttttttgctgttatccagataattaataaaaaccaaccacgcaaaactgggtcccaccctctccttttgctcccagcctacctccccagttgtgggaacaggtctggagtgagaggcagggagtggctaatgccaccaggaagaaatgaaaactggctcagagagggggaagcctcaacagaaaaagaaataaattaaaagccctcctatcccctccagccagggttcgttcctttccccaactccccagggggcagaagtgagtgcagcacctgatgtctgcttcttccccttgtgtctggtgagatggtgcagcagggctgcagggggctgggtggggtcatgtccactgaagaactgtactatggggacagaaaaccagaaatgtggagactgaactggtatcccagagagtgcacgaccctgggcatctgggcaagggcaggcatgagacctctgaattagaagggtccagcccccactgacaggaggctacactgggagggaaggtgaaggtgctgaggaaagctcccaggatgagcctgggagtgcttcaggtatcagcttccagccagagggcgagaagtcctcctcacaaatggatgagtccattgaatccatggactttggagtgggggggatttgttccaaagaatggatgagtccactggccaatgtggggtagaggggtagagaagaccacataggaagagactccactggggatggaatgttcccctcccttgtgtaggctgagtcactggagatgagggggaggcaactgtcccacagacaagacagtaggaggtgggggtcaagagtggagactgcaccgaggcaagagtccatggatggggccaagagggggcaggagtggcgctgtatccacattcacttcagaagttgaagattccaaataggagaataagtggggagaggggagacaaggaagagggtttggccctgct

SEQ ID NO: 469028 - DNA, 1000 bp, Homo Sapiens; identical to SEQ ID NO: 338749

SEQ ID NO: 469029 - DNA, 1000 bp, Homo Sapiens; identical to SEQ ID NO: 338752

SEQ ID NO: 469030 - DNA, 1000 bp, Homo Sapiens; identical to SEQ ID NO: 338754

SEQ ID NO: 469031 - DNA, 1000 bp, Homo Sapiens; identical to SEQ ID NO: 338755

SEQ ID NO: 469032 - DNA, 770 bp, Homo Sapiens; identical to SEQ ID NO: 158782

SEQ ID NO: 469033 - DNA, 1000 bp, Homo Sapiens
tttttttttttttttttttttttttttttttttttttttttttttttttttttgtgaggcatctgaaatatttattaaagccaggcagcaagaagaataaacaaggatttttctatctacaatcatcaataagaagctgaaaagaatgtatcagctgcatctatcttggatggtcttctgactagttgctactgtccaaggaaagaggccatggggtcatctggcctctgacgtttcattctatatgcctccatttcctcttcagtaggttctcgagtttcatacatgctattgtaaggccgcttcctctcatcaatctgcatggtctccttgacatgaagaaggcgggcctcctctgcgttcagtgcctttttcaatttttcatgcttcttttcttcatcatcactatctgaactgctctttcgatgcttcttctttttctttttcttcttcttcttttcctctttcagtttttcttgatgcagctccatgagggtttgaggttttttcacagattcttccccagttatctcatttataatacactcctcagagttaacaatctccttcccagcttctccagtacaataggaatacttgaaaaaagagtgacagcatttgtatccccatcggccttctttccagtacgatccccagatatgtgtgtgattgtggatcttcacatcctcctcatacttagagcaggcaacagcccgctcctgtcctttgatgactgtcccatgtcttgagtactccacatagtcttcagtctgggctaaaagcaattcagctggaggggcatccaaatgttcttggccaccatacttttccaggatgctttctttctgctgttctttgaaatcttcttttttgactttgaaggacttatacaacagctctagctttgtaggatctgcctgtagatgcacttcagatcccttgtcataggcttcccatgcaaacaactgtgtctgagccattgaaatggtatctcctgtgt

SEQ ID NO: 469034 - DNA, 1000 bp, Homo Sapiens; identical to SEQ ID NO: 158784

SEQ ID NO: 469035 - DNA, 1000 bp, Homo Sapiens
tttacaaagttatctgaagtcttacattttatttaaatagcctccagtaagaagagagtgggccaattactaccccttccttgtaaaatgaagtaaccaagccaaggagggtaagtgcacccagcagccagccagccatgtgatgggtggggtgcctctcagtgggggcggccacgaccacggccccggcctgctgctgtgggagcatccacagtcgagcgggggttcttgatggtttcatctacagacacgatcaggcacgcagcctcagaggctgctgtcagcgcattgatccgcaccatagctggctcccacacgaaagcttcaaagttgtcagcaatgtcctcgttgttgatgtctactccataccatgtacccccctgggcatgccgagcccgcagcttgttgagaatgtttgtggcatcaaagccagcattgtcacacagctggcgtgggataatctccaaggccttggcatatgccccaatcaacagctgctgttttcctggaatagtccttgagtaatcccgcaggtacttggagagttccatctcaatggccccgccaccagccaccactgaatcattcttgatggccctcctgacgatcatgatggcatcatgcagggaccgctctgtctcctccataaactgctcggcgccgccacggagaatgaaggtgcatgtcttggccttggggcagccagtaaaaaaattgtacctctcgcctccaatctgggtctcttcaaacacctggcatcgacccagcacatctgctgacagagcattcacactggtctggattgagcctccacaggccatcattgtcctcttcagatcctcctcaggtactcggccagcacagaacatgtccctgtcagcaaagtactgggtggccacatccccaatggggagtttggacaagacaactttggctccagaatgatggatcttctctaacttgtcatagagaatgttccactcagcatcaacaattgcct

SEQ ID NO: 469036 - DNA, 1000 bp, Homo Sapiens; identical to SEQ ID NO: 338757

SEQ ID NO: 469037 - DNA, 1000 bp, Homo Sapiens; identical to SEQ ID NO: 338758

SEQ ID NO: 469038 - DNA, 905 bp, Homo Sapiens
agaaacatatacactttattgaatgccattgtagaaaagcgtgtgaggataaagggctgatgcaggactcggctgtggggacagggcgaggaatggaaggtggagtaagtggaatacaggtcaagggcagagctcctggcctctgggggcagggcgaggaatggaagatagagtacgtgggatacaggtcacgggcagagctcctggcctcaatgatgcctcctgatctatcgctgggcctggacgaccaacactgggatgatgacgagcagaatggtcatgaagatgcccaaaatcagggcccagatgttcaggcacttggcggtggaggcataggcctgggccccggtcacgtcgccaaccatcttcctgtccctagacttcacggagtaggcgaatgctatgaagcccaggcagcaggtgttcatgaagagggtgttgaacagggaccagacgacatggtcaggcacggaggtctcgctgcggatgtggatcacggtggacgtcgggggagcagggttgtggggcccccccagcatagccacttcctgctcctccttgagcatctcgtagttgggaggctggccgctgttgacaggagagaaggtttgcacaatgtggttcatggtgaccagcggcggtcgggttaccgggatggttctcagtgagccctccctttccccagtagttccgttttctcaacagtttcctcttcctggcatttgtcaaatgcagagctggccagggccagatgagggcagaacaaattcctgaggatcaaattactttaggagagggaggaaagaggggctgagggctcagaggggcttcctctctagagcccaagggagcacaaggctcatcttgttaatggtgtggaggtcctggagactgcccctgtgttg

SEQ ID NO: 469039 - DNA, 1000 bp, Homo Sapiens; identical to SEQ ID NO: 158786

SEQ ID NO: 469040 - DNA, 1000 bp, Homo Sapiens
ttttttttttttttttttttttttttttttttttttttttttttttttttttttttttttttttttttttttttttttacaatgtaaagtaatgtttttattactgttttcaacaagacagctcagggtgagggtagaggttcaggagagggaggagcacagtctgacattggcactgagaacgtttaacatcagtaaaacttttttttaaaagagaaattttacatatagttaaataattttttcacttggtgacaacattcaggcaaccaaaagcaaaacgaaatgggggggggatggggtggagagaaaaaggatagggggaaagaaggaaaaggggggggaactactatacattgatttgaaaatgtaccttgggtttcattttgtggtggcggagcccgattgcttcttttgtgtgaccttttaaattcacattgtttggaagaaaacgatcacttttgtgcaagaatgtgatttgttttggttgggttgctctctttttgtttgcttcttaattaatgaaggtcttctgccggattcctatttcaggtgacttacataaaagtttgtgtccagagtttctgctgtttatagctgagttgtgtgtctgagagagcacgcccgtttgtgtcgcttttcaagcagtccccagcaccctatagtttgtccaggcttttgggattggtgagaatttccctggccaacctccaggtctgcttggcagcgctctccagggccgaatggggcttgccctgaaagaggtcgaggttgggcagaaagtagtgagggcagcggcggcactgcaggcaggagatgagctgcagcaggatgccgttgagccggtcgcccaggcacgactcgtcccagtccgtttctcgtgggtgtttctcgcactcgtacagcagcagcgtcttcatgtggtagttgttgagcggctggccgggtagctccaggtggcggtcccgcagagtcttcagcactgagaggcacttgtttc

SEQ ID NO: 469041 - DNA, 1000 bp, Homo Sapiens
tttttttttttttttttttttttttttttttttttttttttttttttttttttttttttttttttatcagaaaaagtaccctctttatttgcattgcagaaatgccagggggctcggacatgggtgcccacagggtaggtttccacccaggtcgtcatcatctggcaccaggagcctgggggggggtgcccggcggcagaggctgagaggtgcaggggtgaggtggacagtcccctgagccatccctgtggggcacacgggccacctgtccagcacttgcgctccacgctgaccatctcacaggcgctccaggagagggttgaggccccccaaacctggcctgcagccatcctgggtctggcctccgaggagctggcggcgggcgcaccgtgtgccctggcctgcagggatggcgcttaccctcagcagcctgtcaccgtggggtccaggcctgagcgcttggagatgcgcagcttgactacctcctcagagcatgtgggatggatacccacggtccgcatcacctgcgcataggaagccccacacttgatccccagagcaaatccttgagtaacttcgcctgcgttggggccaaggaaatgcaggcccagcaccagctgtgggggctccctcaggcacaccatctttacataacactgggatgcatctcgtccagccaccgtgaactccagtggtttataatgggcgtgatagacctcaacatgctcctgcccgtggcgagccactgcctcctcctcggacagccccacacagccatactccagcggggtgaagacggtcgtgggaacattgtcgtagtccatcagatctgaggacccgccgaagagccgctgcaccaggagcctcccggccatgatcgctatgggtgtcagctcaggccgcccctccaccacgtcaccaatggcgtagatgtggggcacagaggtggcttcccgggagtccaccaggatcttctgagtgtcggggctagtatctaccc

SEQ ID NO: 469042 - DNA, 857 bp, Homo Sapiens
aagctgaaaatcacaggctgatagcctccattttaattaatattctactattcacacttctattggtttttaaagatggttttatataaggtatttcataattacaattttaaaatgcagtctgtattcacattaatgaacaatttcaactaatttttgacaagggaaaaatacacatactttgctttactctcatataaaacactgattatttggctgtagtaatccagatttaagctgttgacgagtcttcgtaaaggacttcatctaccttcatgtcgttttcattcactgggacctggaggcaaatctgttctttgaaagccaacgccagggtgtagggcttcacttcctgatgctgcaaacagcgcttcagataggcatcatagtagcccttgcccctccccagtcggttgccatgtttgtcaaacccaaggcctggcatgaagatgagatcaagtccccctgtggacaaggcctcctcccgaacatcaccctcaccaggctgagggatattccaggatgttttgggaagtaaagaaatttcctctggtgattctattctcaccatatccatgtgattgctctggaaccggtaccgagggatgaagcagattttgcctcgttggaaaatgtccttgatgatctcttctgtctcaatttcatcttgcatgctcagaaagatggaaattcttttggacttttgatactcactgtgggcaatcaccttctggctcagtacgcgggactggcgtagccgctcctcggcactcatcgcccgcagacgctgcttcagctctccccgcaggctccgcttggcgctgctcaccgctgccgccgccatctcacgcccacgc

SEQ ID NO: 469043 - DNA, 988 bp, Homo Sapiens
aacagacactgagattcccttttatttttttttttaataaatttaagaacagctctaccttctctcctccccccagagcaactaaaaccaactaaaaggggctatggtctggggggcagaaggcgctaggagtcgtaatcttcttcgtcctcttcatcaggtgctgaggggcccgggggcgctgggggcaaaggcagagtagaggcgaagggcaggaagggtgtcggggggctctgaaagtgggcagaggggtggctggcctggggtgggggttgtgatgtctcctcttccccatcagtatctgtgtcctcagattcatcctcctgctccgagtctgtcccggacagcttcttgtccttgcttttcgttcccatcccaccgttcttccggccgccgctgcctggcttccggcccctgcgggcgcccttgtccccatccatgtggttgtcttccccgtccccctgcatgtcgggaacagatgccaccaggtccttcaagaagtcaaactgctgctccagctcgatgcactgcttcaggtgggatgtggtcatggtcttcgcgttccgcgactgggtcacctggcaggccttcttcaacagcgactctaggaagagctcgagcgcccgggagatgatgacaggcaccgccgccgccaccttcccaatctcttcgtccgtctgcatgatcttcttgatccgcgccggcgggaaccgcgcgttgtacttcttcttcttgctcggcatctcggggcctctctcgccgcgtcgggtccagcgccgccgcccgcagcctcccggctcccgggcctgctcgccgcccgcccgtcgcggttcccctgggtcctggtgccgcccgctccgcccccgccgtttcccgcggagtcctagcgccgccggttaagacgccgctcgcagggccctagtgccctcctcttgaagcctcctggccggtgcgcgtccctccccagtctggaccgccgctcccgccc

SEQ ID NO: 469044 - DNA, 1000 bp, Homo Sapiens; identical to SEQ ID NO: 338762

SEQ ID NO: 469045 - DNA, 1000 bp, Homo Sapiens; identical to SEQ ID NO: 158787

SEQ ID NO: 469046 - DNA, 1000 bp, Homo Sapiens; identical to SEQ ID NO: 338763

SEQ ID NO: 469047 - DNA, 1000 bp, Homo Sapiens; identical to SEQ ID NO: 338764

SEQ ID NO: 469048 - DNA, 1000 bp, Homo Sapiens; identical to SEQ ID NO: 338765

SEQ ID NO: 469049 - DNA, 1000 bp, Homo Sapiens; identical to SEQ ID NO: 338766

SEQ ID NO: 469050 - DNA, 1000 bp, Homo Sapiens; identical to SEQ ID NO: 158789

SEQ ID NO: 469051 - DNA, 1000 bp, Homo Sapiens; identical to SEQ ID NO: 338768

SEQ ID NO: 469052 - DNA, 1000 bp, Homo Sapiens; identical to SEQ ID NO: 158790

SEQ ID NO: 469053 - DNA, 1000 bp, Homo Sapiens; identical to SEQ ID NO: 338771

SEQ ID NO: 469054 - DNA, 1000 bp, Homo Sapiens; identical to SEQ ID NO: 338772

SEQ ID NO: 469055 - DNA, 1000 bp, Homo Sapiens; identical to SEQ ID NO: 338773

SEQ ID NO: 469056 - DNA, 1000 bp, Homo Sapiens; identical to SEQ ID NO: 338774

SEQ ID NO: 469057 - DNA, 1000 bp, Homo Sapiens; identical to SEQ ID NO: 338775

SEQ ID NO: 469058 - DNA, 1000 bp, Homo Sapiens; identical to SEQ ID NO: 338776

SEQ ID NO: 469059 - DNA, 1000 bp, Homo Sapiens; identical to SEQ ID NO: 338777

SEQ ID NO: 469060 - DNA, 1000 bp, Homo Sapiens; identical to SEQ ID NO: 338778

SEQ ID NO: 469061 - DNA, 1000 bp, Homo Sapiens; identical to SEQ ID NO: 338779

SEQ ID NO: 469062 - DNA, 1000 bp, Homo Sapiens; identical to SEQ ID NO: 338780

SEQ ID NO: 469063 - DNA, 1000 bp, Homo Sapiens
tttttttttttttttattttatcataaagtttaattatgattcagaaaaaatcgagcgaataactttctccgaaaaaatatattgactctgtatagaccacagttattgggggagaagggctggtaggttaaattatcctattttttattctgaaaatgatattaatagaaagtcccgtttccagtctgattataaagatacatatgcccaaaatggctgagaataaatacaacaggaaatgcaaaagctgtaaagctaagggcatgcaagagaaaatctcagaatacccaaagtggcaacaaggaacgtttggctggaatttgaagttatttcagtcatctttgtctttggctccatgtttcaggatgcgtgtgaactcgatgtaattgaaattcccctttttatcaataggtgcttctctgtacagctcatccacttcctcatctgtaaaccgatcccccatggttgtcagcagctctctcaagtaatcttcctgtatggtgccagttgcttcttcatcaaagcaagcaaaggcatttctgatgacatcttcaggatctgtgccatttaacttctcaccaaacatggtgaggaacatggtgaaattgatggggcctggagcctcattcatcatggcatctagatactcatcagttggattcttccccaatgaagcaagcatatcatgcaaatcttccttgtcgatgaaaccatctctgttctgatcaatcatgttgaaggcctctttgaactcctgaatctgcgactggtcaaacatagcaaacacattggatgttgcacgctgagggcgcttcttggtcttggtctttgttcttttgctcgacatggtggtggttaagtcccggcacagctacgagaatccgagcacctctccgagcccctcgctgccgctatcacaccaccctgctacccagagagccgctaaaaaccaccgcttccggcctctgcttagcaagccggaaggaagcccggtcacct

SEQ ID NO: 469064 - DNA, 1000 bp, Homo Sapiens; identical to SEQ ID NO: 158792

SEQ ID NO: 469065 - DNA, 1000 bp, Homo Sapiens; identical to SEQ ID NO: 158793

SEQ ID NO: 469066 - DNA, 1000 bp, Homo Sapiens; identical to SEQ ID NO: 338784

SEQ ID NO: 469067 - DNA, 1000 bp, Homo Sapiens; identical to SEQ ID NO: 338785

SEQ ID NO: 469068 - DNA, 1000 bp, Homo Sapiens
tttttttttttttttttttttttttttttgctggagcaaaactttactgtcagaggctctgctgggccacaggtcttcagaacaccgggctcgcccggcctcctctaaggcattcaataatattagtaattaaatagcaacgctcatcccccaaccggaatgtacaacagaggtcccattgtgccatgtggtcccaaggggtctggtcccatgaggtctggtactcaagaggcagagggggctccctgatgcagaagggttaaggccacaaaggaaaaggagaagggatggggtctggggacagctgagctggtccatcacatccaggaatctggctcagccctcggggtgactgagtgcagggcatgccatgtccccagctctgcgggtccggaggggcggcgggggccccgaggcgtggggatacgtgagggtttacggtctggctgtgtgtccatccgaccccgtgcccaggtcctcgagggttcagtgcaagccagggggctcccaggtgcatctagtggcccccccatgccagggcaggggctgccttcatcggaggagctggaaagggcttggcttcggggcccaggcagcccattggccgtccggccagagtccccaggttggccacatttgccacccaggacgctgagggacgaagaggaggaactggaggaacaataggcagagtcaggagctggagggtcgggggcccgagctgggtcaggggctggtccagtgggggtcacgctagcaacagcctcaagggcccgggcattggccaggaactcctcttccaggcgccggaacagctgctgctcctgctgcgggtcgagctgcaggggtgtgcggaagatgctggccggtgtggtgcccaactctggactggggctggagacccgggaaagccggggtgctgcagggctgcgggcacggggagtctggggggtgctcctgcccgagcccccactgcccctgccccttggcacccatgagt

SEQ ID NO: 469069 - DNA, 1000 bp, Homo Sapiens; identical to SEQ ID NO: 158794

SEQ ID NO: 469070 - DNA, 1000 bp, Homo Sapiens; identical to SEQ ID NO: 158795

SEQ ID NO: 469071 - DNA, 1000 bp, Homo Sapiens; identical to SEQ ID NO: 338790

SEQ ID NO: 469072 - DNA, 1000 bp, Homo Sapiens; identical to SEQ ID NO: 338792

SEQ ID NO: 469073 - DNA, 1000 bp, Homo Sapiens; identical to SEQ ID NO: 338793

SEQ ID NO: 469074 - DNA, 1000 bp, Homo Sapiens
cagtctgtagaaatctgttttattcttaccaacatccaatatcatttccatggcatagctctgggctggtcccgtggaagaagattccaaatatgtggtgatttctggtggaatttctgcccccttggaggggaagatgactgcatggcatgctgggagtgcaggcacatggcaggagtgagggtggctggagctgaggagccagtgtgcctcagtctatgctgaccttggcctttacaccctccttagtgtcagacaccagtgcgccccctgctggtggggaggggaagcagggctgactccaccccatcatgggagactcccttttggtttccatctcatcatgaagagcttcagtccacggggcgttctcctcccattttcctgggttccctgaacgatgagccaagtaagctgtcttagctggagagatgacaatggacttggacaaagtctggaggaagcagggcagtgtctccctgcctccagcccagagttcaggtgaggggactcagtttgtggtaggaagagtcctggctgcttcgaagccccttctcctaggcagccccaccttgttctaagagaaaagaccctgtaacgtgttccctgctgggggctgacagtgccagctgctctcgcagcctccagaaccatctggggcttggaggcagaggtgcttcctccgtggtgtccaggcgggggtgggctgggagcgactgggaatggaaaaagaggtgggcagctcattctgcaggtccatgcaaccgatcacgtggtccagttcagaaggccgggtggctccttgggctttaccctgagcgagacgaggcttggagacttatagtcaccatctgaggaaggctcaaagctgtggccccccagggtggggggaaagccatggatggagtagatgccagggtgagccgcagaaggggctggcacccccatgaagccagccacactcccatgggggtgggaatatggagacatgcatggggag

SEQ ID NO: 469075 - DNA, 1000 bp, Homo Sapiens; identical to SEQ ID NO: 338794

SEQ ID NO: 469076 - DNA, 1000 bp, Homo Sapiens; identical to SEQ ID NO: 338795

SEQ ID NO: 469077 - DNA, 1000 bp, Homo Sapiens; identical to SEQ ID NO: 338796

SEQ ID NO: 469078 - DNA, 1000 bp, Homo Sapiens
aaaatgaacttttttggattattggttattttagatttatcaacaacaccatttcattagtccacagtatagaaagactacagttgaaaataatattccaccaggtctcatttccaggatcctatattacagaatacaataaggaaaaggtatattcaaaatgagtaacaactaccaaccctgtttacattgtgggcactgaatcaatcgccaattgaagctgataattttctttcagatcaagtttttcccacacctaaagaaaattccattatataatacagttataccatctgtaagctatgattttccaaaaagaatcacaaaaaaagttaaaaactaccaacaaaggcactgaactgctatgacttgctttttttgttgaccaccaaccttttttttgtaaactaggtgaaaagtcacatcaaaagatgaaatagaatccaatccaaaaagattggaccccaaaaggcactgcccaaactactgatttgaaatgctcaaaatgcattctcttcatttgtcttcccccaatagagcattcaatatttaatgacatttgctgtacattatacaaaagggtctgtaggttgaagtgaacgtaactttccacacaagcaaaatgtaaatctgcaaaatgaatcatgatcacatatcactcatatgcagatataacataaaacctaaggttcaacaatactattacaccaaaagactagactttcaggaaacccttctacctaaacccattctcagacaaaggctaaagcacattctgcaaaggcaaaaggaaacagaagacagtatttccagaaaagactagttacaaacaggagcaaacctgggctctttactcaccattttaatactgccgccaactataacagattaaaaatgtacacatgacaaagtggaaaaaagtcccaaaatgcaacagtttcagcaaaagaacatactggctaaggattactacagttaacatcggtacagtaaaaacgat

SEQ ID NO: 469079 - DNA, 1000 bp, Homo Sapiens; identical to SEQ ID NO: 338798

SEQ ID NO: 469080 - DNA, 915 bp, Homo Sapiens
cacatgtccctggagaaagacatgtatcttcagattgaagaaacttgagtccgtggaaggataagcagactgacagcagatctctcagtggcaattatagaggtcagaagacaatgggatgacatcttcaaagtactccaggcaggctgccctgaggcccccatgccatggggaccatgagcatcagcagttgccacatcagcaggtgtttgcccctgcataatatttgaagccagataacttcatccaggggtagatgggttgtgaagcaatgagtccaggagccgaggttgttcattcagtttaaactcctccttggtcacttcttctttggggttggcctgatcctccttttcaatcagaacctagaagctttgacgggggaccccccacggctggcgcctggccctctgagggggctgctgcgcggctgttgcttggacttctgagggggacgctgcttggctggcggtggtcggacctctgggcggggacgtggctgacgctcagacctcggaggggaccgtggctgacgctcagacctcggaggggaccgtggctgacgctcagacctcggaggggaccgtggctgacgctcagacctcggaggggaccgtggcttggctggcgctctgaccaccgcggggggcgcagctggctgttgcttgggcctctgaggggacttggcacggcggctggttctggtcttctggcaggcgcagcagatccagtcctcctctttcttctggtagaagcagccgctcttacagatgctgtatttccgatccactatctccttcttggaattgaggaaggtgaacggcgggcagcagtgtatgctgaagtgttcggagtacttctggtttttggagagtctgggaccctccttggccggtttctgactcatctcactgt

SEQ ID NO: 469081 - DNA, 1000 bp, Homo Sapiens; identical to SEQ ID NO: 338799

SEQ ID NO: 469082 - DNA, 1000 bp, Homo Sapiens; identical to SEQ ID NO: 338800

SEQ ID NO: 469083 - DNA, 1000 bp, Homo Sapiens; identical to SEQ ID NO: 338802

SEQ ID NO: 469084 - DNA, 1000 bp, Homo Sapiens; identical to SEQ ID NO: 338803

SEQ ID NO: 469085 - DNA, 1000 bp, Homo Sapiens; identical to SEQ ID NO: 338805

SEQ ID NO: 469086 - DNA, 1000 bp, Homo Sapiens
tttttttttttttttttttttttttttttttttttttttttttttttcggggttcaagcccggggaagaagactgaggaagagtcctaagccctccccagagatgctttattacatggtttcatcagtcatcaatgatgggtccctatgcccatgcgaggagacaggaacatctgtgtggtacatggcactgttcccctctcagctacgcagtcagatgggggcagggggatgaatgggtgcttggcttccctgctgttgggcaggctctgagatctcagcagacagaaatgaaagcctggcaaatagggaggcaggaatgttcaagcatcggtgacctccatgttctgcagcctgttttctagggtgacgtctcttgctgctgctttctttttgctgccctcatgttgcttcttctgcttctttgatggctcctgctcaatgggcgcaggcttcacaaaggggatcagttcttgcagtcctggcggcatgaactccttcaatttctcaggcacagtgatgcccttctctgtctggtagttctccaggatggcgcagatggtacgggtagtggcgcacatggtagcattgagcatatggacaaactccaccttgtccatcatcttcttggtttgcccatatcggattcgaagccggcgagcctggtaatccgtgcaattagaacaggagaccaactcacggaaggctcctgagcccggaaaccaggcctccaggtcaagcttcttactggcagcatgattcaaagaacctgagacaatattcacaatgtggtaaggaatccccagggactggtagaactcctctgcggtggtaatcatctcttcaaacatctcccatgacttgttgtcatggggtgatgagtacacaaactgttcaatcttctcaaactgatggactcggaagatgccacgggtgtcacggccatgggagcccacctcctgacggaagcaggtagacaggccagcatacttgatgggcag

SEQ ID NO: 469087 - DNA, 1000 bp, Homo Sapiens
tcactagggcccaggggcaatcagctccatactggtggcttcatcttcattttgtattgagctagatgtcctcatgttgactctatcactaaggcctctagtgacactctcataggacggtgggaatgatgtggcagaagcagtttcagatttgtctgggagtacacaattttcatttgctgtgaatgcaacaaaaccttcatctgggagtgatgcagcctcctcctcagctctgggcacacatggggtgttagagagtgccatggagcggtgcagcacatagctccgataggccttttgaatgacagtggctgaaatgtcttcttgcttccatcggagagtggttgctattggttcataggatgattttgaaagattagttgccataaacttctcctccatatttgccttcagagaatccaactccccggattctcctaggacattcttggtgaaagcaaaaaggatgtccaagcagtggatcttatctccagggaccaaaggcaggtccatctggatcagtatatttcgattgggttttgggattctcaggggaccagagagagtgtctgcaaagtccgagagagcagaaaaggtaataaactgagtggcctctgggtcaaacttctcccaggtctcatagaacatgtcaaagtcgtcctcactcagaggctcagtgctctcctccgtggccacattgaagttctccagaatcactgcaatgtacatgttgaccacgatgaggaaggagatgatgatgtaggtggtgaagaagatgatgcctacggctgggctcccacagtcccctctggtgccattgctgttgggcagattggggtcacagtaggggggccctgtgttgaggatggggctgaggaggccatcccagccggccgacgtggtaatctggaagaggcacagcatgctgttggcgaaggtctggaagttgaacatgtcgtcgatgccagcctcccacctcacatggggaaagctggacata

SEQ ID NO: 469088 - DNA, 1000 bp, Homo Sapiens; identical to SEQ ID NO: 338807

SEQ ID NO: 469089 - DNA, 1000 bp, Homo Sapiens; identical to SEQ ID NO: 338808

SEQ ID NO: 469090 - DNA, 1000 bp, Homo Sapiens; identical to SEQ ID NO: 338809

SEQ ID NO: 469091 - DNA, 1000 bp, Homo Sapiens; identical to SEQ ID NO: 158797

SEQ ID NO: 469092 - DNA, 1000 bp, Homo Sapiens
ggtggtttaaatatctttattgatactaacctcacccaccatcctgtggccagcagttctggggagcccagtatccagaggcctttagactggcttttttccagtctaaaaaactgtttcctcctagaggccaaggggagggagggcctgtacagtgtcctttaaacgctccccgagcgccttttcggggccgtctggcgccctgggccttcgtgggtgggcgttcctctcaagcccctcgcctcaccatttccagagccctgggagttgggctttggcagggagaggctgggctcgagcggcgagaggcgcccggtgccggtgccctgaggtcccacaggtgcgagccaccgctgcgcgaagtcagtctagcggccgggcggcgggtcacaggcagaggctgagctccttgcgcacacggcagcggtggcactgtactacgcagcaccagtggaagcggcacaggcagttctcttcgagctgcacgctctcctggcggtgcccgcggccgcagcacagcaggtcgcagccgctgaggtccggggcgctgctattgcaggcgcgaccgcgcgtgccgggggagccggtgcgtcggttgggggcgcagaagtcgggcgaatcggcggcgtagaggaggtccgctcggcccggcggcttgagcgtgcggacggcgggcagcagggccttgccgtcgttggtgcccatgacgcgtgaggcgccgtggaagcgctccagcagccgcgcgcccacctcgcgaaatggaggcagcttctgccagcaggtgcgcagcgcgcatgatcccgacagcccgtggcatttgcactcggtgcgcgtgtggctccgcacggccagcctgcccgcctcgttgttgtgcagttgcaccaacgcgcggatgtctccgcgtccccgcttgtgccgcgcgtccataaagagcctcgacttctcgtccccgaagtccacgtcgtcgccgcagcctccccactcccaggcggcgctgcct

SEQ ID NO: 469093 - DNA, 1000 bp, Homo Sapiens; identical to SEQ ID NO: 158798

SEQ ID NO: 469094 - DNA, 1000 bp, Homo Sapiens
ttaaaaacaaagttgtttcccgtatttccaccttcgttcctagagatacaaagtttaagaaaagtagattgtgactgtaacacgatctcttgttatttgttttaaatttgcacagaggaaaacttaatattctaaacaattaaatttagtattccaaatcattaaagtcttttaatgctcttatttaaaaattttcaaaattacatatgttgtttaaatagtatttatatgtacaatcctccattaatatgagtgaatttcccactgtaactaattattttcccattttgtaactatactataagaaaatagttttaaatctcaaactattagtttactgtgcaaaatttgcttttgtatgatttaatagcattgaattacaaatcaaggaatttcaaagtagttttcatgtctactattatgagatattatataacatataaacacattggcagtaaagcttccacttacatggtttactgtgaaaaaacaaatcacctggaattaatatgaaatagaatcccctaataaatattttatattcattaaaagaatctcatctttctcatgactttgcatagctaaccaaaatacaaagcttttccatatgccattttaatacattttccatatgccattttaatacaatggtcatcatttgtataccacacgcacacatatacacatacacacctatggcagagacactttcttctgaattgaccatttgcatttgcatgcccccagagacttaatcttgctgctgatgatgaatatcctcatgcctaagaattttatagataacccagtagaaaatattaaaaatcaaaaaagctaatgggaagcaggctcgggagatggtatcaatcttcttggcccggtcgataaagaccttcctcatttcatcaggactttttggcattacctggacagggtggttggggccctttggagtcatgccatcctttgcttgtagacatggtcccattccataggctgt

SEQ ID NO: 469095 - DNA, 1000 bp, Homo Sapiens; identical to SEQ ID NO: 338814

SEQ ID NO: 469096 - DNA, 1000 bp, Homo Sapiens; identical to SEQ ID NO: 338815

SEQ ID NO: 469097 - DNA, 1000 bp, Homo Sapiens; identical to SEQ ID NO: 338816

SEQ ID NO: 469098 - DNA, 1000 bp, Homo Sapiens; identical to SEQ ID NO: 338817

SEQ ID NO: 469099 - DNA, 1000 bp, Homo Sapiens; identical to SEQ ID NO: 158801

SEQ ID NO: 469100 - DNA, 1000 bp, Homo Sapiens; identical to SEQ ID NO: 338819

SEQ ID NO: 469101 - DNA, 1000 bp, Homo Sapiens; identical to SEQ ID NO: 158803

SEQ ID NO: 469102 - DNA, 1000 bp, Homo Sapiens
ttttttttttttttttttttttttttttttttttttttttgaccagttaattttttattttttgtagatatgaggtttcgccatgttgctcaggctggtctcaagctccggagctcaagcaacccgcctgcctccgcctcccaaagtgctgggattacaagcacgagccattgtgcccagcctggcacttaatttgtgaaagccacaccatttctaacaggaacataaaaataccaggtcatttcagaagccccagacttgggcaactccactcactaacttgcagcgtgctacctcaaagccagtgtggcacgaggcttcaagcacagcactggggctgcgctgacagatcctggttcaaatcccagctcccagccctagaaccttacagtgacctaagtgcaccaagactccctcaatgtgttctgctgcagccagtgagtcagtgcacgtgcccggcccatgagctaactgaactcatggcttctgaatctgaatgtctctaaatatcagacaaagctgtatgaaaaaagcccccaagactctgaaaccagatgggatgccagttataaaacttgtctttaaagttacccatcctggtgaatgaggcatcaggaagctactgcagcttgtgtctgattcagaaaggtggatacctttcctcatccatcacaaggggcacagccgacactcctgtaaattccagcactttgggaggctgaggcaggagacctcatctctacaagaaataaaaaattaggtgggcatggtggtgcacgcctgtggtcccagctactcagaaggctgaggcaggaggatcgcttggccccgagaagtcgaggctgcaatgagccataatcgtgccactgcactccagcctgggtgacagagccagaccccgtaatagttgggcaccaagtttaagatttattaattttctcctctcagtataggcagcaattcaccattttctttcagttccttcacaatatccaatcct

SEQ ID NO: 469103 - DNA, 1000 bp, Homo Sapiens; identical to SEQ ID NO: 338822

SEQ ID NO: 469104 - DNA, 1000 bp, Homo Sapiens; identical to SEQ ID NO: 338824

SEQ ID NO: 469105 - DNA, 1000 bp, Homo Sapiens; identical to SEQ ID NO: 158804

SEQ ID NO: 469106 - DNA, 1000 bp, Homo Sapiens; identical to SEQ ID NO: 338826

SEQ ID NO: 469107 - DNA, 1000 bp, Homo Sapiens
atccagcataaacctatctgtgtttaataaaagaagggaagagaaaggccacacatacgctttcataagcacagaaaacttctggaaggctttgcgaaaaagagccgactggcagcttgcgggaggcctttacccttcaacggactccagactcctgtactcttttttaaccataagcatgggttgcttttatgtattttttaaaattaatgttgttttaaacaactttgatttaaagatggtggggaaaagacctttggtcgttgtccctcaaacactcacaaaactataaggcgaaaaacaggaactcaaaccttggatactatgagggatccatggcctccagccccagcaggtgaggctggcaagcagcgaggcagggcctccagcctgggcgcaggatgtcccccgggcacggcagtggcagactggagggggctggcacagcctgcagaaagggccgggaaacccctggaccccagccctctccccgcatgaggagcctcgtcaggagaggcttagccactccaggaaaggcatttgggggccgagaagaaagccatggccccaggccccgtgagccccgcagtcagagcccaccgaggccagcagcagatgtgaggcccggagcagccgcgggcccaggagagctgcttggtgatctgcaggaccgaggggacgggggcggagaggctggagggcggcacacccgccagcgtttgtggaggcgcctaagtggaggacagcgtgggcgggcgggcgggggcggcgcgggtcacctgcagggagagaaggggctgggccaccgcggcaggcaggacgatgggcgccgcccctaagggcctcgagccctccatccacgcagacggcggcggtggggctggctggggctgctccctgttgcacgctcatgaggggagggacatctggtcccggggtcacctgcgacccgcgatcagtccagcctaatcctcctccccggccctgtgtgccctcgcag

SEQ ID NO: 469108 - DNA, 1000 bp, Homo Sapiens; identical to SEQ ID NO: 158805

SEQ ID NO: 469109 - DNA, 1000 bp, Homo Sapiens; identical to SEQ ID NO: 338827

SEQ ID NO: 469110 - DNA, 1000 bp, Homo Sapiens
ttttttgggtctttgagaagacagtgtcaattttattgctttttgaaatgctgtgtaaagtgtggtacttaacaatttgcacattgggcaatttccatctgtaagtttaaatatatgtgataagaaaaagtacatgcatattaggaatatataaaatttttcaaaatcatcatctttacattagaaatttctttacacaaacatcttaacttttaaaaaaagtagcaaatggctataatgctctaagactgcagaaaatccagctttctgtttaagcagcctttcactgagagacacgagtgatggcagatgaaggcctcttaagaatagactcaacagaaaatgacagtggttcattcaccgagagttttgttccaacttgtttggctacaaaaaggtcttttgcacatctatctattgtaaatgtgtacttctggttgtccttaactaaacactctctgtgtttcttaggggtctcttcaaaggcctctttgacaaatggtgttttcaactcaggacccgatttgtcagtaagtgtttgctggaataatgagtggaatggattatgtctaagtggcagagggtgcctggtgttttctttgctgatcttcgttaagacatgcccttgagctgccagggagtccgtgtcaacaatgggagagaaattccgtcggggtggggagaacgcggacctctctgggacagcctgatgaccctgaaggtcacttctcgtggtctggatctcaggagtgtgaggcagcaccagggaaccttccaatttcgatggcatcatgtcctgctctgcactgagtccatcctggactcgtgctcccttcaagtcccagctggccccatgcttcagggcttgaactgaggtggtggcatttagcaggcattgctggtagaggagggtgtcgctaatggggccacacttgggccaaactaaaaatcttgaggacaagggatactgtctataagttgtgcccacgctgacattaga

SEQ ID NO: 469111 - DNA, 1000 bp, Homo Sapiens
tttttttttcaaaagtttatttagtatcaagcaagaggagactttgcttaacactacagaacatttcaagacttgagttacaaaagaataccacattatttgcacttgtaattggcttccctttttacgcatgttggcaagagaaaaaaaaactagcatatggctgaaagataaaataactaaattctatggaaacctttaaaatgaaaggtgaggcttatgttaaaagaatagattaacatatttagtaaacctattttttgtttaacactagttaatcaaagttattttttttccttttgatgacctattttttcatatacagactggaaataacaaaattttacatgtctttttttctttttttctgcccaggttgatgtttcaacaaagtagttttaagttccatccattcagattttaagcattttgatttatttaaaaagggattgttcatagaaaaaaattactttgaacagtatacaggactggtggagattggctatttcacaacatcagacagtacaatcagtatctgccatatggctggtctctgtagacgccctttgctgtcctcgctgaaggtgccttgtgtcttgagttagtccactcttcttgcccgtaggaatcataagtctcctcactgagtccatgtccgtaatcatagtaatcagcaccactttgggctggggtgctatagctgttatcataggaatcataactctgttcatcataagcagtgccatatccatcatcatagtcatattctccataagtctcttgtgtcgggggtggcggtggaggtctgtacccagttggggggactcctcttgctctgggagtgagaagtcctcttccccgactcactggccctcgggtggacaggactcctctgggagttggcgtccctcgtggtactacaactccaactggccgggctgtaactcctccccttcccctggttattgctggggctggtacacctcttgtacgcaaggtg

SEQ ID NO: 469112 - DNA, 1000 bp, Homo Sapiens; identical to SEQ ID NO: 338828

SEQ ID NO: 469113 - DNA, 1000 bp, Homo Sapiens; identical to SEQ ID NO: 338829

SEQ ID NO: 469114 - DNA, 1000 bp, Homo Sapiens; identical to SEQ ID NO: 158806

SEQ ID NO: 469115 - DNA, 1000 bp, Homo Sapiens; identical to SEQ ID NO: 338831

SEQ ID NO: 469116 - DNA, 1000 bp, Homo Sapiens
agtttggagactttaacagttttatttcttagctatgaaactcatatgctagtaatatatgacatatgtgtgtatgtgtgtgggtatatacatttacatacgtttgtgtggcagacattggaaaatttcatttttaaaatgcaaagccaccaaagagtccacttcagaaatgctgcttagattcattacagtcttaaacgctgttttgcacatttttcaagcattccatggaccactggaattatcagcctcttataattcagttttgcccattcatagtccctggtgctagttattctggattaatcaaagcaatctgaacatctacctatacaaaagtcaagccccaaggtgaggcagagcctgatctcatttctgtgaggtgcctggtggtgccagcacttgttttcactgctgctctgatctacactctttgcccagtagtcagaagagccttctgagcttgggcacccagtgtgccacctaccatcaacagctttgttggccgtgctcacctcttcaaccttcagccccagtcccaatcaaggagaacctgagatcataggagtcacatgtcatcccccttggtttcagcattcttggagatggaggaaggaaagtccttaaaaattttagaccccctacttgggctttcagcatgagtgttcaagaagagaacagtacatgttcatgcctgagaagaagcattccaaaccagccagagtgtctgataacttctccatgagaatgcgcaagctataaacaaagcctgcctcaccacatcaagagggcacagccatgacttgcaaattccagagcagcttctcgaaaccctggcaaggcctataactggaacatgctggtggcctccacattgtgggaggcagaaaaagtcttggaattgtcctcagaagatttccattgatgtgagaccccaaggtaagggaggcaaccaatgtccttcacaagtttccagaagttctttcgaaacttcaggctg

SEQ ID NO: 469117 - DNA, 1000 bp, Homo Sapiens; identical to SEQ ID NO: 338832

SEQ ID NO: 469118 - DNA, 1000 bp, Homo Sapiens; identical to SEQ ID NO: 338835

SEQ ID NO: 469119 - DNA, 1000 bp, Homo Sapiens
ttttttttttttttaaaggtcctgttatcagcatttttattcagtttagtctatgctagaatataaatacatgacagtatgtcttttcttgtcaagggtagccttttacataactaaaatttgtggctagcagtttatataacaaaagaaaagctaaatctgtaaattatcagaaaagaaccaaggatataggaaaataatacatttatataaattacaaaggacagttacaatgaaactccattagtttcctctcaacccaattttacaaaataaagtgaacatgtattattctgtgagttgttaagagtacataaacactgtgggcccattcaaaagacagtggtcaaagacaaaatgttatcttcatgttatacactgttcttagttctttactggagttgagcttcctttcatagtcttctttaggtggtggtaatttggcaagattttcatcaagaaatccagctgtagtgtctggggctgcggtcgctcagtctgcacccgacgaaggcagtctgcaccatagatcaccgtattctcagggatgacttcaaatgtatttaggttgcaacaagccccaatgatgcagccacttgtcaatattacatttctgcctacatatgcttttgattcaatgacattattatctcccatcttcatggcttgggaataacagccaacttcaaacacattattggtgccaatgatcataggttttggttctggatcttcagtgtcaggagtgatattatctgggtaagcatttatgataagggcctgttcttctattaggttcccttcgccaatcactattggcccggcttccgcaataattcttgctttagggtggatcactgtccgaggtccgatagttacatctcctctgatttcactttctacacatacaactgctccaggagcaatcttcacactcttttgagtcttctccgccatggtacggccccaattggaacgtagatcgacaccaccgcctggg

SEQ ID NO: 469120 - DNA, 1000 bp, Homo Sapiens; identical to SEQ ID NO: 158809

SEQ ID NO: 469121 - DNA, 1000 bp, Homo Sapiens
tggtattttcagttagattctttcttcttagaggtacagagaaagggaggaaaatagctacagacatggtgtaagtaggtcacagcagtttcaatgcaccaaaaaatgtgacatctccatccagtgatatttgtgcattttctcttggtattgcaagttggagttcatctccttcttccagttttgcaatgccagctgaatagcaggaattattgggtagtgtttcaggcatattttgaatacatcgaaacaaagtcaccagactcaattcatccccaaagacatggaccttcttcctctgaattagatgtcccatggcgtaggtcttatcagtatataaaacctgaccatatataaaaaagtaaccagtttctttgaccaatattttattctctttttcttctagggcacttccccttttaaagctgagaagccatggaacaaatgtgtaagatcctttttgtatagttggtgtttcactgtctgcaatcagttgcaagcagtcttgagtgactgtttcttctggaccctgaacggcacgcttatttctgctgttctgactggagttgccttctcctggagctggtggttcaaagattttcagtcccgcggtgacagctggagcttcctccaggccggccttgggggctcctgctcctgctggcagcttctccgcgtggtggccctgcagctctgcccggaggctggccaggtccccttgcagggcggccacctggtagaaagacaccaccgtgaggcagcaagacagcagtgccagcagcaaggttgcagccagcagctttccgtctttggaggatcggacagaggggctttccttccgtgggaggatggaaacacactccttcagtttcatttcttctcttttcttaaggcaagaagtaaggcgtgactgctccctttctgtggagtcatccatatcactacttgaactttgaaggttggggcctttagaataagtgaccacagggaatggatcatt

SEQ ID NO: 469122 - DNA, 1000 bp, Homo Sapiens
ttttttttttttttttttaactttttaaaaagttttatttcaagaactttgttttttactggtatttcaaaaaaacgtgggtcaaagtacaaaaaaaagtcagttgaataacagcacaggtttagaaatcacagcagcagaagcaatgtacagacagcacagaaaaaacaacccaatgtatgcaattctgttcagtttctttgcttattttaagtatttttttgcctcctgtacaaaatacataaaagcatgccatgagatcagaaaaagaaaagagtttaacaaatggttacaagaaatagactctgtacaagaggagataatgtttcttcccctaccccccacccactacccccgcttcctctcttcttgctctgctttaggttaaattattctgaagacagttcacatccaagtcagcctggtcacctttgccaccctcaagtttgggcgacatggagttctggatgttaaatgactcctcctctttcaggcaggacttgagaacctcctggattttgtggggagcactaggatcatcatttgggtgagagccctcggcaatggtggagagggagaagttatcattgtggagctcagatggggtccggaatttgttggtcctacgcagcttggtattctccgtcttgagcaggtagagcttcttggcaaagaacaccgtcatcatgaagagcaggagcaggacgagggcagccgagcccacggccacgcacatcacctggaagtcggtgatgatggactcgcagcgcatccccttgtgccagatgtagtcctgcgtgttgcacctgcagaaggcccctatgttctccaccaggtagcactggccgccattgtgacagtaacttgggaagaggtcgcacactgaccggcaggagccgttatgccgcacaaagccactgcggcactcagtgccattttcactggaggccaagtccctgcctggctctcctgggcggggcctgagggcgatgctgctgcc

SEQ ID NO: 469123 - DNA, 1000 bp, Homo Sapiens; identical to SEQ ID NO: 158810

SEQ ID NO: 469124 - DNA, 1000 bp, Homo Sapiens; identical to SEQ ID NO: 338837

SEQ ID NO: 469125 - DNA, 1000 bp, Homo Sapiens; identical to SEQ ID NO: 246471

SEQ ID NO: 469126 - DNA, 1000 bp, Homo Sapiens
taatggtaggcattgacatactagtttgaatttaaaagaataatcttcctcaaaattatcaaataattcacccacttgttaaaagtacaaaaagtgaaccaaaagccagggagaaaagtaagtttcttcatctcttcaaagattagggtccctggcctctttggaaattgctttctgtttaagtatcatttcattttaatattactatgtcataatctctaatagctatatagaaatcacaaacaaatatttctacatcctagcagacttatcttaaaatatagggaaagtgtgtgcataaggtggaaggttagcagagagaatgacgggaaaatataagagtaatagaaagaaaaagtataggagaatcaaacattttgattaagctagcaattaatttaattcaatatgaattctaaataactgttcctggattgacttactattttatcaatgtaaccatactgattgattaaatcatatgcaaacacaccctgaaacgtgcattttacacccttgtgtctacagcatacattttggccgtctctgtgcgaggggctgagtatgacttggccatggaaacacccgcggctgaataggctttcctcaaggaataaggatagtttctctcaggtccaacatctttaaaaagatataagcagcaggtgagaacagctccagccaaaaagcaacccagagacccagccattccgagccaacaggaccaaccaaatttatattggataccaagaaatatattgtgcaaaaccaaagtagaacgttccacatacacatcaacagcataccacacagagccaatgattcctggggtacctgctattagtaacgtggctccagcaacaaagcagatgcggactttaatgtacggctcatcagggaggaatttcacgcagtcaagaccaaggagcagggtgagaaatccaaacccagctagaatatctgcagtaatcatcaacgctcgagttaccaccagcttcaa

SEQ ID NO: 469127 - DNA, 1000 bp, Homo Sapiens
gctggggtgagcttattctctcacaagatagtctggatagctggatctatgccctttttactgaattctttttgaattttgctgatgtcaatttgtaatacgaataagtcacaaatagacccaaatggatgtctcagaacattctaatttttgggtggattattggcctgaaaggaataaaggcactaaagatcattttgaggaatgttttccttgaagaatccttaatggcccatcttttttcacctacgatctctgcttatatccggctctcctctcgccttatggaggagaatgctataggcagctgcaagttcaggaatatactcttcaaaattttcatgtaatggtaggtttatttggttctataaagccctgaacatcatggtcatatgtgctatgtatgaataattaccaaaatgggatataaaagtcatctccaattagtacttctaaagtagaactgtcacttccttgaaacaatcatttttctgggaattcaattgcatttatttattcatccaacaaatgtgcattgagatcttactctgtgctaacactgtgtgttttctatatatccccactttattatatttaacgtcttatatttaataccttgatgataattttatttaggctctcttaaatgatagaactcaaatcaaatgatagggctcatcattatgagccaaatcttatatccatatggtaaaataaggccattttaaatattagggcttcagaaaaaaatcttaaattgatacataattaaacattgttcataaatgacaccatttataaatatatttataggtatcatttttctttgttatttgaggaaattatttgttttattatgacaatgagtgtcatcagtagcagaaagaactgtcttagattttctaaagtattattgggattacttcccaggtgctgaaaatcacaacaaattggatatttaaaaatacttgaataatttaatttaagaccatgagaataa

SEQ ID NO: 469128 - DNA, 1000 bp, Homo Sapiens
ttttatttagaaacaatcatgtttaatgttcatttatttttgtttaataacataagttaattgatttaaatgttaaaatgttgaaattcaaaaaatgctttctattctaactgggaacatccaacaactcatttcagtaattatctagaattattcatttattctaacattaaattagtgactgcttttattctaatggaggagccaggcaagttaaaggtcatcagtacagtgtaatgcatgccataatagggagaaagaaaggggaccttaacctctgatgcctaattcatcaaaggagatgagcaataagttgatatatcaggacacagagaagcatacactacagcagccagagtgcacaaacagaagcacgagctgtgcttgaggagcttacactctcataggacaatgatccatgtctgcacttgatctaaatgggctcatatttaaaagaaaagcattgtcaaaaaactaaagtgttttgatagtgtgtccttttatcttatttcagattcttccagaagccaatgggttttgagatacatccatgggtaaaatacttgtcacaggcattgtttggtgagtctgacatttgaacatggcaagcattgccctccgaaactttttattagcaaccacataaatgcaggggttatagaatgtagaagattttgcaaacagtggagctatgatggccatggggggaggaatcttctttgggtcaccaaaagaagcccataagcacacgatggaataaggggaccatgccaccagaaacatgcagatcatgatcacagacatctttgttacatctatctgatctgaccagtctctgttgagggactcagtgcagtcactggtagtgtgatgtttaatggatagcgtgacatggtaatagcagtaaaacatcactgtcaagggcacaataaaatttatcgcaataactgtcatggtgtaagacacaaaagatctatcatttttcctccagtttatggta

SEQ ID NO: 469129 - DNA, 1000 bp, Homo Sapiens; identical to SEQ ID NO: 338839

SEQ ID NO: 469130 - DNA, 1000 bp, Homo Sapiens; identical to SEQ ID NO: 158812

SEQ ID NO: 469131 - DNA, 1000 bp, Homo Sapiens
ttagaccattaccattttatttgtattaagaattatttaaaataagtataatatatatatttcactgagcctaagttgagcaggctaaaagttgatacattgagtatgtagctacaactgtaacaaaactgacatatgttcttgaactttcatacaatcgtgaccacaattcagttgctggatttcacactctccttaggtttatacaaactgaaggacaggagatgaatagtatagaaattgctacaactttttgaatttcaactatgtttacacacagaaaagatacaaaaatacatgtataaaattgcaggtagtatctatttggaatgctgaggcagtccaggttgctggtggaggttagtagggaatcctagttgtttaaaaggcaaaatggatgcctgactaattaaattaagtatatatgaagatttgtgttttaaagttttttagtggggaaaaatactttttaccactaattgcttcagaaattgagttgcgtaaagtggcctagagctaaaaatcatttctaaaattttaattaccaatgagaagaaaccagatattaaacatcttttgaggaaaattacaaaatgttttactccatgcaaagtcttactgtgctctaaaatatgctctttatgactttgttggtatggatgaacgcaagaaaactgaaaaataaatttaattaaacgagggatgcaaattaattttctttttaaaaaattgcatctctcatctaaattctcttttgcaaagtttaatatccagttctttgccacataagtaaaacaaaatattgcccataaatatagatgtagttgttgcagtctcaatcagccaactcatatatcctgaacaaacccagctatgaggacagttctatagagactcttctataaaattatgatcttgatatacatccagaatggggggtccaataatgtcaagtgttaatattgatatctaaagaactttgcattcaatatgtcttgct

SEQ ID NO: 469132 - DNA, 1000 bp, Homo Sapiens; identical to SEQ ID NO: 158813

SEQ ID NO: 469133 - DNA, 1000 bp, Homo Sapiens; identical to SEQ ID NO: 158814

SEQ ID NO: 469134 - DNA, 1000 bp, Homo Sapiens; identical to SEQ ID NO: 158815

SEQ ID NO: 469135 - DNA, 1000 bp, Homo Sapiens; identical to SEQ ID NO: 158816

SEQ ID NO: 469136 - DNA, 1000 bp, Homo Sapiens; identical to SEQ ID NO: 338845

SEQ ID NO: 469137 - DNA, 1000 bp, Homo Sapiens; identical to SEQ ID NO: 158817

SEQ ID NO: 469138 - DNA, 1000 bp, Homo Sapiens; identical to SEQ ID NO: 160677

SEQ ID NO: 469139 - DNA, 1000 bp, Homo Sapiens; identical to SEQ ID NO: 158818

SEQ ID NO: 469140 - DNA, 1000 bp, Homo Sapiens
tttttttttttttttttttaacaaaaaataaagaatttaatgtacagtaaattctctcccatacaaaggtctagtctgatgttttgtgtacaaactcacatctccaattaacagtatttattgagggtgactttgtattgcactaacgtctattgctattacctgttgtgattgataagtaaagccactcattgaaaaacccaattccaaacaccacagtttgtgacacatgaagtaatgaatgactcttggtatgaaaacgtggcatttaagcgtctactgtgacagtatttcatttgtggacaaaagtagctttaaagcaagtatctggaaaatttttagcacacaggtttaaaatggtcctgcacgttgcaatacagcagcacgtgactcagagtcatgacaagggggtgtgatataacgaatgaaataaaatttccaaactgtttttagttaacaatttaacttgttccaattgctaaaggggcatatttaaaaggtaaataagtaaaaagccgtgtactttttaagattaaagaaagtacaaaggatgtcaattttttaagttatcatgttaagaaaacatgatggaatcagagcattgagaaaatgcttactaattattactaattaattattactaattattaagatggcttcatccccaaatggtctaagaggacattcatggataagcatttgcgtctagataaatatttttacaaaatgtgctctcaaagtccctactggagtcccgtcagcttgagtcacgcccttttcgagtcagactagccgagcagagctccagggttgcagaaggcgtgcacaggtcacgaaggaatggctgttcaccccccgaggattcctgttcagtccgatcacttgatctccatcgaggggctgctctgtaaactcccctgtgcaggacaggtcaccaaggagtccggtctggtcagctttagccttcggccagttttaccgcaaaatacgctctcaaatt

SEQ ID NO: 469141 - DNA, 1000 bp, Homo Sapiens; identical to SEQ ID NO: 158819

SEQ ID NO: 469142 - DNA, 1000 bp, Homo Sapiens; identical to SEQ ID NO: 338847

SEQ ID NO: 469143 - DNA, 1000 bp, Homo Sapiens; identical to SEQ ID NO: 338848

SEQ ID NO: 469144 - DNA, 1000 bp, Homo Sapiens; identical to SEQ ID NO: 338850

SEQ ID NO: 469145 - DNA, 1000 bp, Homo Sapiens; identical to SEQ ID NO: 338851

SEQ ID NO: 469146 - DNA, 1000 bp, Homo Sapiens; identical to SEQ ID NO: 338852

SEQ ID NO: 469147 - DNA, 1000 bp, Homo Sapiens; identical to SEQ ID NO: 158820

SEQ ID NO: 469148 - DNA, 1000 bp, Homo Sapiens; identical to SEQ ID NO: 158821

SEQ ID NO: 469149 - DNA, 1000 bp, Homo Sapiens
ttttttttttttttttttttttttttttttttttttgaagcggaggcattactttattcaggcagggactagccaggcagggccacagcgtggcagggatggggggagtcagcacatgggagtgccgtcacctccattagccacaggccagacggcccaggagggcgtgctactgcagtgagatggtgcactactgcagtgaggtggcgcagggctggtgagcttgggcacaaaagccagcatgtcaccctccctttggagaagcctctgggccacaggccttttccagctgacgggatgcggagggaaggggacctagtactatcgggattcagctgacttagcctatgagatggagcaggcaagagattccctttgcagggtgggaggttatattcctacagcctccattcttggagtaggctcctttgccacaccccttttcaccttagcgggccaggcctctcagccagaaaccatatgtcaagagatcgtaagttaagagtgctgctcctgagcagggagcgggcttggaggcgtccttcccctccccgcacccctaagtccccagtgccgggcagatggtcttttcctagtcctcccctgaggaccaggactctctatctccttccctctgagtgaacttcaggaactgaccctggcccaggtgaacaggagcccctgcccaagaggtcttcagagcactcccctcctcctcctgaaaggggctccctcggtctccctcagagactagcggcattccttgccccacttcctcagactgctccagcccgttcatcactcccccattcacatgctgtgacttcccctccaagttgggaccctggccattaacaccaatgatgtctgcccctgggcctgcatcctccatcccactggggatctctagagggccagggactttgtcctccctctccaaggaaacagggtcagactcttcctctgagccagaaggctcagcactgtcctgggactccgt

SEQ ID NO: 469150 - DNA, 1000 bp, Homo Sapiens; identical to SEQ ID NO: 338854

SEQ ID NO: 469151 - DNA, 1000 bp, Homo Sapiens; identical to SEQ ID NO: 338855

SEQ ID NO: 469152 - DNA, 1000 bp, Homo Sapiens
tttttttttttttttgcgttttcatactctttattgccaacggtttaaaatggtcaacataaaaaaaaagacattttgataataaatactgctctttgggctgtaataaataaaaagtttattaacaaggaatgcacttttccagccacaagtatcttcaaaaattaatgaaaaaaaattatatatggccatagttcacagttacgcagccaaaagctgctccaattacagcctttaaacaacatgggagcttcctcccttctccctccccttcaggaagtatattcacagttccaaagtcctctggctgaaatgctctcaacagagagaatttaagaatcaatgcacctttctgcaaaattgtctgaaaaaccttttaaaacaggtatctcaaggaaaactgcattctggttcactcttgggattgtccaaagtcaagaactgtatgccttagcctggttctgggttccacccagtccagcaggccacaggggaattgttttcgtaccaccacatgtccatcttcttcaacatactctagatcattcttttggcttccctgtagatctcacagtggaaaagaggagtcccatagggtccattcgaaaagtctttcagttacatctttgtaagagcatgttcagggcatattccattcgattttttaattctgatgaacagccagacatcagcagagttgtcagcctgaaagttgtagatatcctatcctcattgatgtaggtgagaaggtattcttcattttggctacagatgatgatttttgtatgatcatggtagaaattcacctgaaaggtgccatcattaaagagcatcattagggccttatcagattttagccactgaaggaggtagagccgaggtcttcgaatatcagtaacactaggcagatctccaccatccatgaggttctcctccatgtaatgagaaaagtatttcagcaccgtcacttgactaataaattgctcaggagcatctgttg

SEQ ID NO: 469153 - DNA, 1000 bp, Homo Sapiens; identical to SEQ ID NO: 158823

SEQ ID NO: 469154 - DNA, 1000 bp, Homo Sapiens; identical to SEQ ID NO: 158824

SEQ ID NO: 469155 - DNA, 1000 bp, Homo Sapiens; identical to SEQ ID NO: 338858

SEQ ID NO: 469156 - DNA, 1000 bp, Homo Sapiens; identical to SEQ ID NO: 158825

SEQ ID NO: 469157 - DNA, 1000 bp, Homo Sapiens; identical to SEQ ID NO: 158826

SEQ ID NO: 469158 - DNA, 1000 bp, Homo Sapiens; identical to SEQ ID NO: 158827

SEQ ID NO: 469159 - DNA, 1000 bp, Homo Sapiens
ttttttttttttttttttaatcaccttgtagaacttcctccctctgacaactctctgatgttcttactattctcatcattttcataaaatgtaccagcagcatgaattttgtgatgacttacaagatttgatcgccagctgaacctcttaccacatatctcacatttgtaaggtttttccccagtgtgaactcgcctatgatactgtaattgtgaagaccgactgaagactttaccacatacatcacatttgtatggtttctctcctgtgtggacactctgatgaagttggagacttgaggcctgactgaagtgcttcccacactccccacatgtatagggtttttctcctgtgtgcaccctctgatgcatgtcaaggttcaagctccacttgaagccctttccacactccccacatttgtatggcttttctccagtgtggactttttgatgggcttgaaggtgtgcactccgactgaagctcttcccacactcttcacatttaaatggtttttccccactgtgaactctctgatgggttagaagatgcgaggcctgactgaagaccttcccacactcctcacaattatatggtttctcccctgtgtggatcctacaatgaattttaagatctgctctacgactaaatccctttccgcactcttcacatttgtatggtttctcaccggtatggatcagctggtgaatctgaagtcgtgagctctgattgaagccctgcccacactcttcacacttaaaaggtttctgtacactatgtgctttcagatggattttaagatatgaactctgacggaaggctttaccacatacttcacatttatagggtttttcccctgtgtggactaccagatgcacttgataatgaattttcattctgaagctcttcccacactcattgcatttgtatggcttctctccagtgtggactccctgatgggcctgaaaacttgaactgtaaatgaaacccttaccacacactt

SEQ ID NO: 469160 - DNA, 1000 bp, Homo Sapiens
tttttttttttttttcttagttatcattttatttgaatttttattcatcttacatttctctcaaaaaaaagtctgaataaaataatgaactgatctcataattgaaaagagccacaggaaaaaaaaatcttttcactggtattttcatcacggaagccttctattttatgcaatacggtgcctaatgacttttccatccaaggtgggataacttcataaacgagtgagttttctctctttagcccattcttggacatctgcttctccaaatatgaggtagaagagtagtcctaacaggttaacggcaaacagcaagaagaagacattcctccacccaaactcagggtcctgactaagaagaaatccgctgacagtgggtacaatgacaggtgctatgctcgaaaatcctcttgatgctcccatgagaaaactggaataccttggagcaatatctaagacattgatataaatccctgactgacacaatgtgcttaatccgcaagagagcgtcagcaaggcagttgctgtgatatagccggaattgaggtaaggcagagacacaatgagtgctgaagaggggagacttcctaaaattgtggcaattttcctcacagtgatgagtctaaactttttggttagaaggaaatctgccagatagcctcccaccatgcctatgacccaggcaacaataaaaggaagggcagatagaagtccattgtctctgatgttaacatggtacacagagctgatgtaagttggtatgtatacaaccattgtgctaactaaccattgatggctgaaacagcctaaacatatggaccaaatgggtagagatctgagcatagctttgatgggaagaggctgcttagaagacccgacctgttgtttcaaggaggatatgatgtattctttttctgaggtgcttatccatggataggaaaaggggtcatcataaatcacaacaaaccagagaaggcagcagacacagccaacacctcca

SEQ ID NO: 469161 - DNA, 1000 bp, Homo Sapiens; identical to SEQ ID NO: 338860

SEQ ID NO: 469162 - DNA, 1000 bp, Homo Sapiens
ttaaatactacgactggactcaatccatggtgacaactacctgcatatacatatgcaggttcacctgttaaaattccagtcactttatgtatagtcagccttcacacaatcttctgtaagactgaaaaatgagattccttctctgtgtttattttctgagtttatcataatcttttaacttactttagctacatgtcttatttcatttttggttccaaattgacctctagaaaattgttgaggtgaattttgaactatttactctctctaaagagcagtaaaaaagctgagaaaccacaatcagagggaagaattaggactccctggattacattatgtacaaacagctacaatatcatctccatcctacagaaaaataaagaagaaattgacaagtagatccagatcaagaaaaaagtatggtactgggtggttaaagacacacggagaaacaatttttttaaaaaagtcaaagcgtctgaagtgtgcagtaaaatgtgcccattcatatgtacatcctttatctccttaaatgtaaaagtatttcataactcaagcctccatctttctcataaagatatatgcttctgctcctcaagagtggagacaatgctgtggaacaaagcaggctttcacaaaatgttttcaaacaaaccgtttgtctacagcactggacagcagtgaatgtatacacagggaaaataaaggggatgaggcccttttgtttctgaaacatttccctctcccaaataaaataaggaggggatgacaaattgccatgggcttgtcagggaagtctgaaagaagctgtgcttccatttctttctcttccctatgactcctcctcctttgtttgaatgtccctgagataacatttcactgtaaactaataagaaagatgtggctgaaggttttcctaagtgcacagtaaccactgggtctctttcatgggtgaattatcagatgtagaataagactcttggctgtgtcaatttctaac

SEQ ID NO: 469163 - DNA, 1000 bp, Homo Sapiens
taccataccagacagatgtgttttattaaaaaagaaagaaaaccctttaatcagaaagtctgattaaattcaatagtaactcaaactcttaaaaaatttctggaaaagtcaacaggatacatacatcacagaaaagcaggcagctgctgacagttctttggtggaaaagtaagttgcgtacttacccaagctgcccaaatgattatcaagccaagtttgtttttcaaaaataggttttaagatacaccaaagaaactatacaatacaaaaatttaacaatgaagttaaagtatatagcaaaagccaaatatgacaacacacatgtataatgtagaaaagaatcctttcagtcctagaaaactaaaatggggagaacttactgaagggtaacatacataaaatgagtactaatagcaaggaataatcctaaacattttcccaataaactgactaagcctcaaaaggacagcttaggaaaatgattaacatgcagtttttcttttttcctagccaattcagttctacttagataaatctggttgccaatcaatacatatataaattaatttttttctgctcaattactaccattttttctttttcaccttttccccaattttctctagcaacacttttcctttggtttgatcagttgaactcaaaaggtctggtacctaaaatgagtatcaactgttattgcaatagcacttgggaaatgcaatcctagaaaaggcgaatgtgtaactgaggtgcttgacaaagtgaagcatccatcctccatatggtaatgtctcccatattaatcactaggttaatggctgctcctggctagatcacaggaccctgcatgatactggaatgctccctggtgaggtactgcagaggtatgtgcagaaacacccacccatttaagctttcaataaatacaaggcatcattttaaaccatttcagtagaataaattaaaaatattgcatttctattggcctgctttgcttctt

SEQ ID NO: 469164 - DNA, 1000 bp, Homo Sapiens; identical to SEQ ID NO: 338861

SEQ ID NO: 469165 - DNA, 1000 bp, Homo Sapiens; identical to SEQ ID NO: 338863

SEQ ID NO: 469166 - DNA, 1000 bp, Homo Sapiens; identical to SEQ ID NO: 338864

SEQ ID NO: 469167 - DNA, 1000 bp, Homo Sapiens; identical to SEQ ID NO: 338865

SEQ ID NO: 469168 - DNA, 1000 bp, Homo Sapiens; identical to SEQ ID NO: 338867

SEQ ID NO: 469169 - DNA, 1000 bp, Homo Sapiens
ttttttttttttttttttaataagcaaaacctcttagggttaaaagtgtaattttatttagatgttacttgtacataatctatagtaagatatacaaacagataaaaattgtttaacagttttttttaataccactttaaattcaatttacaacagcattggtaatactgcaagatgacagatactatgatttataaaacaaaaattacttgctactctggctgatacattcccactagtctttaatggattaatatgtatcatgtattttaattgcaaattattataaaacttttacaacctagccacttggagctcagaaaacattttgatgttctaaaaacttactgagatgaaaatgttaatttttgaatagtatccttagtaaagaaaaacatcagtgtagccaagcttacggtctggggctgacagtgcaaactcacttgccttgtgctccgccgcctcctgtgtgcgcagccatcggggactgggcaatcttcccatcccttccctaggtctacgctatgagagaaaagcttaggagacattaaactaaaacagacgtggagaaataatacgagggacaatttaaaattaccttacaatttataactataatttaaaacacaaagtttggagaaatgaaatgtgcttttggatgtttcttctccatttgttttggtaaatagtttttgaaaatgaaactgaaaattcaaatcttctctttattcttttcattgtaataccatattagaaaagatctggatttaaatttcagaataaattgaatttgctggaaaaatactctaaaaataatctaaattggatttcagtcattttccattcttttaaatgttatggtacacaacagggcaaaagctttttcgcaagtcataaaattgagttgaaaataacttgttgattcagctacaggaagacaactaacaattaacaggctcatgaatatttatgaataaagtgccactaattttattgtaat

SEQ ID NO: 469170 - DNA, 1000 bp, Homo Sapiens
ttttttttttttttttttgcagtgggggttgtttttattaaaagcatcatggacacagcatcattagggctgatctccctgctgggatcggggcaggcggccgggggctcctgacatccgagggccggcggggaccacgaagcacttggggaagatgccgatgcggccgtcacagtggccctccagccatgcctggtccactgcaagggggacatcgggctcttcacacaggacgtccaccgtgtccccctgtcggaagcccaggtcctctggcccctgggcggagtagctgtgctgggccaccacctggtagaggaccggccgacccccggctcccctgcactgcagctgcagccccctggggcaggcagctgcgtcctgccaggccctctgcagcgactcctcctcggggatggggacccagtgcccgtcctcacctggggctaggtaactgagttgcccaagctgggcctggtgagggagggcttggcccagcagtgcccgcaggctggacaggtcggctcctcttcgtgccctcagggccactgtgaaggcgcactgcacggtgacagtcaccaggggctcggagccccctgcacctgctcccccagcacccgcggggtcctcacaggggccggggccaggcccccccattgccggcagccctggggagagaggagcctgtttgccaacttgctccacctggggcctctgctcctggtaggcagtcgacgtgcagcggtcagcaccgacctctgtctctgcatcgagggggccctggtgggtgccagctcttggggagtccatgattagggacctggcatcatggttcgctcctggtccctgtggctgctgagggcggacgccccagccctggtcgtcggggatggcagaggccaccaccttggccttgcccaggaaatccacgggctccaagtgcttcaggtgccaccggtggggccggaagacctcgcccctggggacctgccgtggcggcagt

SEQ ID NO: 469171 - DNA, 1000 bp, Homo Sapiens; identical to SEQ ID NO: 338868

SEQ ID NO: 469172 - DNA, 1000 bp, Homo Sapiens; identical to SEQ ID NO: 335762

SEQ ID NO: 469173 - DNA, 1000 bp, Homo Sapiens
ttttttttttttttttttttttttttttttttttcagaatttaaaaataattatattaataataaatatgttaaattacatttaaaacaataaatagaaaaataaactgataaataaaatcaacaggtacaaaatgtttcaaaattccaaccaaaaaaaacacacacggacagtcggcagacaagacaaatggacagaacgggagggcgctaaacgcaatcacaggaacccttcacagttgacgtctcggctccctcctcgcctggtcacccttctctccccagcctggagacagaccaggagactcggtggctgatatctctggggactccagccagcacagggaagcatctggtcccacctccatgccttctgcaaagcaaccctgaaccctggggagggtgggttcagaggacaggagtgtgaggcagaggctggatcatggtggggcagagggtggtgaggaccgggaagtccctacagaggcaggtcggtgctgttgtgccgggttttcctggcggtgccatcgtctcggggcagagctctctgcaggttggacatggccacggtctttttgaggtcaatcacggcgtaggagtctgagcttcgggcagggtgggtggtgggcatgggggcttgggggctcgaggggttctggggccccttagggcggtctccaccccagccctttagctccacctggatgtagttaagctgccttgggggctcgggccccggccggcggaaatcaaagttgaagacccttggggagccgcggcggcgggtcagtggcacaggaaagctgccgtggctgcggatggcggcccgggtgctggtgggcttctgcagtggggtctcgtcctcctcaccatcagggaagccattggaagagggtgtgagcccatccctcgagtccccatcatccccagcctcccctcccagctgctgggcttggctttcccacacagggggcagtgggggcaggttctcatagtgcagc

SEQ ID NO: 469174 - DNA, 1000 bp, Homo Sapiens
tttttttttttttttttttttttttttttttttttttttttttttttttttaatttcatttccaggctaacatgggcagatcagtactattgtgtctagttttcctagatgtaccatcatctcgtggcagtgctttctgcaaatttgacatagcagcagttctctcgatgtctatcacggcatacagctctgtgcgcctggtaggggtttgtggaaggggagttgtaggcgtttttggagtctgagggttgtcagagtcactgccaccttccaagtcaacctgtatgtaattaagctgcctgtgttctaaacttgggcgtctgatatcaaagttaaagactgttggtgtacagtcccgacgccttgaatattctattttgtgagcacttgctggcactgttacattctctgtatttacatagttatgcattggatctagattattatggtagccatttagagatggggtctttggtcctaaattgtcatcttcatccctacttagcttgcgggcttcccaaacaggaggcaaagatggtagattttcatagtttaataatgcagttcttctctgagctgagttgttgatattctgggtatctgaggtactggtggatgtcagacgacctctcctgacccctgaggcactagggatagatagcccatttatattttcatacaccagtttgttaacagagggtgcatctcttcgttcatcactgtcatagccagtgtcccattctgtgttatttgctccacttccactaacttgatctcttccaagttgctccagtttctctttttccattaactgcttttgaacaggggttggccctaaaacaaatttgactccttcaggttcaagaagaatctgaggatccctgtcctcaatactacttggttcttcttttggtgtgctgctttcagcgttagaaacccttgcctccaatggaacatgcacacttgtgcggtttttccgctcttcttgcacacctgtagt

SEQ ID NO: 469175 - DNA, 1000 bp, Homo Sapiens; identical to SEQ ID NO: 338869

SEQ ID NO: 469176 - DNA, 1000 bp, Homo Sapiens; identical to SEQ ID NO: 338870

SEQ ID NO: 469177 - DNA, 1000 bp, Homo Sapiens
gatttgaaaattctggacccatttgcaccagtccctgctgaccccacacccttccttcctgtcacagccagggctcactgtgcggtgactgcgaccctgggtgcaggagccgggggcccccgcaggacaggcacttggggggtggccttctggctcctctctgcagacaggcgctccaggcgctccgtgtagaaaccattgaagtcaagcctggagatgacgctggccatgccgtgctcacagtcactggtgctatagatgctcagccgggccaggaggtccagcaggtgggctgagaagttcttgtcaaacttgttgatggtggcctcgaagccggacaccagctgcacagtgtctgcgtgctcagccaggtgcttcctggcgagctccttccgggcccgctcctcggcccctgcgggcagccccaggacggtgctgtgctccagcgtctgcccgcccagctcgccatctaatttcatgctctgtgtaaatttctgcatgcagttggtgaacatgacgcacacagacatgagcttggagaagaccttcagcagctcggggttggtgagcatgcagtccttcaggcaggtgtccaggaagcctgtgtggtggccaaggacgtcgtcaatgttggaggcggatttcaggtttttctccaggatgtgccaggtcggttccatcacttcgaacatcatgtagtattgaatattctggacgaagttgagcattcgctgccgcagagtgaaagccccagcaaaccactgggcggagtgcagcgagtgctgcttggcggttttgttgctgatccagacgctgcagagctgccgctccacgtgcttgcaatagaacatgtgcctgaagagcatctggtagcgagtgagggctttcctgttgatgatgagcgaaaggggccacttgacgatgtagtcgaaagagaaggcctccaggccgctcagcgccagctccgtggggtcggcgtgcgccatcgccttctcctgct

SEQ ID NO: 469178 - DNA, 1000 bp, Homo Sapiens; identical to SEQ ID NO: 338871

SEQ ID NO: 469179 - DNA, 1000 bp, Homo Sapiens
gaattccggctgatttatattttttcctacatgtttgcttctctcttcctctctttccttctgtctctcgtgtgtgtgtatgtgtatgtatcatatatacacatatgtatacgtttacatacatgagtgtgtatcctatatacatctatgtgtgtgtgctacatatattacatccatccatatatatatgtgtgtgtatatatctagccacagtggtacttctctctcttttgttattacattttacctcatagtgtataatgaaaatagcaaatggagctccacggagggaagatggcaactttcagaagcccacaagaaaactgaacacatagtgttaattttaaaataagaacaatgtttatgtagagccaactttgctacaacataaataaaccatgttgtagaagcctctgatttaattttgcacaaaccaggctcatatgaacaaaacgcctatggtggtaaatatgtagaagcatatttttccattttattaaaagcgatattccagtttcctgccacatgaaaagtgaataagttatttgatatgatgggcctgtcacttcctgagtgagtctctgtctaattcaggtttggaggttaccgtgccattgcactaaaaatctttaaattattaaaatgcgccagaagtgactgctttatcatctttgtaggaaggggtgcagagtattactttcgtattttttaaaacacttacattgtatagtaatactggtcaaccaaaaaggtgtatagaagaaaccatcgaaacccacaggcttctatggagtgatctgatctgtgagaagagtaaagagaacagaaagaaggtccaacatgattgtactactttctgctctgtttctgtgctatggacagaaagctcatgaaatacgaccgtgcagtacgtggaagagataagtgagaggtgactgcggcaggtcagagtaaaattacaaaatacactttttatggtttgatgtttaaaagagaactg

SEQ ID NO: 469180 - DNA, 1000 bp, Homo Sapiens; identical to SEQ ID NO: 158831

SEQ ID NO: 469181 - DNA, 1000 bp, Homo Sapiens
tttttttttttttttctgtgcaaactacttttatttataaggaaagtttctctattttgtttataaacattaaaccagagctgtgtgaaggcacttaattggggagaggtggggcagggatcctggtagagaccaatgtttcccacccagaccccaagactgctgggagagatggtgtcagcagtgactcccaggaatatccagtggtgtggtggcccatcccaggcccggctgggcaggtggctggcttgctgggggatgtgatgatggtggtaggcatgggaggcactttggacgggatctgatttggcaaaaggaagtggtttcctgtccccagtgatttccagcccttcccagacctcccaaggctaaggcagattactaaatttaaggctggggccctccttcttccctggacttccaggagaacagagaaccggtggcaaggaccaccaccagcagggtgaggggtgcagataaaggcagcaaaaaacagagggagaggtctggagggaaggcaggaatgcttgtttctgtcagcctcagaaacctccttctatcctgctagactttactcctttgaggcttcaccctggggaacagcccgaagtagttccgcggcacgtagccctcctggccgtgcagcgcggcccaccaccagtcggtctcctccggcccgtccctccgcagcacggtgaccgactcgccctcgcggaaggacagctcgtccccgaactcggcgctgtagtcccagagagcgtacactgccccgctgttcatcagccccatactctgctcgacgtctgccaggtaggtggcgcagtcagcataaccctcgcggtaagggtcgcacttctcgaaggcggtggcgccgtcgctgagcgtggtggcgaagattgcagcgccgtgctgcaccagcgccatgcagatgactgtgtcgttgcacgacgccgcgcagtgcaagggtgtccagccgtggctgtcgggggagttgacattg

SEQ ID NO: 469182 - DNA, 1000 bp, Homo Sapiens; identical to SEQ ID NO: 338873

SEQ ID NO: 469183 - DNA, 1000 bp, Homo Sapiens; identical to SEQ ID NO: 338874

SEQ ID NO: 469184 - DNA, 1000 bp, Homo Sapiens
ttttttttttttttttttttttttttttttttttttttttttttttttttttttttttttttgcagtcaacacacatttattgagcatcgactctgtgccgggccctgggtgggcacagggggctcagagacaaatcacacgcagaccctacccttgaggcgctgacagcctggcagggcaattggtcacgtcaacggacactcacgatacagtgtggtcagtgtggtgttagaggtagcacaggtgaccgagggagcacagaggaggggcccctgccggcggggggtggcaaggagggcttcttggaggaggtgacccctgaagagggctttagggagtgagcaagagttagggtgtctcgtctgagcaagtggcctgtgcaagggctcagtggtagggacagtggtggtggctgggagttgggcaagggccagtccaggaagggccatggagtccgcaggcgacagggagcgctgaggggtgtgaagcaggcggtcggcagagggcccgctggaagccagcgtgaagggtggcccaggggacggggcaggggagaagggtgggtggccgtgggcagcagaggtgggcgggcacggcccttgcccgaggagtctcgtcctgcctggaggccccctcagcaggggggtggtgggggtgcgggctgccagccgcggggccgcagggtgcacagcacggggtccagtggcttgagtgtggcctgctcctgcagcccgaagcgctgcccgggcaccagccggaactccagcctctgcagcagctttgccatgaccaccttcacctccatctgagcaaactgctgcccgatgcaggagcggtggcccagggagaaggggaagtaggtgaaccgtggcttgggtgctccagggccgaagcgatcggggttgaaagtcagcgggtcctcaaagtatgtgtccatccgccccatgacataggtgctgaacaagagcggggtgttgccggggactctgaccccatcaa

SEQ ID NO: 469185 - DNA, 1000 bp, Homo Sapiens; identical to SEQ ID NO: 338875

SEQ ID NO: 469186 - DNA, 1000 bp, Homo Sapiens; identical to SEQ ID NO: 338877

SEQ ID NO: 469187 - DNA, 1000 bp, Homo Sapiens
ttttttttttttttttttttttcacactggtgtctttttattggattttccgtgggcaacctgggtgcttcgagctccgctctggggcagtgggagctgcccatcctctcccagcgccttataacaactgggtcctctgctcctgggctcaggctgctgccttgagataaacccagttttcccactgccttcttcttcacttgtgccaggctgcccagccaggggcatggcccgggtgtcctgggtagcaggcactagttcagagccccctggcagcagtacctgcctgttgtaggcccctgtcgactccacagtgtacacaacaccatgggctggcctacagcttggtgttgaggtggaagaagtggggcgctgcataggttgtgactggtggtgcgtgccaggcagatgaggccgggcaaagtctgtggcggagggcactgtcgaaggacgttggggggaagtgcatcaggccagcggccatgggcgaggggcctgcggtggccaggaagtgggccgggaaggccgggatgaccagggggctgaaggggagtgcagcctggcccttcaaggggcccggggtgccagtgaagttcagcgggcagtgcagcatggtgcccctgtaggcctctgggggcacaggccccagggctgggcccagaaggcaggagaccaggccggaccctgcaggtttggccccacacttcttggcatccgcctccttaagaaagggagacacggcccgcagtctcttcccactgtgggcagcaccctcttcctccaggctgcgcttgctgcccaggcctgggctactggggaaggtgggcgggagcgtggggctctcggctgggaccttggccatgggggacacccagcaggctttgggcttggggtagaggatgccctttctggagccacctttatggaacgcagaagggcggttagcgtctccgccccacaccagctggggctctttcactgacagcccctctttgccagg

SEQ ID NO: 469188 - DNA, 1000 bp, Homo Sapiens; identical to SEQ ID NO: 158834

SEQ ID NO: 469189 - DNA, 1000 bp, Homo Sapiens; identical to SEQ ID NO: 158835

SEQ ID NO: 469190 - DNA, 1000 bp, Homo Sapiens; identical to SEQ ID NO: 338879

SEQ ID NO: 469191 - DNA, 1000 bp, Homo Sapiens; identical to SEQ ID NO: 338880

SEQ ID NO: 469192 - DNA, 1000 bp, Homo Sapiens
tttttttttttttttttttttttttttttttggcctacacattgtcatttattaaagtttgaaagcatcattgaatcgacacactcagcaaatggaagcagccgcatattctacactcctggacccagggagtgtgggccattatggtggcaaaggtgcaggggagtcctagacctgcttctccctgtgaaaacggtggaggaagcagtgccaggctcctggagaaatggaagggtgcagggagggcatccgggcactcagaggtattgctgacggcccgaggcttagctggccggggcgtgcacatgagacgtggactcacagctcagggcgtccatgtccgtcaggttcacatgtgacacatgaggatcgggcacagggaaaaggctgaaggaggctcacaaaggattccaggagatgtggagagagcagcccgggagggagtggtcaggaggtcattccagtcccccagaggggctctgttgcagcacagggccttgatggacagcagatgctactggttctcacccttgggccaattctgcctgcttctagagcttctctgaggtctgttcacccagaggacggcacccagcatgctcaggagcaggggcagctccaagaggaccaggagcaggaagcggacattgctgaacagggagccagggtgtgggctgggttcggggctgtcctttctggtcacgctgggccaggtgtgcacgggcagcttcgtgggaggacctgaggtgcccatggagctctgggggctggaggctgtggtcgtcccggccgggaacacggacacctcaacctcgacaatgggatcatgaaagtctcggagccacggtgtatccaccccacaccagtaggtgcctgcgtcctcctctgtgagattctccagggtcactgtgaagctgaggtttgcaggactgtccctgatggacactcggccattccttttccctgctgaccctttggtctccacaatcttgtcacatcg

SEQ ID NO: 469193 - DNA, 817 bp, Homo Sapiens
tttatttttagattttttaattttcaacaaattgaacatttacaacattgttacaactgagaacattgacaacacagggattttcaacagagtacatttagcaaggatttttttcagaagaaaacaaaatgtcagtacattttgtattccatagcattgctctgtggaaaattagctggcatccattttaaatgaaccctgctgaccttcttccattccgtggcctgaataaaaaatatcctcgactttgacttgcaaagggactttggaattcttcgtccactctgaatctcttcattcttctctcatgcaggtgaggaacgagctgcagcaacggatgcacaactgacgacacaacatttgacttgcccaacttctgtgtcttcgaataatgaaataagaaccttttagtattatctttttcatcttgttcctgaggctttggtagcattcccataatcataaagcaaagctcctccagtgcgttggatgcctgaggctgagaatcaatggacagaaaagacgaacaagtatcatctatctcattccacaactgtagctgttgttcaggctgtaatccttgaggtaatattggagcacctcggcaggcgcccgcgcaccaggcgagcagcagcagcagcagcaggagcggggacgccgcggccacctgtccggcgggcgacctggggcggcagctctctgttcgcagcatctcggcggctgcgggaggctcggtgctagggacgctgcgctgcgccacgcgtagctggtgctccacctggtgccctgctgcgcctcggggcccggacgcaggact

SEQ ID NO: 469194 - DNA, 881 bp, Homo Sapiens
tttacgttagaataatatattttatttaagaaaaggagggtcgttcagcttgggtaggtataaagagagtcaatatcaggaaagtcttaggttagtcgaggacagatgccatatgagctgaatcttggaaaaaatgtgggtgtaaattaggcaaattaggacaaaattgtattacagatacagaaaccacacaaagatttggtatcaagaaatcacgaggtacataaactctaagtagttggaaaacactgacacataaatgtaagcggggagtggcaggggctattgatggaggcagggcccaccactttggaagcactgaatactctaccaatatctgaggatgtgcatagactttctagttgctgataggttctataatcctcaggtcttctatgttatcaacatatccatctacgccacaatggaattcaatgtagctgaagcttctgctctctgtgtacctattgttgtacttctcccagtgacactcgagtactttgagggcacctggggcccatacatatgcatttctatatcggtcgctccccttctcattgatgcatgcacgctgaattttgaaccataagctatagatgaacatatgaaagctcttgcctttcagagcctctttttctctcatgaggacatcacatttgtactctttgaattctcgacttggacttaagtaatgaagttttatgaattctctccagtaaatgttgttactgtatacacacagcctgcaaaggatgcaaagcagggccaagagtatgccccaaatctttagagaggatgtcatctcagtcaccacgtccacctgcgtgtcctacttggactctgagttcaggtcactgattgtagtggggatcagcatgtgg

SEQ ID NO: 469195 - DNA, 1000 bp, Homo Sapiens
cagagtaaacctttatgtgaaattctgtaaatgtgtatagagaggcctgtgccatctgtgctggaggccttgtctgtggaaatgccgaggctcagcacttgctgtagatggccacgctgccccgctcctcaaactcttccttgctgacccagagctgttggaaggcctgcagggaggccaggatggaaccgccggtccacacggaggtcttcctctcaggagcggcagccactgcagggctgtccccggggcagaggaggctcagctccctctggaagcgctcggggaagccatccagcatagtgcagccgccacacagtagcacgttggcggccatctcctccttgaagcccgtgtcctggcagcggcccaggcaggcagctgtgagctccgggaggcccggctgggtgctgcctgccagggagggctggaagagcatctcagagcaacggaagcgctcctggccaatagtgatgagtttgccgtccgggagctcgtagtccacgcgcagctcctccgggaccaggcccagctcctcctcgggcaggaaggccgcatagcagcacttcttcttgatgtgctctatgatgtgcaggtggtcgtccgtgaatgcgtggcccgcctcattgagcagctgcatcaggtagttggtgaggtcacccccagcgtagtcggcgcggctggtcaggcccggcagcacgtcgccctcggatatgggcaccacgtgcgagacgccgtgcccgctctccaccaccagccccgaggtcttgccgtaggagtagatggacagcaacgactgggacgtcacgtgcatggctgggatgccgaatgtctcaaacatgagctccgcgtacttctcccggttgctgctggggctgagcggagggtcggagaccagcacagcgtgctcctcggggaggatcttcatggcggtgcggaagatgtactcccagatgtcctgcacgcagtcccagtccaccacgatgccgtgcttcagcgg

SEQ ID NO: 469196 - DNA, 1000 bp, Homo Sapiens
ttttttttttttttttttgcggggtgaaaatgtttttattataactttggtcagacggggcacagccgggcgggggctctgagggtgctgggaagctatccagcccccaactcccccctcccccgggcgcgccaccccggagggagccgagggcagctcatctcagagcgcaggaagcaaacccgccgccgcgacctctccccaggctggggtgggctggcaggcggaggtgggcagtaaacagtcctattgtacaaatatatagcgcgggctgggcgggggcggtcaaccccggttccctggcacggggacagggcgcgctgggcccggctctgcagcgagccggtgggagggcctagctgtggcccaggcggtgttgagcacgggccgggggcgtcatagccggggagggccgggcagcgagcgggtgggcgaggggcgagtcatcgtctgccccgcccggaggggaccccggcgggtgagggacgtgggtggagggagacgtggggagctcagtcggagtagatgatgaagccagagaacgtgctgtatttgttgctgttgccgccgtgtgctttgcctccatccagcttgatgaagacctcgtcgccggcgtccaggtgcaggatcacgctgttgctggcgtagtcgtagttctggtccgcgtcctgggcaatagcactggcccgcacctggccattcttgcagaggtctgcccacatactggtgccgtcgccgccgcgcatgaggacatggtaggtgaaaaagtaggtgccgggaatgttgcacgtaaacttgccgctggccgcgtcgtagttgttgcctaggttggtgaccacgtcgtcaaacttgagtacctcgtaaccctcgtgggggttcttgaggccggcgtagaaggccacgcgcggcaccgtggtgtaggtggcagtgctgatggcgccgctgccccccgcgcccggcagccccggagggcccggcttgcctggctcacccttctccc

SEQ ID NO: 469197 - DNA, 1000 bp, Homo Sapiens; identical to SEQ ID NO: 158836

SEQ ID NO: 469198 - DNA, 1000 bp, Homo Sapiens
tttttttttttttttttttttttaagttttctaaatgctttaattttttgtcacaaatatttctgcatctctcagtcccttcttgttggaaaaaggagggctagtgatacatttgttaatggcacttttaaaatgtgctttggtatatagaggtaacaatgtacttcttaggtatgttaataataaattaaggttataatggttgccatattagagaaaatgaataagattagtctcagcaaaaataaaaattagtttggaagtagataagctagaaatatcaaaactgaaaaaaatagcttcccagatagcgttctactatgtgcaattttttgaggaataatattcaattacagagtgtaataccttgcacagcacttgacatatagtagctattcagcaaatgtttgttgaattttattactttttaaacaaattactgagtaatcttccttagtaatcatttctgtaactcagataaaaatagaaatttataagagtttttatttttgttacttgtaaaagtatatttcctagagaaaatatcagcagtggtagagaccagaaaaagtaagtgtgtgtgttctaaacagtgattccaactcaatgtgttcagagaaaacactttgaccctgtctgtgtttacagtccctgctgacagtgtactgtcgtatcctcagccttgttctatttctttattttagctttacagagattaggtctcaagttatgagaatctccatggctttcaggggctaaacttttctgccattcttttgctcttaccgggctcagaaggacatgtcaggtgggatacgtgtttctctttcagagctgaagaaagggtctgagctgcggaatcagtagagaaagccttggtctcagtgactccttggctttcaacccacctagcctcagacagccaggaggcctttttaccactggatactgatgagatgttttaggtccttgcactttgcaaaactcctttctcccagtg

SEQ ID NO: 469199 - DNA, 1000 bp, Homo Sapiens
aaaaaacaagctttaatccatttcataaaaattgttcttgcaattgaacacagccaggcccacatgcccagcaggttgcaggagacagtttcacattttccaggctcaggacagggcagtctcctccacatgccacaggtgtctgagtgacagtgtagacgcctgatgggcaggaggtaggcacagatgatctgaaggggtcatctatttaaaagtctgcaactccagttcaacggacaccttaaacactgtcaggcacgtaccccaagagaaaattaagcccagagaagaaaacctcaggcttgagagccctgtacccctcctcaaccgctgccacctgggaccagggccagcctgaggcaatgggggcacctgaatttgccccaaagggctccctcattcaaatcacagatataggcacagctttaggattcagcagggcagggagggaggaagcaggcgtgagctggccacagctttgaatgacctaccagcccctggcgtcaccaagaactggtgtttaatgaggggaatgaccaccgccacacagaactacctagccaagcccctccccagcagctgcctccctccctggatgaggggagttgtgccgggagtcccagaaaggaggcatcgatgcccagccaaacatgatgtcgactgcagggacccacaggacacatgtccctttttcaaaaaatactacggcaaaatgataggaaactaacagacgtggcccctcagagtgatgaaacccacgtgtctgcgggccagctcgagccacagtcgcgccaacaagcgcatgaaacagttaaatgcacactcccaacagcggggcccccgggctgctcggagctggctccagctgctgtcactgtccactgagaaaggccaagtgccctttggtgcatctgttggcgtagtgtcctttctcgccacacttgtaacaggtgacctgctccagtggccggggtccccggttgcccgcgctgctgttttg

SEQ ID NO: 469200 - DNA, 1000 bp, Homo Sapiens; identical to SEQ ID NO: 338883

SEQ ID NO: 469201 - DNA, 1000 bp, Homo Sapiens; identical to SEQ ID NO: 158837

SEQ ID NO: 469202 - DNA, 1000 bp, Homo Sapiens; identical to SEQ ID NO: 338885

SEQ ID NO: 469203 - DNA, 1000 bp, Homo Sapiens; identical to SEQ ID NO: 158838

SEQ ID NO: 469204 - DNA, 1000 bp, Homo Sapiens; identical to SEQ ID NO: 158839

SEQ ID NO: 469205 - DNA, 1000 bp, Homo Sapiens
gagctgaactccaagtacaaactttatttctattacaaggaagttaataattattataacagtaaaataaaaacaaggggaaggggctctgacacttggttttcagagcaagtgtggggctggggcagagcaaacatacctgctgtggggacagggagccctcagccctccccattagaaagcagtgaggacaaaagatccatgctcccccgggaacagaaggcagtgatgcaaatgccaaggaagcagcttaaaacacagcccccggtccactcacctccagctcaacacatcaaaagcctcgttactgacagacattgcaactggcctgagcaccttaccagagcgcctcatacacacctggggcccaatcgagtgtggacagacgcagtacacggagaggttgcccaaaagcccccaaatttaggccccaacagggcagagaatcaccttactggtggctaccaggtttccaaaatcttcccctccttccactgggaccacacagcaccaaggggcagtggcgacaataagtcaaaagggagccctggcagccgaggctgcagcttgtatttcactgctgccgaaaggtagcagctaaggctgaagcgttcctcaaccgccaccctgctcccttccctcaaacccaaacccccacagcacaacctcaaaagacacaaaatggccataacctagaaaaatctaaaatctggaaaaactctcccacccaaagagccaaagaggtgggcctgcacagcggcaagtgctgctgtgcacagaagacaggaaccgatgtaaagtctctggagacaccattactcctcctcttcctcttctgcatccccagctccctgttgcttggaaggctttgcctttgcagttctgctgcggtagttggcagctgcaggggtgacccgggaattcctgccaccttcactcctaccactagctccgtatctccctgaaggcccaggggagaaagagggcacaatgttttctg

SEQ ID NO: 469206 - DNA, 1000 bp, Homo Sapiens; identical to SEQ ID NO: 158840

SEQ ID NO: 469207 - DNA, 1000 bp, Homo Sapiens; identical to SEQ ID NO: 158841

SEQ ID NO: 469208 - DNA, 1000 bp, Homo Sapiens
ttttttttttttttttttctttctagaagtcatttatttacatattatatgtccgatatataatgtgtagataaatgtatactgcagtgaaagtgaccactctactgaactgtacagcacattataggacaaattattggaagttttcatctcatactggtatcttttaataaaaaaaaaaaattaaaaatcaaagaaaacgtctggccagggccaggataagacaaacaggaacacttcagaatccaaggcaggggaaggctgttggcctctcttcagaggactgcaggggtgggaagagggagggacagatcatgcacaaaagtacttacaaattacacacccaacccccaccctcaataaaaacagaagaaaaagccccatcacttaacaccaaacagcaacattatcaatacaccctttctttgctgcccaccatgccttatttgaaagaggaggcctgtgagaagtggaaagagccagggtgagagggaagatttgcacttcagtctagtttccaatttccatttctcttacaggaagtcttcagtcatctgatgcctgacatcgagctctgagcagaaaccgagtatgtggtggccacgactggggtgccattgttggctgagtagccttgcctcaatgtttcaaaatatgatgcctgcacgggtttgtgatactgcagcacttttatggcgtcttctattttaaaccattccctcttccttccaatgttaactgaatcttcccagtcttccagcacttcagtgacaatgagcacatagacatacgtcctgtgcttcctctcctggttctcaaaaattccaactaatcttcccaatgtcccttttactccagcctcctcacagacttcacgaactgctgccacacttggctcctcctcgggctccatgcctcctccagggacaatccatctgtctggatggcgactactgctcacgagtagcacctcctcctcgctctcgctgcggaaacacag

SEQ ID NO: 469209 - DNA, 1000 bp, Homo Sapiens; identical to SEQ ID NO: 338891

SEQ ID NO: 469210 - DNA, 1000 bp, Homo Sapiens; identical to SEQ ID NO: 338892

SEQ ID NO: 469211 - DNA, 1000 bp, Homo Sapiens; identical to SEQ ID NO: 158843

SEQ ID NO: 469212 - DNA, 1000 bp, Homo Sapiens; identical to SEQ ID NO: 158844

SEQ ID NO: 469213 - DNA, 1000 bp, Homo Sapiens
ttttttttttttttacggggaaggaaaggaactttaatgagaaatcaaaacacagggaaccaaagtgcaaatcatccaccccccatgggggggccatcctgaaccccacatcaacccctcagcccccttcaggcccccagcgcaggcccagggcctggagcttctgcctcaggtagctcttgagctggggcaggcctctctgggactccagttcctcgaagggtagcggcaggagctggtagcccatcaggcctaggtgccgctccctcagggccctcgagcccagcagcacccggccgtcccggcagaaatgccagcgttcccgcaacaccagcaccaccctctgggcagggtctcgagtagtggcgctagaggcagcctggccctgtgggcaggaccttggtgggtatggcaggaaggggtcctgggtcctcacgggaagcacagcaccagagctgctggcgcacagcaggaagtctgtgcagtagcctggaggcacagtcaggtcctggcggtatttctcctcccccagcagctggcgcaacccctcagctactatgtccttgtgactgtacttgcagcgggcacggtcggtgatgagaggctggggaaagatgggcacttgctgccttcggggaaggcggggaccccggtatcctgggagctccagctccacggccgtgtccagcagggagaggtagcgacgcacaatcagagcatgaggggtgccactgatgtagttgatgaagccaggggaaaaaacaaagtgcagggctctgaagggcaggcaccgcagttggcacagtgacatcaagatgttgactgtagccaggggtgccacccctgcttcccgagccaggatcctctcaaggcagggcataaactgctgttccaggggcaggtagttcagtcgcccaaagggcaggaccaacttctgtaccaccttgctgctgagttgcgtttcctgaaccaccaggaagtgggcaatggcttccagaag

SEQ ID NO: 469214 - DNA, 1000 bp, Homo Sapiens; identical to SEQ ID NO: 158846

SEQ ID NO: 469215 - DNA, 1000 bp, Homo Sapiens; identical to SEQ ID NO: 338897

SEQ ID NO: 469216 - DNA, 1000 bp, Homo Sapiens; identical to SEQ ID NO: 158847

SEQ ID NO: 469217 - DNA, 1000 bp, Homo Sapiens
tttttttttttttttttttttttttttttttttttttttttttttttttttttttttttttgcaagatttgaaaagtttattatatgtaagatatatgtttacggaaaagcctctaaaaacataagacaatggagctttaaaaaaggttaggttttacatctttaaaactcattaataagataccaaattcaagagattatagttacattgtaaaacgtaatcttcttttaataaaagctaataatgactgatgaattacaaatgcacttatttattggtgattacaaacaatacttaagaacttaagcagcttgagtagtagtttaagctagacagagcaaagaaaattcttgtttaatatatatatatttttaattccagtaatattttcttaaattcctgttaaaaatataatcaatattaaagtcagcaaaatgcctttgactgacgcctggattattttaccacttaacctggttacacagtgattttttttttttttctgtcagatgtaactgacaaccagtttagtctttctttaagataaatgaagtgataactcacattgcagcatcttgtggaaaatattcaaactacatttaaaatgcttctgtaaaatggagaactctattgctccacaagaaaatgtatatgtaaaactacaggttggctatggtaatagtaactaaactacatccaaccctgaaggtagaaaaatccctgaaaagaaatacacagcctagtcatagtatatcatataaaggttattttcttattttgaaaattctcccagatttggagaaatccaaacctttccatagttcccttactaggcagtgccacataaagttatttagttaacattatgatcatggcttacgattaaattccatatgacaaacacttatatatagcagccgtcattttggatgttggttatgacaatatttgcagtttgattacagaacacgcgttcattaaatttggtacaaagcatga

SEQ ID NO: 469218 - DNA, 1000 bp, Homo Sapiens; identical to SEQ ID NO: 157937

SEQ ID NO: 469219 - DNA, 1000 bp, Homo Sapiens
tataccattttgtcatccttaaaaaagtgatttattggtctctgatactaagttattcttcagtgtattatattgctgttcttcataattccattaacaaattgggtgtcatttcagggcccagtattaaataatgatctttcttcctcagtttgctgtacacagggaaaagacagaaaaaaattcctatatgacaagtttttgtttgtgtccaattacagagttccataagactatgatttgaatattgtggtacaacttaaatttggcacattatttaattatccaaagtttattacatgtttgagtgcacattaaagagattatttggcataattgacaagataaaatttctgtaccttatttgactatcaggtgtatatgtggtatatttatgtatgtgtgtgtatagacacacatatactcctaaattaaatatatttgtataaaaagctaaagattactatgttaagattaattcattaaaaaatctattatattaaattgcatctgcattcaaagcagaaatgtaaaaaaacaaatcagtgtactaaatacacacgaatttacaaagtaattgaaaatgaaataaaaatttctattgaaatgttatattcttgtttaattggcatttaagtggcactatcaaactatggaaataaacatcattttttagattgttgagataataaagattctacaagcattaccatacccttgtaccctctaaattaagattcagcattattatagtaggaaaaaatggcagataattttcttctttattaatatgggaattctcaggaagcaattagggcagtgtctgcactcctgggcttgtgttttcagctcttccatcagtggaagtctggcttctcaggaaaggtgcagccagtccgtctaattatgatgcttgctgcatagtggccagcacggatacattcagtcagaggcttgtcagagaccagttgagacagaaaacctccaacaaatgcatctc

SEQ ID NO: 469220 - DNA, 1000 bp, Homo Sapiens; identical to SEQ ID NO: 335083

SEQ ID NO: 469221 - DNA, 1000 bp, Homo Sapiens; identical to SEQ ID NO: 338898

SEQ ID NO: 469222 - DNA, 1000 bp, Homo Sapiens; identical to SEQ ID NO: 246472

SEQ ID NO: 469223 - DNA, 1000 bp, Homo Sapiens; identical to SEQ ID NO: 158848

SEQ ID NO: 469224 - DNA, 1000 bp, Homo Sapiens; identical to SEQ ID NO: 246401

SEQ ID NO: 469225 - DNA, 1000 bp, Homo Sapiens; identical to SEQ ID NO: 338901

SEQ ID NO: 469226 - DNA, 1000 bp, Homo Sapiens; identical to SEQ ID NO: 158849

SEQ ID NO: 469227 - DNA, 1000 bp, Homo Sapiens; identical to SEQ ID NO: 158850

SEQ ID NO: 469228 - DNA, 1000 bp, Homo Sapiens; identical to SEQ ID NO: 338904

SEQ ID NO: 469229 - DNA, 1000 bp, Homo Sapiens; identical to SEQ ID NO: 158852

SEQ ID NO: 469230 - DNA, 1000 bp, Homo Sapiens
cgaaaccatgagggcagacatgtttatttgaagaggagagagctacactgaagttataaaaaaaatttataaattttactgatgacagaaggctgaaagatagtctgaggggaggtggaacagcatgagggaaggtggaacagcaagtgtgtaagtgccgtgttaagagggagcctcttgtatgtttggaattgtgagttcctcagtgtgattgcagcctcaagtaggactaggaagtaagccagttaggttggagaggtgggcaggggtcaagtgaaatagataccttgtgggctaagcaaaggagtgtgttttctctgcagcaggcagtggcgaccttaggcatttgtaagcaagagagaggcatgttcagattcgtggtgtgaggaagagcgatcccctaagatgcagactgatgccttcagattccagctgctggttcattggatctggcaacctggttttgagacagggctgttgtctccctagaaaaccccctcaagacctgactgtggtgctcgtgggcaggagacaactttggatctgggctcagcatttggaagttccgtgtacacgctggtatctgttaggggtgtcttgggcctctgagaagggcgactgatttttctctgtatgaaaacgcagtgatccaactgtgcgtacgtcacctcctgagggtcttgttcatcagagtcctgcctattcactgttctgtcccccgcaggctcttggtccattacagcagcattctttttgttggagcaccagcgataaaggagaaagaagaggaggaggatgaagaggaagatgaccactgaggtcccaatcagaacatgcaggtgtctgcagataccagatttggagcttggttctgtgggtgaaggccaactacttgaagggtttcctgtgacagaaacaagcagtgggtcacttgagtttgaccacacgcagggcagggcacggaaagagccgaagcatctgtaggtccctccgtgggtgg

SEQ ID NO: 469231 - DNA, 1000 bp, Homo Sapiens; identical to SEQ ID NO: 158854

SEQ ID NO: 469232 - DNA, 1000 bp, Homo Sapiens; identical to SEQ ID NO: 158855

SEQ ID NO: 469233 - DNA, 941 bp, Homo Sapiens
tttttttttttttcacaggacacgggtgactatagtttaatgaatcagagtctggaatcttaagccccagaaactttcaggaaaggcaagcagattcactgacccccacgtgtatctttatgtgtaatgaaggttttatgggaactgagggaagatggggagagaagggcaaattaaactcctaagataaatagagctgaagactgagagctaatcagaagttctcagatgaaactagattcttgatattgctacaaaaggtttctttctgatctgccatcgcagtaaccgttgtggacgatcagcctgtactgcctggccaggcacagctcctcctgccgctgccttacaatcttctgcgcttctgggggcaggccgttggggtcccgggaaaacacgaaggagtagctgtcagcacaggtgccatcgaggttcaggaggcggcaggagtactgcacggcatacgtgtcgtagtctgtgtcgacgatccagtggtcatcatttcctttctggagaaaggaggctacgccccagtacttcatcttgaacttggcagggtcctcggtgtctgtgaaggtgcccaccatgtctgcgcacacgtcccagttattcaaaagacggactcggcccttggctgtggcgctcatctggccggtctcgtccacggagaactccgcgacgatgttgtcctgcagaaagaggccctcggggtccttcttggccatggcgtaccaggtcccagagaagcgagccttgtcgaagttctccttgactcggaagctgctcactcggcagtcgcgctccgcgcggccgctgcccagcgccgccaacagcaagagcgcccacacccacttcatcttgcccaggaatccgcccaccgggaggggaaccgcgcgcaagcctggccgccgagtccgggcgcgcgtggagcgagggaggcg

SEQ ID NO: 469234 - DNA, 1000 bp, Homo Sapiens; identical to SEQ ID NO: 158856

SEQ ID NO: 469235 - DNA, 1000 bp, Homo Sapiens; identical to SEQ ID NO: 338909

SEQ ID NO: 469236 - DNA, 1000 bp, Homo Sapiens
tttttttttttttttctttttttttttttttctgaggggcattttttattataaatttaatatggttgattaatgaaaaatgacaatgaagtaccaagaaaatgtttgtcaatataaaaattttagcagcatttccatagtttcaggctccaacattagtcgtacttcctccctcccgctatcaaaaaaagaagagactccaatgggatggagtagagcctgggggtgtccagctttgtgtgggcctcagagaaatactccatccagcatccaggattctccctccctctcatccctgaagtgctagaatgtcaaagcacagaaaaagcctcctttgtgctgacattggagacaaggatccgttcttcaggctgcagggagaattgggatagaaactgactctggacttgacatgtagtgctcagccacacgccctcaccaacacctgtgcattctctactctgatgacaaggaaaggccactgcaaggtgggtgggatctggggtgtggtggcggtggcactgctggtgggagccacggcgtggcgcatgctgggtgacggtgtcaccgccacacactgctctggggcaggcgtgatcagtgagggtgggagacagacaatgtgaaaacgtaacactggccaatgattcccctgcttctttggtactttccaaaattctctgatcaaaaaagtataagggaagcacaccattaaaaaattacagttttacgtatttacaaaagcaatgatgatatattacacaacaatcaatacacagtatatgaacaaatcttcagtgaaagcacttgtgagctcccgtcccgctgtcatcccacagcacgcgacctctgcagggtcaggttgcctgttctgaagctcattaccttacagtatattagaaggcaaaaacatcatttggaaaaaaaatcattttccaatctacactttccttttagaaggcttaacatttgccatcgaaatagttatgtacaagattta

SEQ ID NO: 469237 - DNA, 1000 bp, Homo Sapiens; identical to SEQ ID NO: 338911

SEQ ID NO: 469238 - DNA, 1000 bp, Homo Sapiens
ttttttttttttttttttttttttctttcaactcctttattaaattggttgcaaaaaagatatacattcttatattgacaattcttgtcatgaataaaagcatcaaaaataaggcaacagcaagatgtgcttcacatataaacaatcatgttgtaagaataagaaacctgaatccctgtacaacaaaaagattaggaagcaaaatgtgaataagcttgtattcagaatatacctatatgtgtgtgcaaagacaatacactcatcatatacctcacttaggttcctttatgatgcataattccttaatcattcatttgtgaaacaagaatgaatattaagaaacatgaaatccaaattgcacttattttcacaatatcaatgctaaactcaaaatagcaacttcattgactctcaatggtaaatttcaaacatggaaagcaatcttaatttttttaaccctttgactagggtctgtaaaaaacggtggattattttactgtacttacaaagaggctgggtctcagcctgcacttaaacagcatgagcaacaaaggacaggaaacaaatatcactaagagtaatgcccatacatataaagatatctagttgagccacgttctacttacatagcaagcctattaaaccactagcataacagatcatatctcatgaaacagaattactaaattaactacacatctctcagaaatttccaaatccctgctcccaacacaattttagtacacctattaagtaccacgggtcatttagaaaaacagaaaaaaatatacacctagtctttgcaattaaaaaaaaatcataacataaacaatgttagatataaattttgaactcaatatgttttttcctacatatttatgtaatcaaggctctttaagcaaagacaggtggtaggtatatgatctgtacaaacttacagtagtgtatattccaaataaaggtttttcttcctactatggtatgacaatataactgtttt

SEQ ID NO: 469239 - DNA, 1000 bp, Homo Sapiens; identical to SEQ ID NO: 158858

SEQ ID NO: 469240 - DNA, 1000 bp, Homo Sapiens; identical to SEQ ID NO: 158859

SEQ ID NO: 469241 - DNA, 932 bp, Homo Sapiens
ttttttttttttttggcagatgcagcctcagcctttattatagggacttagttcactgaaggatgggggaattgttatgggggtgtttaaagtggtaaaatgggaggaaagtcaactctgacaggagtggggtgagaggaataatggagtgttggaaggtgaggcactgggggcaaggagagggacagagggaggagagggctctaggggagaggagggcaggaggaggaggcgagggcaccaagggagccacaggcctggggcctgggagcaggtgggctggggagctggatggtgccctgggcttcctggagaagctgctgctccgggcagacctccttacttgcgggagcccagtgccagggcaatgatgaagcccagcaccagcaggaacatggcgacagagagcagcaccgtgatgaccaccatgccccctgtgcgggccatacccagcccaatggattccatgttccttcgagggagtgtggacattgggatctctctgctggactcagtggctgtccccttcttcactaggtaggaaatgtagaatttggttcctggcacgaggtttgtcacctggtatgcactgagccgagtgactgtgaagccagcaccactgtccaccacactcaccagttccctgcgcccacggcacggaggcaccacaaagctggacgtcaccactttgctgtcattggctctccggaccatcagtgtggcattgcctcctgtgaggtgacaggggggcaaggcaaccagcaggctctccgttagcgccggggacagcagaccagagaggcttgagatgttgaagtctgcagcccctggggacagcagagccagcagaatcaggatcaagggcaaggtccggatgggcagcaggggtgccatgctgggctgggaggtggaataggtgctggcaggctttc

SEQ ID NO: 469242 - DNA, 1000 bp, Homo Sapiens
tttttttttttttttttttttttttttttttaatttaggtttgttttatttaagtttaatgttaattccatgctgtgtttcagtaagaacaatacagattctgtatctgtggctccagtcagatatccagtagtacaaattagcttcaagttacacatactgaacaaaagaggttgagcgagcgaaggaggggaggagtgaggggaaggaggtagggggagggggaaggagaagaaacaaaagaattgaacaggcatgcaggcttttccataccaccttcaacgctaacctgcttcagtgggagagtaaagtaggcaagaatgagcagccacggattgttgaactgttaccagcaccatgcttttcagcaacatttcagcggagttggaaacattttttacagcaaaaccattacaacgaagtccctccccaaaccacctttaaccatctcaagctaacacccaattacttgcaaacactggtataaaacacagtttaaacaattagaaaaatgaaaactgataccacttatgcctctatagtgtgattaacctctctcttagatgcttgcatcacctataagtctaatggctttcaaatgtaatttccatttgctaatggtgatcttgccacatctggcacggagacgacacagtaatgctgaaaaagcctctatgtagtcctgttagtgtcttaaagaacctaaaagctgggaccagtaaaatccacagaaattcactcttgcctttaagaacttttgaaaactgtttaaaaaaaaaaaaaaaaaaaaccaacagggcaggaacctaaattctgagaccaaatgtaaaagtcagatttggtggttctcagtgacaatggggagtttccaaagggtgggatggggaggagggggtggtcagagatggtttctcttgttggcttatgtctcactgattttcgtcttccacgtcctgcagcgcttctttattctgctcttcaccgtcaccctgcatgtctg

SEQ ID NO: 469243 - DNA, 1000 bp, Homo Sapiens
gaattccttgaagcttgttgttgctttattgaaacttcctccctgtcgcacacaaagcaattacacaagggggtattgccagggagctcttgcagagccttctccctctgtaccccccgacagtccccagagaccctgcctccgtggcctccacctctgggtcagctccctggaggaccccgacacacagggaagcaggcacaggagggctgttggggccaaacctccccagctgccacaaccgccatgaccccagtggcagggtcagtgcccacaagggggttgcctgctttgactgaactaacctgtgggtttagtccaacgaacagatgtgcctgatttcagggctgaatttttgcttgaccacaagcctcgggcagaacagattcgcctatgactgaatcgactgaatggatggccagcgacagcctggcctgggaatggactggcagctcatcactaaaatgactcctttcatggaatccactgctatgcagccacactgaccacagagcaactgaataggtgagcattggattgttgatgacaactcttcagcagaacaattgtgtgtttgaagggactgttttatgatgaaataactgttatttcctggagctaattgttgaatgacagtttgtcaactgtttaaatgaatttcatttgaattaacaattatacagccactcagaggtcctacattcgccagagttggcatccagttgatgggttcatttgaattaaatggtttggaggctaacgtgattttttaaattgaatttcatcactattctgtgtattctatttatcactattctaaatgactcatggttggctaattgattatcatgtaagcaagctatttgaagaaattgattacatatatttatatatagggggtaactaattaatgattacttgattaaattgctatgtgaactgacaactatttataaatcaatgcaatagactgttgtttgaccaaattattttactgaac

SEQ ID NO: 469244 - DNA, 1000 bp, Homo Sapiens
tttttttttatcctactacatttttattaaagtaacaaaaaggtgtacatttgtccataagctgtacattcttccatataaaaacactatcatacaattagtaacctttgtcttttctgtcagaatagcttacaaacatactactactatttatttttacttaataggagagacaggcctgctcaacagtccagctcaggggttttgttgtttttaaagtgaacatcataaagaagagaagagagacaagattaagcatgagaccatgaggctgcttctaaaaaggcagggacctgtttgcagacaagatgcaagaacacagcctgcagtgattcacagctttgtttcaacccacaaaccagaaaattagctcttgggtctgtgggcccaaagtgaactttaaagcaataaagactggaagcaggtctgggaaggcaatacaaaatgtggagagttgaaaaggaggcagagctggcaggaatgggtagggagagtgtttggtaaatagcacctttgagtcaaaattgagcagtttagaaatccaggaaaggggactggctgtggggaggagaacctgggggtagaggaagtggggtgaagattcctcactaaggggcaacagcaggagggtggccatcctggccaaatgccctagccctgtccttcttaaggtgattcggtttgggaaactcgaggtcttttgaggacccctcatcaatgtcactgagaaattgaaggaagggagtttcttcccagtgtagctttccacttttctccaacccacaacagtatatattgcacaagtctacgacaaatttggattgtactgagacagacagcaacctttcccacaggtgctctgagcaccagggagaaaaaacagtgcccaaggtttggcttttatttagtgtcggccctacaagaataccaagtagtcttgcagaacatggggcactctcccattcagccaaggaatacatgcaaggctgactagccagcc

SEQ ID NO: 469245 - DNA, 1000 bp, Homo Sapiens
tgggatagtagatggggagggagaacagaaaaatacccaggggttaagaccacagaaggctgaccgttctgtttaattatctgtaataatccttaaaaatcagcacacaaatccattccaggtagctttgccaccccacctgctgtggtggcatttgtccagatgccaccacccccctaagagtgggtcatcctgggggagcaaggcctgagaaaggaaaggaagggaaaggccccctagtgcctgccccacagccctgaggaaggcacatatttagcctggcctgagacaggacaggaaggggccacagggctgagtgcagggacaaaggggtcagggtcccaagtgtccgggcccccagctacccaccccatgtctgtttttggttttgtcattaaaaaaaataaagtgacaaatactggtggagaccagttgttgcactgtcttctgttaaaaatacggaccaagggcatagaaagtctcctcttcagcaggtcctgcttcacaggatgtctgcccgcttgtcccgcacacggcttcgagccttggtccgggctttgaaggcagcagcattgtacaggtgcttctcaaagcgtggaaccttgcaggccttcagggcagtggcatccagcaacagcacagggcccaggccaaagatgtcacggagtagctcattgttctggaggtggtggtgcatgcccgaacccagcacttccttgaaggcagcgtagatccggtgccgagcccagctgtccatgtagagcacctcaaagccgaagcgcactatctcttcttcgcattcaccgccctccacggagtgcagcacggcgcggaaagtagagcgctggcgccgacgatcagccttggcacggtacttgttactgtcagtggccagagtgcgcaggacactgcagagggcctccatgtcctcgtaaacaaactcctcctcaaggtcccgggcaagctcaaagagcagtgcaatggtttcaccggcagcgat

SEQ ID NO: 469246 - DNA, 1000 bp, Homo Sapiens; identical to SEQ ID NO: 158860

SEQ ID NO: 469247 - DNA, 1000 bp, Homo Sapiens; identical to SEQ ID NO: 338915

SEQ ID NO: 469248 - DNA, 1000 bp, Homo Sapiens; identical to SEQ ID NO: 158861

SEQ ID NO: 469249 - DNA, 1000 bp, Homo Sapiens
ctcagaggaaggaacatttccgctgacctgaacatttataaggagggggaagagcaccccagagagaaggaagagcagggacaggtctccaggcatgtccaaggaacagaaaggccagtgtggctgaatcatggtaaggaaggtagagagtatgaagagaagaggtggaagcacatcatacttagcaaatctctacccattgaatcaataggtttcaatacttcaggagaaagtactagaaaaaaatgaagtcattgtttagattttagactgggagaattagacagggacaggggttatagccagacaagtctggagagtcagaatttatagagaaaaaagagagaaatttcttaatctgaaagttcctttcacatagcaagaagctatggaagccatatgtaagaggctgtgttgccacagaaaaggcaagcctggtcctttgtcaaagctagaaaccctgaagtagagaaaactcaggatttgatacaaggaaagtttccacttaatcagtttccaagatagggaggcaggaggataggagaagggaattagaaaagacagggtcaggtacaattctgattctatttccctctccctagggccataatccaggctgccaatgttagaaacaacccaagaaatgtgggaaatctcagacagtgaagtctgttcttcacttcctttgtcataaactataaaaatttcaagttaaagttggtgttcttgaagtgcaagtgcaattttaaatcatgccgtgttcctactccaaaatgcttttcaaccttatgcctctccaatccagatattctgagccaccatgggtggctgcaatccagccactgagggcatagagctcacctgggaaaaccaagagcaggaaaggaaggatttccatcaagattccactgtccctggtatctcatagcctttggacaggcctatacatacagaaagttagaagccagattttctaaaggtataacaagcatctctcttt

SEQ ID NO: 469250 - DNA, 1000 bp, Homo Sapiens; identical to SEQ ID NO: 158862

SEQ ID NO: 469251 - DNA, 1000 bp, Homo Sapiens; identical to SEQ ID NO: 338921

SEQ ID NO: 469252 - DNA, 1000 bp, Homo Sapiens; identical to SEQ ID NO: 158863

SEQ ID NO: 469253 - DNA, 1000 bp, Homo Sapiens; identical to SEQ ID NO: 158864

SEQ ID NO: 469254 - DNA, 1000 bp, Homo Sapiens; identical to SEQ ID NO: 338924

SEQ ID NO: 469255 - DNA, 1000 bp, Homo Sapiens; identical to SEQ ID NO: 338925

SEQ ID NO: 469256 - DNA, 1000 bp, Homo Sapiens; identical to SEQ ID NO: 338926

SEQ ID NO: 469257 - DNA, 1000 bp, Homo Sapiens; identical to SEQ ID NO: 338927

SEQ ID NO: 469258 - DNA, 1000 bp, Homo Sapiens; identical to SEQ ID NO: 338928

SEQ ID NO: 469259 - DNA, 1000 bp, Homo Sapiens; identical to SEQ ID NO: 338929

SEQ ID NO: 469260 - DNA, 1000 bp, Homo Sapiens; identical to SEQ ID NO: 158865

SEQ ID NO: 469261 - DNA, 1000 bp, Homo Sapiens
gtccgttttaaatatttgaattttattttcttttgacatacaactgtggaacactcagataatctataccatgttagtattcctacaagagaaaacgggtaaaacagtatttagaaagcagtaccagtaaacgttattacaagcattagatgtgtttaaaaagttgatactaatttataacctgtaattgttaaatgtgcatgacttaaatgttaaaatcctgtattttaagatagtcttctgcagttacaaatccatatacccagatttcctgtaggcttcacaaatcggaggggtacatagaatgtgcaagagtcaaaggataaataatattataaatatatattaactatattacctaattaaaaccataatctgttaatacagctatggattaatttcaaaaaaatgtaatcaaatatattactaatggtgtagttggctgttttccaatgttggtaaagttattaaagttcttcactttcatagagtccagattgagctgccaaacgctgaaattctccttctgggttaaaagcttgttttacattcaaacctttcccattaagtgctaaatatttgctgaatgttggtcgaacccgtaactgcttaggagctggaagagtttggtttggacgtgccgtaacgtctaatcttgtgttacatgtagtcactccagcttcattaactgctgacacagtataccacccagcatctttcttgtttacatcttttatcagtaaagtaactcttccagtgttatcttgatataagcttattcggtcagtgttgaattgtaccatttcattatttcttttccagaaaagctttggtggaggtatagccgagatctggcattctagtttcactgaatctccctctaaaacttttttgctctgtggtttgtagataaacattggtgctcttttatgttcttttgcaaggacatccagctgcacagtgaaggtggcttctcctgctctattcttggcaacacatg

SEQ ID NO: 469262 - DNA, 1000 bp, Homo Sapiens; identical to SEQ ID NO: 338932

SEQ ID NO: 469263 - DNA, 1000 bp, Homo Sapiens
tggtggtaaaatgcaaatgttttaaaatatgtttattttgtatgttttacaatgaatacttcagcaaagaaaataattataatttcaaaatgcaatccctggatttgataaatatcctttataatcgattacactaatcaatatctagaaatatacatagacaaagttagctaatgaataaaataagtaaaatgactacataaactcaatttcagggatgagggatcatgcatgatcagttaagtcactctgccactttttaaaataatacgattcacatttgcttcaatcacataaacattcattgcaggagttacacggctaatcattgaaaattatgatctttgttagcttaaaagaaaattcagtttaatacaaagacattcaagatgaaaatttcaggaccgttgatcagaagctttcaatgtgtgttgctctactttattataggcaagattcaagtaaggctaagaaagaagagtgtttccattgagacatgatctaagaatagccttctatagaggcaaattatgttctgtagaaactagctagccagccaccaagatgttaccaataaaggattccttgtactagcaactaaccatgtttaaaaggtcttagccagaattacaaaaacaaaacatttagagtaatacttatgaatacaagcataattggttccttgccttctacaaataaccatcttgaaaatgataaaagcaggtttcaactgtggttcttctctcagttgagaaggtgcagatacacatgggtgatctactgatttaccttctgaaagtactctttggaagcagctggacttggcttgatcgtaggagaatccggtgtccagttcgctgggcagacttctccatgtgtttctacatactggaacgccttcaccaagcggagggtttcttccacgcttcggcccactgggagatcgttgacgctcaaatgcttgatgactccattggggtcaattatgaagagacctctt

SEQ ID NO: 469264 - DNA, 1000 bp, Homo Sapiens; identical to SEQ ID NO: 246473

SEQ ID NO: 469265 - DNA, 1000 bp, Homo Sapiens
tggaaccaggatggaagacgtgtttttgttaaactcccttttgtctggaattaataggacttccactactcaggattttgccaaacttaagaatatatatatttcctctttttcttgacctattctctttttttcttctttcctatcttaccaaatttttgacaggaaaacaaacaacattgtatgaccaaaaatatagccgttgtcacacagaccagcaagaacccaattacatccaaagagtggtactggaaccaggtgaggtcatgggctgcaacccgaaggtgcttggctcctttgtggcgcatgacaaactcgatccagaagactgctcgatccaggggctttacaggttgatcatggtgaattcttgataacctcatagcattctctttataagaaggttcattaatgactgttctcaaagcgctaagcaaatccacacttgtcattgtgtttaggttcacttccacagctgctcctttggccttcatgtgagcaatgttatcaggctgatcagcaaacatgggaactcccaccatagggactccgtggtaaatagcttcgtagatcccattagttccaccatgagtgataaaagctttggttttgggatgtccaagaagatcattctggggtatccaatcaaagagctgagtattgtttcctaatgtggctggtttctttcctttgtatctccataaaaccttctgtggaatctgggcaagggctgaggcaataagattggccttttcttctgtaaggtttttgaccattgatcccagagaaaacaccacaacaccatttttacctgagctctggataaattcttccatttccttaggtaaaggtttggcaggtttgcagtgcaatcctccaacaaactcaaaattaggtaagtatggacgaggaaattcaaaatcccaatatgttcggattaaccaaatttcagctttccccatagtctcacataacgtagtgggtcttcctaaagctttac

SEQ ID NO: 469266 - DNA, 1000 bp, Homo Sapiens; identical to SEQ ID NO: 338935

SEQ ID NO: 469267 - DNA, 1000 bp, Homo Sapiens; identical to SEQ ID NO: 158867

SEQ ID NO: 469268 - DNA, 1000 bp, Homo Sapiens; identical to SEQ ID NO: 338937

SEQ ID NO: 469269 - DNA, 1000 bp, Homo Sapiens; identical to SEQ ID NO: 338938

SEQ ID NO: 469270 - DNA, 1000 bp, Homo Sapiens; identical to SEQ ID NO: 338939

SEQ ID NO: 469271 - DNA, 1000 bp, Homo Sapiens
tttttttttttttttttttttttttttcatgcctcaaactattttttatttgcaactacatgatttcacacaattctcttaaacaacgacataaaatagatttccttgtatataaataacttacatacgctccataaagtaaattctcaaaggtgctagaacaaatcgtccacttctacagtgttctcgtatccaacagagttgatgcacaatatataaatactcaagtccaatattaaaaacttaggcacttgactaactttaataaaatttctcaaactatatcaatatctaaagtgcatatattttttaagaaagattattctcaataacttctataaaaataagtttgatggtttggcccatctaacttcactactattagtaagaacttttaacttttaatgtgtagtaaggtttattctacctttttctcaacatgacaccaacacaatcaaaaacgaagttagtgaggtgctaacatgtgaggattaatccagtgattccggtcacaatgcattccaggaggaggtacccatgtcactggaattgggcgatatggtttattttttcttccctgatttggataaccaaatggaacaggaggaggatagtgattctgatggccattccctcgatacattcctggcttttttctgggcaaagggtgccacattggaagaggtggaaatataagttctgaaatctggtacacaggacttgcggctgcagtcaccgaactgggtttcacttccatttccttacttgtttcttcatctgaagaagaggatcctgaatgataatcagaggtaaccttatcaagggccctggtaactttcctggagatctcatccttgttctcatctttattttcaaagctggcaacaatgaatgcattgtttttctctccataccgacagcacacctcacatgggtccacccagagagtgagctcctttggcaagcccaggtcactatacaagatgcagctgttttcaca

SEQ ID NO: 469272 - DNA, 1000 bp, Homo Sapiens; identical to SEQ ID NO: 338941

SEQ ID NO: 469273 - DNA, 1000 bp, Homo Sapiens; identical to SEQ ID NO: 158870

SEQ ID NO: 469274 - DNA, 1000 bp, Homo Sapiens; identical to SEQ ID NO: 338943

SEQ ID NO: 469275 - DNA, 1000 bp, Homo Sapiens; identical to SEQ ID NO: 158871

SEQ ID NO: 469276 - DNA, 1000 bp, Homo Sapiens; identical to SEQ ID NO: 158872

SEQ ID NO: 469277 - DNA, 1000 bp, Homo Sapiens; identical to SEQ ID NO: 158873

SEQ ID NO: 469278 - DNA, 1000 bp, Homo Sapiens; identical to SEQ ID NO: 158874

SEQ ID NO: 469279 - DNA, 1000 bp, Homo Sapiens
ttttttttttttcaattttttttggaagggcaagacagccattaaagaacaatacagctcagagggaagggagatacagcaaacaattacacaaacgcagtatgcacgctccttgccgacagggctgcccagacggcaaacctcttcatggacatcatgttaaaataaaaggacttggcctgcattccccagggagaccccctattccactgtagacagctctcctcacgaattttttgaaagaacccaaggactcccctttctggtagtcgaaacctgtgcattccttggtgacctccggagagaggacatgggccggcagtggggacagagggcaccgggactctgctgggtgtagtgcttcacattcagaaccgcctggatgctttgcatagttacctctgatatcacagatgcgtcaggaagagaacgacacgcacaccatgagggaggcagccctcaagcagcggattcctttcaaagaaagacccaggggcttctcccctcctcattcagagctgacagctatgagctttaaccggttcaaagtggaagacaagtgagagatatctcataaaaatttcggccagaacaaaaaaaaaagtaaaattaattttccttaaagacaactagaaagaaaagggtccccccaacccaccttttttttttttttacttgaaatctgccagccagacaggatttctgaggttaatctgcttctgttaatcctcaatttaagcctttatcatttttctctgactagagacatccatgaaaagccacctgttattcacaggggctgcgcttcaggaaaccaaccaaatgcagaagcagagaacttaaatattgtaaataagttaactgggcatgaaaatacaatgccttggtgttcaggtggtgacaactgctctttaagaggggacaagaaattggggggtaggggacacatgggaaaaaaccacacattttttggtcatgagaaattggactttaaatccgc

SEQ ID NO: 469280 - DNA, 1000 bp, Homo Sapiens
tagttttaaaatgtccactttattccatataacacttaaccagatatcatttacatctgaggaagagatggcccatgagactgatctatagtaaaacactctaagaaatgcagtccaattttatacacttccaggcatccctagacaagtgtgtcacaatgcacaatgtggaaatataggtatcactactacattttacataaaagggaagtatcaataaactttagaaagtagtaaattcacctgtcccttaaaatatgggtatgcaattgttacaaagccatagtaaatggtttataaaatgtacttttattttatgttactctgctgttacatagggcataacattttcacaaggcttttttgggactacagtcaatgattagcaacacacaatagtggtccaactctctaaataacaatcactagacaaactggacaccctctcacatgtgcacaaatctgcatggaaaagtactaaagttttagacttggacttgtgtactttaatttatttcccctttctagtgtattaagaaatgacatgcactttaatttgccaaaagcaatgcttgtattctggcagcaacatgctacttctatcacatagtaaagtgaataccagaactacaaaggcaggaggtgtaagtgaatttttattgggaggggaggttggcaacttaaacagcagcaaataaagagtgaataaggaaactccctgttgccacagatacacaagacctccgtatgtgatacaggagccatttcaatttgtgacccctagacagagatggcaagtgcttttccattcaatctaatacttccggattcctactaaaaaggaatacattaagagcatggaaaagttgcttactgaaaggaaacccccgaagagtaagggagggaatgtagaaattaagaagttatgtggaatactctttaaattgtaattaactacattttcttattttcacagtaatacaaaacacagtcacttgca

SEQ ID NO: 469281 - DNA, 1000 bp, Homo Sapiens; identical to SEQ ID NO: 158875

SEQ ID NO: 469282 - DNA, 1000 bp, Homo Sapiens; identical to SEQ ID NO: 338948

SEQ ID NO: 469283 - DNA, 1000 bp, Homo Sapiens; identical to SEQ ID NO: 158876

SEQ ID NO: 469284 - DNA, 1000 bp, Homo Sapiens
ttttttttttttttttttagctcaggaaagtagtcaattatcatgtttataaggttgggtgggctaggtaagatgatgtagagggtgacattaaagtgtagaacagagaccacttaggtggaagcaggcagccttggactttgctaaagaccagtccatgtgactgacatggggtcacttcaaatggtagtgcctccctcactgaagagcatcagaagggcttctgagcaaggccagaatgagcctcgatgaacatccaagttgaccaaccagtgtggtgcctaacagaggacagagccaccagcaggggtgctcaggggctgctccccttttattaatgacagcggtttctctcaaggaagtgtagtgccctcccctttgggatagttgcctgacccctgtccatcagcccttcaagtaccctcatcagaaaaagagcccgcgcattctcctgccgatgccttgtcggtcgtagaggacattgaacttgttcacaaactggttcatggtgttgcacgttttggtgatggtgccgaggtaggccatgagccccacgtcgttgcattgatcataaaaatctgtcttgaacttgtctgtgctgagcaccgggagacagtgacacagagcataggcctcccgcaggatctcatgattaaaggggacctctcccgcttcagaggccttgacgtactccaagatgagcttgacgcggctgtgcagcatcttgatggcgctgtgctgtgctatcaggtgttcagccacagtggagttctctccactgcctgttgctgtcattcgggctacgtggtctacaccaatgcgttccgcttcctctgtggccagagtgtaggtcagctcagcaaacagcattgtggcctctccattgattatatcaatgacagactcaaaaacgctgacaggaagatctgtgtgcttggtcatagggttcaacttcagaaagagggggctctcgatgatctcacacacctgcttatggacg

SEQ ID NO: 469285 - DNA, 1000 bp, Homo Sapiens; identical to SEQ ID NO: 158880

SEQ ID NO: 469286 - DNA, 1000 bp, Homo Sapiens; identical to SEQ ID NO: 338952

SEQ ID NO: 469287 - DNA, 1000 bp, Homo Sapiens
tttttttttttttttttttttttcattttaaagagctttattacaggatattaatatttaggacacttcagagcaccttatacttctaatcagattttgggtaactggttttaaagtgttacttgaatatttttctcatactgtctttcaggtaaagtacttctcagagactgtttaagagatgttaatttgattaaacagtttatccttaataacctgagacatcaatccatggatagcttctatggtagttttacagctgtctcttgtagctttggcaagtttgtcttctgattttcggtcatgcgtttctaaacccaacatgaaactccctcgtcccagctgggcttctgactgctctaacttttcagacaaatcaaagacctgaccagtggtatagtctgcattagtaagcaagctagaagaactcaacgtattcacccagtatttattccacaacagctcaagcaatttgcgatccaaagaggatttgaaatatgagacttctaaggcataatattgtttgcagtgtacaccaaaatcttctattttattaagtggaatagtctggtactcagaaggtccttcatcaggaggtttgtagccctttgggtatgtcctaaaggcgccaagattcactttccctgcggatattgttcttgttggatcaatcaccactgctacaaatggttcctggaactgctgattgagcatctgagtactaacatcaatcccagaaagccagcagccatagccagggtggctatgataccacccgattgcattttcaaggcggccaacctgttttgcattttctatgtatgcagccatgtattcatatgcagcagcctgagcatttactcgggtttcagtgccctccacaggcaaagcaaaactgtccataatgatcatggtttcaccatccacctttcctagcatcagacccatcacttccaagttgcctcccgatctggcatgcatcaccatcttcagcagagcc

SEQ ID NO: 469288 - DNA, 1000 bp, Homo Sapiens; identical to SEQ ID NO: 338953

SEQ ID NO: 469289 - DNA, 1000 bp, Homo Sapiens; identical to SEQ ID NO: 158881

SEQ ID NO: 469290 - DNA, 1000 bp, Homo Sapiens; identical to SEQ ID NO: 338954

SEQ ID NO: 469291 - DNA, 1000 bp, Homo Sapiens
ttttttttagtgttaaatattcatctctttccttgggaaacagctttatttacaaaacaggtctaaaataagaacatgaaatgacaagtccttgggaactgcgggagaggtggttcttgtgtgaagcccaggcatccagacgtagggccaaaaaaagggctagtgtgaggggacctaaaacttgaactccttatatttcttgctgcccccacggctgtcctggggctgagctttccgttttttttgcttctgtttggcagcgtgctcagccaccatgtcactgaagtcctccttctctacttgagcctgctgctcccgcacatgctcctcatacttctgggtcatggccataggatccagctccaactcttcaggcgccagcgccacttccacaccttgcagctcaggagccgggcccttccggctcataaccgtggacatgtcataaatgtgggttgatcccatcatggcccctccaacagtggctgttctcttctctggcaacacagtgaagagctgaggtgtctcacttccgtccatcgcctcctcaatcttcttcttcctcagctcaatgagttcaggggtctccattccagcaggcactgatgaaaagcctccaggagtgataaggccactgtctgcaggggtaataaagcctgtctcatctggtttgtcttcatcactttcttcctcttcctcttcttctgaggattcttcatcagatggttccagttccccccaaggggtccgatcaatctcttcttcctcagtcttggtctgaaattcagcagcattggttccaaacacgtccccatagagcggtttcccagtctcatccactggaggtttgccccagccaccagcatggtacccaaaggaacagctctcagggatgggcgagttcagcccagggattttcaggttgggatacgatgggggtggtccatatcgctgcatggcaatcagccatgggggagggaccttgtgggcatttggtcct

SEQ ID NO: 469292 - DNA, 1000 bp, Homo Sapiens; identical to SEQ ID NO: 158882

SEQ ID NO: 469293 - DNA, 1000 bp, Homo Sapiens; identical to SEQ ID NO: 338958

SEQ ID NO: 469294 - DNA, 1000 bp, Homo Sapiens
caaaagggtagagtttattcagtttctttaaaagcaaatatctattatccagatagtgacaaagaaatcccagaaagggtgttctgctgagtttacttttattgaacaggcagttggacagacagcattgtaatcaggacattttgagggctcagacttggtggagatgtctttataccctcagatcacagagtctaggaggaaagagatggaaaagactgaaaatcagtgagtccattcccaaaagctctgtattgttttctatagcaaataagacaagctccgaagaattctttgtatatacagatggtgaaggtaggtgattcagaactggggtttattttttccctcatggctttcaacaatcttcctgtcattcgtcagacgggggcatgctggctgcggtggttcctggggtgctgctctcctcacacttccctgtactgcggatgtgtgtatttgtttggcgtatcaggttttcatgacagagcatgcaaggattgttgtaggtttggccatcgtcaccacagacaggctttaaatcctttggacaaagataacctatcctgggcaatactcggtagtctttgcacatctcagaatccagagaactgaaagagtctgggctgtcttcctcttgagaagctctaacatgggatggcttttcttgaagctttgccctttccaaagcttctgttagaaagacagctctgcacatgtagcacttgtttgtatagaactttccatcagcaccgtgcactgggtcattctctctagggcagatgagttcattgttccttatatagtttcgaaattcactgcactcatcctttgcattatttgagggcttgctacttgatttctcttcatctttcttttttctttcattagcttctcgatcaaagatgctctgacacatagcacatttattgatgtgcatcttgccatatgggcctcgaacagggttattttctctggtgcagataagctttccatttct

SEQ ID NO: 469295 - DNA, 1000 bp, Homo Sapiens; identical to SEQ ID NO: 338959

SEQ ID NO: 469296 - DNA, 1000 bp, Homo Sapiens
accaagctcactctttattcacaatgcacagctccctctggtacccaagggggtggctcctgtccagcagtgatggcgggggtgacacgggggcagctacagttcctccttggaccccatagtggagttggccggtggctccgggaacggggctgctggctcctccggggactcctccgtgggcagcacgcccccgttgtccaggaacttggagaaagtctccaggtccctggtgcttttgtattcaatcaccttccgacctggccctgctgggaagtacttgagagtagggaagccgtgcacagcgaaggcatccagctcgttggccgtggcatccagctcagcaatgatgatgtcctcgtggtcttggtacttctcagccaatgcctcccaggcaggggccatctccttgcagtgggtgcaccacggggcatagaacttgacaaacacattcttggtttcgtcaaaagccacctgctcaaaattcttgcccacgagggtcttaactggccgctgatcccaatcagggggtatctcctggctcaggagatagggcttgacttggccgttgaggactgcatggcagaaagcagtgatggacgctgcggtgacagggcccccatccacaggcgcatacttcttagtggtttcaaggttgaccaagcgcagagtgggggctgcctcagccttgagtccaaagtactgcagcacgtgctcattgtcggccgccacgtccaccaccacgaacagcacctgcccccggaagcggggagctgcctccccaaagcccgctaggagctcccggtgcgcagccagcgtctggttgacaaacagcagcaggtggttgaggatcctggccgcgaagatcttggcagacgtctggctgttgaactccgtgaccaggcgcatgctgtgtgtgaccaggaagcgcgacagatcccccaggtccaggccaagctcctcgtccacggggaagtctgcccgcccctcatcaaacttc

SEQ ID NO: 469297 - DNA, 1000 bp, Homo Sapiens
taaggtgtgagcttttattgcttaattctctgaataattcaacgtagacgtcttaaaacagtttttgtttcaagacaaagatgggggatattggattgactgattactttcgcacctaaaactgaaaggaaaaaacttaatacaagaattggaattgaaaaccctagcaggatacctagtaggtaagggtttggatatatctgtatctgctcataagtaaaacagtgattgtgcaaatggtactcgcctaagtaccattaggttattggtattaaggtactaagtacaaggcaggtatcagccactggtttgaaaaaattcaaaccagtaaaagatgagtcacaaaactcctccagccaaacctggtaaatttggtttgcttctggcctgaaggcagtgtgaaagtgaaataagtttcacacttaaaactagctgacacctttatatcttgaccacctaaatttggtcatctacctggaaagtggaaattcacaagaacgtaccctaatattttaactggtctttagttgggacattctaagaggagggacattgttccagattggggttgacttgctcatcatgagtcttgccctcaggccttggagaacaatcatttatgttttttatttcgtcggtaagacaccttaaggtttcttgttgcagtgaggcaccatctttgtgcaggtggccgaggttttttatgaccttacaatgggtctttaagggcgatctattgatgagaaggtcttctgggtgggatgatcaggttttgctgaaatccacactaaacacttttctggttttaacatttgatcccaaattatggataagttgccaaagagaacattcaaaatagtttccttcatgtgcttgttaaggcgtagactgtctctgaaggtcctcagattggcattggaagacttaacttctttcccttaaggactttggtcacatacaagtagaagaagtcacagtagaagatggtttgtactactcc

SEQ ID NO: 469298 - DNA, 1000 bp, Homo Sapiens; identical to SEQ ID NO: 338962

SEQ ID NO: 469299 - DNA, 1000 bp, Homo Sapiens; identical to SEQ ID NO: 338963

SEQ ID NO: 469300 - DNA, 1000 bp, Homo Sapiens
ttttttttttttttttttgattttctgaccataatttattgactccaatgcccaggccacaccaccctttgttataggaggcttctgcctagactttggccgggccatccctcatgcctgtgtggggcccctgcaggagaggggccggggcaggtggtcttccaggcccccttcctggcattctgttaccagacctcaacctggcttggagggcccaggtttccttgttaggccctgccccgcaccaggcaacgctaacacaggatgggaggcttaggctaaggcacatttacagtagaggggccaggaaatccgaggctcacgttccaacgctgcagtgcccaccatgtgagatttccaggaccgtcggtgcagccactgagccgtcccttctacaagccagaggtgttccctgcccgctgaggacggaaggagactcatggggccagaccgcaggccctgactgcacactcccgttttggcaggaaactaaaattggggagggacccccaagtctcatatgcacacaccctgctgcccctcctttgtcccgttcttccttccatggcaggggctacgtgggcaccgggcgcttgtcctggaagaagcgcttgagcgtgcagacctgcagcacagccaccagcagcagcaccgccacgttgacagctgaccagaagttgacccgctccaagttgccctcttgcaggttgcggtcacgtgcctcgaaggcccgcagtagcgtgagcatctggatgctgcgctccagccgggtccgcatggtctcaatggactccttgatgtcctccattttaacatccagcatctcctcgggctccacagcctctgcccatccttcgacctcctcgtcatcctggaggctgtcaaagatcagttcaaagaacaccagcttctcggagatggtgctgaaggagttgtcaaagcacagcttgtagtccccggcctccgttggctccaccgtgtgtaccccatcagccttgcg

SEQ ID NO: 469301 - DNA, 1000 bp, Homo Sapiens; identical to SEQ ID NO: 338965

SEQ ID NO: 469302 - DNA, 1000 bp, Homo Sapiens; identical to SEQ ID NO: 338966

SEQ ID NO: 469303 - DNA, 1000 bp, Homo Sapiens; identical to SEQ ID NO: 338967

SEQ ID NO: 469304 - DNA, 1000 bp, Homo Sapiens
agaggatccaaccaagggaagtcaacattaatagagaggaaaggtatcacatgttaatggtccttcatggatcactccagaaaatgtctctgcaatccaacactgattcctccctctaaaaatgattggcagacagtccagataacatcagccctaaattgtctcccggaacctcctggcatcatcagatctgttcccaaggctccaccactctgaagggtacattcttctctctgctgttcacctcccggctgcatctcagaggcttctctggctgtgctgagcctcaaatagcagaatcccgaggaccaccaggaccaagccagctatgcccatgcggatgagattctccactgtgtaatcctgggggtgtgaggcagtcttgttttgtgatgggctgagggtgttagctgctccagccttggaatcggacttgttttgtggtgggctgagggtctcagctgctcctgagaccatgagctccagggagtcactggggtgagacagcaggtaggggttggagctgagtgagccgtagcacctgtaggtccccgagtgggctgaggtcacaggactcatagggaattcagcctggtacttaggatattcgtgtattgatctgagacggaggggggcatcagctgctcccgccttggtcagaaggaaagtgtggaacggcccccatgactgacacagcagggtcacgttctctcctgaggccaccgtggggcccggatgcaccgagatgaagggtctgccacggaactgtcctgcgatcaggatgtccagggggtcgctgggggccgaccactcggaggagaggttgtatgcaccggagcatctgtactggcccccgtaggagcggctcacagggcccagggtgaagttggcctgggagagcccagcctggggctgtgggccagggagctggaggaagtcacgttctccctccttatacagaacaaatctgtcgtagctgacatcagaaacacactggagg

SEQ ID NO: 469305 - DNA, 1000 bp, Homo Sapiens; identical to SEQ ID NO: 158885

SEQ ID NO: 469306 - DNA, 1000 bp, Homo Sapiens; identical to SEQ ID NO: 158886

SEQ ID NO: 469307 - DNA, 1000 bp, Homo Sapiens; identical to SEQ ID NO: 338969

SEQ ID NO: 469308 - DNA, 1000 bp, Homo Sapiens; identical to SEQ ID NO: 338970

SEQ ID NO: 469309 - DNA, 1000 bp, Homo Sapiens; identical to SEQ ID NO: 246474

SEQ ID NO: 469310 - DNA, 1000 bp, Homo Sapiens; identical to SEQ ID NO: 338972

SEQ ID NO: 469311 - DNA, 1000 bp, Homo Sapiens
ttttttttgtgggtgtgaacacgcatttatttacacattgtcatcggtaggcacatacccagcccagcccgttgaagggacagatctcaggctgtcacccatggaacctgcagacccttccctcctccagaacccttgaaggcgaagccctgagagaaccaggaattttaggcttctgttcaagagctaagaactaaattttatgccttcatctgatttctttccaaaaagtccatttcattaagtattcagacttcttagctccatcccattcatactttttgctctcctactacccacccaagattgttaataataacaataataataacaacaataatactgcgataatattaatacttcacatttgtacgaagcttacagaatgttttcacatatagcatctcatctgagcctcccaacagttccgtgaggtaggtattctcacctccctttttacagacagggtaaccgaggctcagagaggtaacgggatttactcaaggccacacagctagttagtggtaaagctaggaatcgatcccagcaccccatatccaagtccagtgtttcaacaccacagctacctctgtaaagtggagcgacatttcttaccccagtcaggcctaaatggtggcctgaggagccaagaggctgacttctcagattaggggagggaagggctcagcagcgtcggggagagttggggtacttggccttcaactcctgtttgaactggcgatataggatcttattgtgctgattttcagcctccttttggggatggaacttcaacgcttctttgaagcccttatgaaccaagaaaccttcgttcaggacctcaaaatcaaaccccgccacatgcagctcgcaggcctggctgattcggttgaagccgtactgccgaaagcgctcgtcgaaggtgggcaccttgcctcctgccacgtagaatggctcccaggggtcctgccaaggtaccacgtaggcgggccgcagcaag

SEQ ID NO: 469312 - DNA, 1000 bp, Homo Sapiens
ttttttttttttttttttaagtcttaagataatagcattatattaaagtgaaaccatcttcttttaaaaaagaaagaaaaacaaagaaagggagagagaaagagaaaaagagaaaggtgcaagtgttggtttgaacaatgaggttatgagttctgggcagcagggctctgatgttggcccaatcggtgccttgcgtctgggccccgacaaggcaggcgggagagccccgaagcctccaggcggcaggagacagaagagaggacacagcattccaccattcaggagcagccagaagctctgacggaacagacttggggggagatgggaaaagcaggtttggacgcttccactcgagccagacgctgctttgtccccagggttagctgaacacggtgttgtgctgctgggtcacccggatgaatgttgccctcctgctgagctccttgagtttggcggcccccacgtaggtgcacgtggacctcagtcccccgagaatatccaggatagtgttttccacatctcctttgtaaggaacttccacagtcttaccctcagaggctctgtactcagcaactcctcctgcgtgcttgttcatggcggtgtcagagctcatcccgtagaagagcttgagcttccgtccgttcctctcaatcacttctccagcacactccgtatgacccgaaaacattcctcccagcatgacaaaatctgctccagctccaaaggctttggcgacatcccctggacacgtacagcctccatcagagatgatgtggcccttcaggccatgggcagagtcggcacactcaatgacggcactcagctgggggtaccccactcccgtcttggtgcgggtggtgcacacagaacctggtccaactcccactttgatgatatctgctccggaaagaataagctcttctaccatttctcctgtcaccacgttccctgccataatggtgtgttcaggaaatttggcacggacaagtttcacgaattc

SEQ ID NO: 469313 - DNA, 1000 bp, Homo Sapiens; identical to SEQ ID NO: 338973

SEQ ID NO: 469314 - DNA, 1000 bp, Homo Sapiens; identical to SEQ ID NO: 338974

SEQ ID NO: 469315 - DNA, 1000 bp, Homo Sapiens; identical to SEQ ID NO: 337211

SEQ ID NO: 469316 - DNA, 1000 bp, Homo Sapiens; identical to SEQ ID NO: 338975

SEQ ID NO: 469317 - DNA, 1000 bp, Homo Sapiens; identical to SEQ ID NO: 338976

SEQ ID NO: 469318 - DNA, 1000 bp, Homo Sapiens; identical to SEQ ID NO: 158887

SEQ ID NO: 469319 - DNA, 1000 bp, Homo Sapiens; identical to SEQ ID NO: 158888

SEQ ID NO: 469320 - DNA, 1000 bp, Homo Sapiens
tttttttaagttaaggtttacactggcaacacataactttattgggtttcttgagctctgtttataataataatatgaacacacaaggtataagataaatgtttgagaaggaaataattcattgatcccgctttacttagcatttaccatatgcaaggcaccatgttaaacactgagagatccacaacaatacataaaacaacattccaaattcatgctgagcacttttttctgaaacacaagaacaaatctgaaaagttagtatgtgactgtcccaaattttggtattatcatacagtgcaggaagaaaacagggataggtttatcccttgaatttatacaacttcccattgctgactagtaggttttcatgggaatttctctctttaaaaaggcttatgtgtttcaattgcactaaaattaagcaggtgagaatttatttatccttgtatactaagggtttaataaggacgagaaaaaggccatatttacaaacaccaatctatggactgcaattcttttgtatctttcaatagcattgttagttctaattttgtttgtttttgcacgtgtgctttatacaaaagactctgtaaagtcttgatttccatacttctggtgaagctcttcaaggtcttcatggccccatacccatcaatcatgtgtgcctcacagatttcctttgtcagtagtacatatcagtatgattaacggttcagtgttcattttcaggaatctgattggataactgtcgtttcatttgttgaaacatataattcaaaaagcattgatgaagttgtccaaaaaagagagcaatgcaagtccattttacttattatgaacaacaaagcttggtagtttattagtgtaaataggctctctatgccagtgtattccctggggataaactaggtgattgagatgggtcgtttaactttttaaagtgattatacggcaacattacatggaagccctattgcatgaaagagtgagtatcaca

SEQ ID NO: 469321 - DNA, 1000 bp, Homo Sapiens; identical to SEQ ID NO: 338980

SEQ ID NO: 469322 - DNA, 1000 bp, Homo Sapiens
ttttttttttttttttttttgactgggaaatttttttattctaaatatttgttccaatagtaccagacaatttgaaatcaataaactgtggtgaggactgtggtttttgagaaatgaccaaagtgtgttgtgccacgccaccgggcttcctgactctacccatgaaggacaatttgcggtcttaatcctttatgtcaactacaaacaccagccacggttacgactgttcaaaactactctctcaactagttcagaccagggggactaaggaggtgaaatgtggcccccacggcctggaagcgaattcctaagctcggctggataaatctacaaatatacacataaatacattcagacaaggataaataatcagggaacgaaatgactcgcttcaaataataaatacagatagtttagtccgatgcaatccttacggcacaggaaggagaatataaattaaggtctctgaaactaagctagacgcgggccaggcccaagactctccaagctctggtccctctgcagggcgcgccgctgatgggtctcagacttacctttgggacaccattaccagattggagtcccttggtccgcagtatgtggcactgtcaaatttacagggaaggatccttgcggctgatttatggcgagtcacccaaaggacgcccatggaggggaggcccggtcgcctgcgcctccgccgctggaggcctgagacccgggaggcggcggcagggcaagagcggggaagggggttcccgaactgccccgcgggccccaccctctaccccaccactacagcaagagaggtaattttgccgcgagttcgggctggcggcggccgctacagatgcgtcagtttgggagcctccggcagtcgtccctgagacgagtggtgggccgagagatctgtgtaggtgggatgagggtcgcaaggtccatggtggtggttgcctggaatctgcgcggcgcaactgtagtccacgctggccgacgacgg

SEQ ID NO: 469323 - DNA, 1000 bp, Homo Sapiens; identical to SEQ ID NO: 338981

SEQ ID NO: 469324 - DNA, 1000 bp, Homo Sapiens; identical to SEQ ID NO: 338982

SEQ ID NO: 469325 - DNA, 1000 bp, Homo Sapiens; identical to SEQ ID NO: 338983

SEQ ID NO: 469326 - DNA, 1000 bp, Homo Sapiens; identical to SEQ ID NO: 338985

SEQ ID NO: 469327 - DNA, 967 bp, Homo Sapiens
aaagtggcaaaggttttattgtaattttaagttaacagcattaaaaagaatcaacacaattatactgttaataaaaagacaaaaagacttcagcatagaaagtgtcatttacagaaactacaatcatacaaagaatattttcttacacaccaaatgaaaaatctaaacattaataaagatttcttatattctaataattagtgggacctgacagaagcatcagtgaaatgtcatcaagactatgtgtgaaaattagacaagatgtgcacaattagcttcatctcagcaatatttagcaagagaccttttggtacaaccaattaggcaacatttctcaaacagtgccacgtagggtcgtctctttttttgagaatgagtatccaagcctaagtattttaattctgaaggattgctgtctgcggcttcactttgcctattgcgaataagtttcttaaattcttcaaagctaagattggaatcctttaatgcaggtacatactgctgtagctctggtaatgatggttgcctctcagatagggctgccttcagctccggtggcaaattagcaatgaattccaacatgataattatagtttctgtatctttgttgatgaaggatggtacaatttctgccactggtctaggtgtctgaggagcatcttcctggctcagagaccttttgctccaggtgctcatgccgcaaatggcaatctgcgcgcgaactaattcgcggccgcataatttaataacatcgtccttccatttggccgcgactgctctggaaaattggttcagtagtaaacagaattctagcaggtggaacaagaacaggcgaggcatcctgggcctggtctctcctggaggtctgggtgttgcagcctttcaggactgcggctgctgtggcctacacacctgggcctgtgtgcctgtcccgggctttaggctgctttccctacccggctcaacc

SEQ ID NO: 469328 - DNA, 1000 bp, Homo Sapiens; identical to SEQ ID NO: 338988

SEQ ID NO: 469329 - DNA, 1000 bp, Homo Sapiens; identical to SEQ ID NO: 338989

SEQ ID NO: 469330 - DNA, 1000 bp, Homo Sapiens; identical to SEQ ID NO: 338990

SEQ ID NO: 469331 - DNA, 1000 bp, Homo Sapiens; identical to SEQ ID NO: 338992

SEQ ID NO: 469332 - DNA, 1000 bp, Homo Sapiens; identical to SEQ ID NO: 158890

SEQ ID NO: 469333 - DNA, 1000 bp, Homo Sapiens; identical to SEQ ID NO: 338994

SEQ ID NO: 469334 - DNA, 1000 bp, Homo Sapiens; identical to SEQ ID NO: 338995

SEQ ID NO: 469335 - DNA, 1000 bp, Homo Sapiens
tttattcagctcaggggtggggtggctgggagcatgaacttcaggtccaggaagatgggtttggatccagtctttgccatttgctctctgaaataacactcaaaacatttcactcctctaagcttcagtgtccttataaaaaattgggtaaacaatactggtcccgtgacattgtgtaaagattgaatagtacataataaactgtattaaaagattttgtcaaggtgtgtggcacatggtatgtgctcggtcaatagcctttgtgtgtagtaacggctctggtagtaattttgctagctggagagatggtaataattgtgacagcaacaagtatttttatccccatttcacagatgaagatataggctcagggaaaataaataaatatccccaagagtcaccgggtactgtgcccaccccaagacacatcctaagacctggcacatgttaattttaatgattatctgggtgaatgtattaataaaaggggaaagtggagccggtggcatggggggtggtgtgaatgcccaccgaggtctgaagtggggtgcagatttgttcatcagcagaaagttactcgggtcatgtctgcagtggggggctcttccctagaggccttggccggctgcctccaggtcagggggctgagttggcatccaaagactcaaaggagtgaatcgtacatgtcagtcacagggttggcttgggcaccaccgtgctggggcaccactgggccctctgaccacctggagagcctgaccaggcctgccacagagacctcagagtgccagagaatctccactgtgtccttagctccacacagtcagggcttccctgaaatctgcctctctctgtcattatgcttggccggtactgctcatcctgatggctctgggcaggcagtgggctgcagaggcagagctgaggggaccaggaggcaggcactctgtgtgactttggaggatccttctaccccaaggcctcactgctgccatctgta

SEQ ID NO: 469336 - DNA, 1000 bp, Homo Sapiens; identical to SEQ ID NO: 338997

SEQ ID NO: 469337 - DNA, 1000 bp, Homo Sapiens; identical to SEQ ID NO: 338998

SEQ ID NO: 469338 - DNA, 1000 bp, Homo Sapiens
tcataaggagaaataaacaaacatgaaaattccaagtgaacacacagcaaaaagtccaatatttagtattactttaacttgccgagtctcttctagcatctgtaaacaaacagcctcctcttccatcaggtctctgagactcctcttgctgaggctcttacttttaaagccacaaaaccagtctatgaacttccagtaccgacctccatcatccgtttctttctttctctctttctcacccatgagagctgcttgcccattggagtaagcgtcaactggtgtttctgcctctgaatgacctaaggatgccactgggttgccctcctctctgcaggttaccaacagattaacatcttcaggctgaaggcccttaatgctgtcttcagatttcccgttgggaatgatgtggttgatggtctcattattctcactgcatctcagaatgctcttttcttgcattttgtatggttcctcttttggggagcagttctccttcaccaccaggttcttcttagaccaaaaggtggtggttcgaatctgttcctttgtgggaggtggtgtgagaaggctcacaattacagtaatgagtcccgtgacccaaaacaatcctgtggccacatacatataatggatgtctttgatgaagcccggcctattatcaggttggtcacattctggggcacggtaggcaaaggccagtatcaaacggactgctccaagaacaaagccagccattccaccatagaaagccccttgttcattgcagcgcttccagaaaattgccagcaggaacaaggctgccactgggggtgtcaggtaatctgctacctcctgaatgtaaaggtacatctggcctccttgcatctccacgatgattggcacccatgctatgctgatcaccaccataaatgccacaaatatcctccccacaatcattaactcccgggagcttgcgctcttgcggataagtttgtacacatcgagggtgaatatggtactg

SEQ ID NO: 469339 - DNA, 1000 bp, Homo Sapiens; identical to SEQ ID NO: 246410

SEQ ID NO: 469340 - DNA, 1000 bp, Homo Sapiens
ttttttttttttttttttttttttgacagaataccaaactatatttactgtttacagtagtaaaggacaacaaataatgtacaaattggtgaataaacacaacagagccaacaaacatcccacccgagcccatacagcaaacaggaaatgagaacatttcagcaagatttcaagcaagcaagagatgatgggtcattgttcaggtgactgtaaaaaggcagagaatggccaccaagcagcaatggagcctcagggaaggacaataggcagaactatgaaaatgtttaattggtatagatcccaaaatatttcacagaactgaaatcaccagactaatgcataaattcaatacctatttggaaagcagcacggcacaaacccacgagaagaacatgaagtcatcattccatgggttcatttgtaaccacacttggaagtagctcttatacacgacaacataactgcaaattcagcaatacttagtcttacttttttatgtatagaccataatcattcatcagaagcaaatactagaagaaatctgaggccacaacaccattaccaaatgagaaatgtgggaatttcttcaatattaagagggagaaaaaggccaattttggttgtgccaatccttgcctgtgtaccaacgccaggtactgagcagggagtggggtgggaggggtggcaggggggtgggtcctgggcctcagaccccgaggttacatgcttgagggccagagagcacgtggggtcaaattaccaaaagactcggttattttttaacctttgaagaagcattccagtattttcccttcaacttttccatatactgacaaagcttaaatttgcaatatttagcattttaatcacctgtgcctgtaacagcaagtgacagtctgtcctccctaccaaccttgcccccaatacctgtccaacagctgcatccccactgcgggaaacaccaattctctatgtgactggagtgagcaggggagaggca

SEQ ID NO: 469341 - DNA, 1000 bp, Homo Sapiens; identical to SEQ ID NO: 158893

SEQ ID NO: 469342 - DNA, 1000 bp, Homo Sapiens; identical to SEQ ID NO: 339001

SEQ ID NO: 469343 - DNA, 1000 bp, Homo Sapiens; identical to SEQ ID NO: 339003

SEQ ID NO: 469344 - DNA, 1000 bp, Homo Sapiens; identical to SEQ ID NO: 339004

SEQ ID NO: 469345 - DNA, 1000 bp, Homo Sapiens
tttttttttttttttttaaaaaacaaactgcaaaatggtatttatttacattaaaacatgaattgcctgtatacacacaaatataagaggaacaatctgttatgcacaataactgtaatatttagtacatgttatacacagcagtatctgttaagtcagtggtttgagtgaaaacacagtaccaaaacattcctgatacaaaataagttactcattcacatattctaatcatacaagacacttaatattttaaaagttacatacttcaaataacactggctaaatgtacaactaaagtttattaattttttttatgaaaagacttcagattgttattcataaatgatccctttcaggatgcattatcttttaaataaataaactaaattgacttcaagactatttataaatagcccactaaaatatgattgaagacattccttcattttattaaaggtgtagctatatactagagaatatgctcaactactgcctccaaattccaacactgtcattctaatttgcaaataggaattatttaaattccaacttcaggacatgagatgagctgcctgccctattttgtcaattgtttccaaaagcattaacggattaagagactgtcttgaacatctcaaacatttgagaaattcaaggttttctttatgttttaagctgatcctatatatggagattttgagataaattggaacacttttagaagaccttcacaaagaatttttcaattctaaaatctattacagatttatataaagtccaagagaacatgtgaaatattttcataatgcagtgaaggattcatctttggcatttctccattcattctaaaataagatacttcaacaaacattttatacttttctatctacctactatacatattttctatacacaaaagtatttgattgaaatttgtgttttaacagcaatttcattgctaagaatttttttttagatatgaaaaatattagtaacattc

SEQ ID NO: 469346 - DNA, 1000 bp, Homo Sapiens; identical to SEQ ID NO: 339005

SEQ ID NO: 469347 - DNA, 1000 bp, Homo Sapiens; identical to SEQ ID NO: 339006

SEQ ID NO: 469348 - DNA, 1000 bp, Homo Sapiens; identical to SEQ ID NO: 158894

SEQ ID NO: 469349 - DNA, 1000 bp, Homo Sapiens; identical to SEQ ID NO: 339008

SEQ ID NO: 469350 - DNA, 1000 bp, Homo Sapiens; identical to SEQ ID NO: 158895

SEQ ID NO: 469351 - DNA, 1000 bp, Homo Sapiens
aaaacttaagttttcttatatgaggtacccggactagtaaaattcatacagagcggtgcttgtcaagaggctggatggagtgaggaataaggttttaaaaggtatagacttagtttcataagttgaaaagacttctagatattcattgcacaatgtgaatgacttaacggtactgaactatacactttaacatggttaagatgttagattttatgttatctgtattctacaagaatactttttttaaaacgtaggtcccagtgctaaatcagagtagatttctgtgtgaagtctttccccatctgctttatatatacattctttatctggtgtgaactttctggtgctgaatgagatgagaattttggttaaagactcttccacattcactgcactgataaggtctctctccagtgtgaattctccgatgtttaatgaggctggagttgtatctaaagactttcccacattcactgcactcataaggcttttctccagtatgaactctctcatgactaatgagtgtggagctgtccataaaaaatttcccacatttgctgcatttgtaagttctttccctagtgtgaactttttggtgccgaatgaggtgggaattttggctaaaaactctcccacactcagtgcactcaaaagacctttctccaaagtgatttctccgatgtctaatatgatttgagttgtgcctaaagaatttcccacattcactacactcataaggcctttcaccagtgtgaattctctgatgtgtatcaagtgtggagcgacatctaaaggatttcccacaaatgctgcattcaaaaggtctttctccagtgtgaactctctgatgactcttcagtgtacagctgtccacaaagaatttgccacattcactgcattcataaggcctctctccagagtgaactctctaatgtctattcagtgtgaagcaatacctaaagaatttcccacatttgttgcattcataaggcttttctcc

SEQ ID NO: 469352 - DNA, 1000 bp, Homo Sapiens
gccctgttttcctactgagagatctctgcagtgtgtcttatgaccaagaaccatggcatttccttggctccctagccaggtcaagggcaaagcgggcgtgctgtcctaggaattaaaatggcaaataccaagatataatagctacaatagcctggcatttctcagtttaaggcctagagtagcatccattccaaataaaaaactgaataaacagaaaatgaaagctttaagagtgaaagcttttagtttcctagttaagacttttcttgagaatggattcactggtgcagacataattttgtagtacaatgagatttttgttacagagctcaagttgttagaacttctatctactagtggtgtctgatataacctgggctctccagtgttacagtgggcttcccaatctcatcacaatcatggggttgaggagctgccatgactataactaaagactttcccatatatcatacacacaaaacatttctccatcaggtatgttatccctgaaaacttcaaacaactgctacaatgacaacactgtttaagtcaaaattctgttccaaggcaagaaaacctaactcaggtgtgccaaagccaaaaccaaccaaacaaaaatggaatttattggctgctgcaattcaaaaacccgtatatatttttagcttcaggcatggtgtatgtggctgttcaaacattatcttcagtcttttactgctctccaattctcagatgcatttttgctgtgtggacttcattctcacctctgtaagagtctagttcttcttctcagcattaaaaccaatgggggtgggcggggggagagtatttgttcctattagctcttgcaatcctgggactctaattgaaccatctttggtcatctactgacatctgaatcattaactgtggcttgagggatggatcagaggctgagtcaggcctgtgtcacacattccattcctgagtagaagacggaatccactcagtacatttcact

SEQ ID NO: 469353 - DNA, 1000 bp, Homo Sapiens; identical to SEQ ID NO: 339010

SEQ ID NO: 469354 - DNA, 1000 bp, Homo Sapiens; identical to SEQ ID NO: 158897

SEQ ID NO: 469355 - DNA, 1000 bp, Homo Sapiens; identical to SEQ ID NO: 158898

SEQ ID NO: 469356 - DNA, 1000 bp, Homo Sapiens; identical to SEQ ID NO: 157445

SEQ ID NO: 469357 - DNA, 1000 bp, Homo Sapiens; identical to SEQ ID NO: 339012

SEQ ID NO: 469358 - DNA, 1000 bp, Homo Sapiens; identical to SEQ ID NO: 339013

SEQ ID NO: 469359 - DNA, 1000 bp, Homo Sapiens; identical to SEQ ID NO: 339014

SEQ ID NO: 469360 - DNA, 1000 bp, Homo Sapiens; identical to SEQ ID NO: 158899

SEQ ID NO: 469361 - DNA, 1000 bp, Homo Sapiens; identical to SEQ ID NO: 339015

SEQ ID NO: 469362 - DNA, 1000 bp, Homo Sapiens
gtttaacacatttattctttaataagttgcgtgatcatatttcattgacttgtacaatagaaaaagaaaaccttactactaaaacagggtttgtggagactggcacatggtaaacctatttagtcttttcagaggttcattcttagattttaatgttaaataacaactattcatttaagctggtctcactgaatatcttgacctttagcaattccacacacagcagcttattgtggtatcctttaaatatgagaaataagaatgtttaactttgctattaaaagaaaaataaaagagtactgtatgttacatggcccatgaaatattggcggtgtgctccttggctttcattcgaagaactgcgatactggaagacctcctttcaaactctggctttgtttcaaatgcatgtccattggttgccccagtaagaagagagtcagtgaaaaaattgttgaggggcacgtggctgaactggttctggtggtttgaaaaccccgtgtaactggaatctgtccgaggcgagtgagaataaggtgtcatacaggaggaagtgtcacgtggtaacatgcatgaagtaaccacagaaccaccacttgcatttcctgcccacaaattgttctgaatctgtgggtagctgtcagtccttggcaaaactgatatatcataggtggcagcaaaatggcttttcgcttgttgtatttggccataacgttccctttttctccatttggcccttcgattttgaaaccaaacctggaccctggcctcagtgagctctgtcctcagagcaagctgttctctgacatacacatccgggtaatgagttttctgaaagactttctccagctcctctagctgcaaactggtgaaggtggttcggtgcctccgtttcttactgctggatacattcgtatcacatttatccccaagttcatccagctctcccttctcttgcatccctttcacgggagacattcggagactgttacagttgtcc

SEQ ID NO: 469363 - DNA, 1000 bp, Homo Sapiens; identical to SEQ ID NO: 339016

SEQ ID NO: 469364 - DNA, 1000 bp, Homo Sapiens
tatttatttattcttccttagtttcttgagattatcatccgctgagggtggaaggggagtgagcagacacactcgggaggtgtcttgagattatcatccgctgagggtggagctgagggtggaaggggagtgagcagacactcgggaggtgtcttgagattatcatccgctgagggtggaaggggatagagcagacactccgcaggtgtcttgagattatcatccgctgagggtagagctgagggtggaaggggagtgagcagacactcggaaggtgtcttgaggctcagggagttatcaattatagaatgttgttgagttggaggaggtggctggtggcccatcctgttttttaaagtttcagctgtgaggtagggccagtagggcaatcctgaagaatgacgatgctccactgccgccattctgacccggttgcaaagaggctttcttgcagaaggggtgattttgcatctgtagtagtcctctgcccgccgccgcaacgcttgcgcacgttgaaacatttccatgtaggtgtgtatttctttcatatccaatttcccattttcctctgcctctgacacctgcctctccttttctccgtgctcacgttctttcatgcttagtttcctcagatgttctttggcggtcttcctctttccattgattttgtcatgacggttgacttttgttgtcaccttcatcttacggattttagctcgaactttggtttccacctgtctccataaagtaaagatgtcttccaggacaattttaattccttcctgtctacggcggttggacctcctggctctctgctgtacatccgtggatccatcatgtccattttgagacgggaagatagtcttcaggaaagacacacaaaggtaagttgtgcagagggagatggcaaatttataacttctcagaaacacagtaatgataagtaaccaaggacttccaccaaagtcagtcccacgatgacgatggtcagccagagtat

SEQ ID NO: 469365 - DNA, 1000 bp, Homo Sapiens; identical to SEQ ID NO: 158901

SEQ ID NO: 469366 - DNA, 1000 bp, Homo Sapiens; identical to SEQ ID NO: 158902

SEQ ID NO: 469367 - DNA, 1000 bp, Homo Sapiens; identical to SEQ ID NO: 158903

SEQ ID NO: 469368 - DNA, 1000 bp, Homo Sapiens; identical to SEQ ID NO: 246475

SEQ ID NO: 469369 - DNA, 1000 bp, Homo Sapiens
ttttatccaactttattgacaactgaatgatttcaaaaagtactttcacaaagatcctttcacttaaccctcacaacaaccctgtgaggtaggtatcatgtcaacatttgactgacaggaaactaaagctttagaggctgacttaataacatcacatggccattaagggaaagccaggaatcaaaggtaggtcttctgattccaaatccagtgctcttttaggttgtcctcatcagcagactcttgtccgcccaactccacacctgacattctggatcatactgtctgttcaggttttccacagcagtgacactatctttaaaatgcatactatacacattttaaaaaacaatgtccactttttattattaaatttttagttttattaataaatttatttttatttactaaagacgggtctccccgtgttacccaggcttgtctcgaactcctgggctcaagggatcttcccacctcggcctcccaaagtcctgggactacaggagtgagccactgcacccagcccatgtctactttttattgttgctctcatttacaactatgttattagatttggattatgtttttgtagacttgaaagttgggatgaactttattttttcagacaagagtttcgctcttgttgcccaggctggagtgcaatggcgcgatcctggctcactgcaacctccgccctcccaggttcaagcgactctcctgtctcagcctcctgagtagctgggattaccggtgtgtgcccccatgcccggataatttttgtattttagtagagatggggtttcaccatgttggtcaggctggtctcaaaatcctgacctcaggtgatccactcgcttcggcctctcaaagtgctgggattacaggcatgagccaccaagcccggcctattaactttcttctatatgctactcatttgtctagtaaagagtaaataataaactttttccttagaagaaatatatatcatttgtccaacagt

SEQ ID NO: 469370 - DNA, 884 bp, Homo Sapiens; identical to SEQ ID NO: 339022

SEQ ID NO: 469371 - DNA, 1000 bp, Homo Sapiens; identical to SEQ ID NO: 339023

SEQ ID NO: 469372 - DNA, 1000 bp, Homo Sapiens; identical to SEQ ID NO: 339024

SEQ ID NO: 469373 - DNA, 1000 bp, Homo Sapiens
tttttttttttttttgtttccaattgcagatttatttccacacacacaaaaaaatctatgttgaagttacaggattgccatgaatgccacacacctttcagactaagcagaaagcccacaagaaaagcacaaaatgaatgcactcagctgcccctgtcccccccaccctggtgactggggaaggacaggcagagccatctaacaggggagctgagtctttgggaggataggaaagcccagggtcaagggaaaacaacacagacactacacaggggctttcagtgagacagggatagatcacgccggtggaaggaaggccctagcgtccctgttcttgcccaagaatagcacaccatttgtgagtttgcccactgtgttcccaacatcaatgcacagatacaattctaccagcaagatcacagaaacatagtaagagcaaaaggcaaagcagtctgggattatgggttgattttcagcccaagacacaaagccagctcagacttctgaatttttccatccttgttcacgtcgcagtgacgcaggagaatctcgcggaacttatcaaggtccaccccgctgatgctgggctggacaagctccatcatgtctttgacaaacccatccacttctgggccttccagggctcctgttttactaacatcatagtaggcaaagattttctcaaagtcccttttcctttcttcagtagaacaagcatccattttaaattggagaaggaagttttcctgaagagccagaatccttgctaagtcatttagatccaaccgaccatctttatttctgtcaaaaatcttcatcatggtgccagtgtattcttccagtttagcctcagaaatggcctttttgtggtgaagaaagaggtctcggaggaagttgcggagctcagcagctgatataaagccactgctgtcagcgtcatatttgcgccaaatctgcataaactccacgctgctgtccagtgggttttcccggcgaaaga

SEQ ID NO: 469374 - DNA, 1000 bp, Homo Sapiens; identical to SEQ ID NO: 158905

SEQ ID NO: 469375 - DNA, 1000 bp, Homo Sapiens
ttatttattgactatctagtatatgcttagccccgtgctgggtgatgatggggacagtaaagtgaccgtgacagaactctcatggcaatagaggcttccagagctcaaatggcaatcacaaacggttcagcaagaatggcgatgcctgccatgaaggaggaggtcagagagctacaagagaggtatctgtgaatgggaggtgggatcatggagaggtcccttgaaagatgggctaaggatatgtgcacacaagccctggggtttcagggcacacctgagacacagtagggctcaggaacctggaaaaagatcttggaagtggaaggacgtaagggctagggacgttgggaggtgagaggtgaggcagccatccaggcccagcggaggaagcaggaggaggatgcggaggagtccggggtgtgtatgttgccttcccctcctgtccctcagagcatggtgtagaaatacatggctatcagcatgaccgggagcgtccacatcaggatggcaaacccaaaccacgagataccccacgtgtagctgtcgatggcgtggccgatgtgttcgaagcagcccttggtgaacaggtagtccatgtgccccaggcggcagccctcctcgttgagggggatgaagtttcccgtccggcgacagcacagtgggggccaggggaacaccacctccggagtggccgcccggaaggctgacgtgaagttcacccagtccatgggaccagatgtgccacagcattcttgctcaatcatgacgcggtcccagaggcgggtcagctcctggccctggtcggtgtccgcgctgtagaaggtcagcatctgcttggtgatcagggatgggttggacaccatgtagtcacggtgggtgtaggacgtgatgcaggaggcgcactcgaagatgtagacgatgagcatgagcaccaggtacgtgaggaccatggaccggcggcggcagagtgcggcacccacaccaaaactggctaccatga

SEQ ID NO: 469376 - DNA, 1000 bp, Homo Sapiens; identical to SEQ ID NO: 339025

SEQ ID NO: 469377 - DNA, 1000 bp, Homo Sapiens; identical to SEQ ID NO: 158906

SEQ ID NO: 469378 - DNA, 1000 bp, Homo Sapiens; identical to SEQ ID NO: 339027

SEQ ID NO: 469379 - DNA, 1000 bp, Homo Sapiens
aagcaaccgcatttcaacaaaatgctttaaaaaatcatttctgaaagtgaacagttctgataaacatcaacgatcccatgcacagatacttcaaacacaaaatattttaaaataaaactggcagtgatatgggtaattcaaaacagctaattttgtcagaagtggtttgatagcagacaagatgaaagtgaagaacagcagtggaaatttctggagggtttctacagttgcacataacacagtatctagggtattttaacactttaagcattgtcctagaatttgggtactctttaacaaccaatgtgtattaacagaagatctctcaaagataatcagatcttaaaaacatattaacgtgctcaagaattttaagtcaaatttctgaagtagtgatttcaaattacattcccataaaaacacctaatcaagttgacaccctgcctctgccaattttgcaatcaagaacacatgctagtcaggtgcttttaaagtgggcctatatgtaaggcaggtttgaaaaaaatctttgattaagtaactatagcatgaatcaatacggtgcatgaatatacatagtattccttaaactgtgcagacacggtttatctgtaatttcccattacaaatactggggaatacaaccgaatgttaatgaacatcacatccttcaaaaattttataccaattggaaaatataaggctctctttactcacatttacctgctgcagggctgtatttacactgactatggcttaagaaataaaccataagatcaataaaaacagcaagtaattgcagcatcaaatcggaattgtcaaaatttcttcaatgttagcggttcacaattaagtgtttcggtacatctgtgttgtaattaacctgcattacacatcaaatatgtacgggtttttacttatgtgttaaaacctctgttttttttgaccccttacacattgactagattgctatgtctgtcaaatctctatttttacaagt

SEQ ID NO: 469380 - DNA, 1000 bp, Homo Sapiens; identical to SEQ ID NO: 339028

SEQ ID NO: 469381 - DNA, 1000 bp, Homo Sapiens; identical to SEQ ID NO: 339029

SEQ ID NO: 469382 - DNA, 1000 bp, Homo Sapiens
tttttgatcatcagtaagttttattcaaccattagactcacgctgcgttgaaagacaatccccctccactcatttccactgtaacttcactttggggttctgctgttgggcctctacttgcctctttccttcttctccctccccttgatcctgtcatctctgaagtccctctctctctcccagtcattgtcgggccacaccctggtcggctctctttcttgccatctcttctcccggcccctgtcatggtctcgatcccttgtcctcgagtcccagtgtctttctcgggatcgagatcgctcccgcctttcccgttttccctctctatagaggtcgtttttaacaactggcaagttaataggttttcgaaaaggccggtcccgtcccccaaatctcagttgcccagactccttttttcccccaagaccgcctccaagtcgccgagggatccaccctttgagagtcctttccagctcgtagtccacaaatatctcatgctggtcaataaccaggccatcagcatctcggtaagctttgatcacggcacgctcctccttgtattcgatgaaggcgtagccctttgaaaaacctgtgaccaagtccctgaccagccgaagccgccggatgtcaccatagcgggaaaagacttcctttaatttgtcctccttggtctgcaagtttagtctggccacaaacagggtgaggaggggatctcctatgacacctttgttggggacatatcgtgccagcattgccctccagaccgcgcggtcgtgtgggtcttcatcggtgccatcaatgctgcccgctttgagtggatcatactccttggcgatgggcatccaatcgttcatgttctgcaacgctgtagagccaatgctgaaatatgttacttaaaaaccttggctgaggccagacgcggtggctcacgcctgtaatcccagcactttgggaggccgagtagctgggattacagacacacaccaccacgcccagctaa

SEQ ID NO: 469383 - DNA, 1000 bp, Homo Sapiens; identical to SEQ ID NO: 158907

SEQ ID NO: 469384 - DNA, 1000 bp, Homo Sapiens; identical to SEQ ID NO: 339032

SEQ ID NO: 469385 - DNA, 1000 bp, Homo Sapiens; identical to SEQ ID NO: 158910

SEQ ID NO: 469386 - DNA, 1000 bp, Homo Sapiens; identical to SEQ ID NO: 339034

SEQ ID NO: 469387 - DNA, 724 bp, Homo Sapiens; identical to SEQ ID NO: 158911

SEQ ID NO: 469388 - DNA, 1000 bp, Homo Sapiens; identical to SEQ ID NO: 339037

SEQ ID NO: 469389 - DNA, 1000 bp, Homo Sapiens
ttttttttttttttttttgctgctggaacgttttattaagttaagaggttcagggagcagaagagaaacaccttttgggtggctctggcggttctgcacccagcacagcctcgaaggaggctgtggggccatggaggccagctgctagctccctctgtcctgagccccatggtacgggtccaaatggggcaggaagtgttagtaggaggtagggcaggaagagggtggcaggctcccgcctctcccctgtagagacaccccgccatggctgctgcctgggcctccgccagacctctgggccagggccaccagctcagaagcccaagcagagggtggctggagacagagggggaccagggttggaggcacacagccaccaggaattgctttttttttttttttttaaagtataaagtgttttggaaaaaaaggaaaaaaatctatataaaaatctcttcacatataaaatcctgaagaaggtgcaaggtgagacccagtgcgaggggcgcgctcagatatgcagtgtgtgtgtgtgtgtgtgtatccgtgtgtacatgtgtgcacgtgtgtgcgtatgtgtctgtgtgtctgtgtgtgtgtgtgtgtgtgtgtgtgtgtgtgtggtgggtgcaagtgcacgtgtggcccacagagggtggggagaaagcttggctttttacttccatccaggagggaaggagggcggctggtcctccagcctggagggtctgcagctgggcgggacctctactcagccaggctgttgcgcatcgactccttctcctggagggcggccatggcaagacgcaggtgctccttcagctgctcgatctcccgctcagaccgtgtcttgatgtggctcagctccacatagacgtcctggtactttcccgaggtgaagcgcttgtccttctgcatcatctggagctcgtcccggaggcactgcacctccttctttaggtactggagttcgttttcttttacgcgaagcagcacctct

SEQ ID NO: 469390 - DNA, 1000 bp, Homo Sapiens; identical to SEQ ID NO: 158912

SEQ ID NO: 469391 - DNA, 1000 bp, Homo Sapiens
tttttttttttttttattaaaacatgttctttaatgaagcttgctaatttctttgaaatattctgttttgttagaaagcattcaatatttttatttagaaaatccaaaaaacacaatcaaatataaagaacaatttgcagtttaagtggatttcaaatgttaaaacactaagattccacaagaaatgcattataataaacataaaatttagaacttataagaatgcagtggactatatctaaaaacaacagctacaagaaatggtaatgaactagaagtgactgctgtttcattatttgatattaaataacaagaattctttagtgatgaagtatttgattcattccatacccattctcaagctaaatatcaaacttgtaccaccaacagctacttagcaatctgcaattgttttattatgattacaattaagaaatattttattttctcattttcttcaggtcgttatcctcctgtttgattattacatttatactgtaaattacggtatctgcataagtaattttaaacatacacaaatgtgtcctttttattgtataagaatgtaattgttttctttagtgttaataagctatggaagagaccaaaataaaactatctttgagttgataaactatcttaactctgtgtctgttttattaattaaaagaaaagcaaattaatgcaggctgtgatgcatgtaactggcaaaagcatctttgaatagaaaaaatacactgcacaaatgaaaatggtggccgagagcaatggggaatatgacttgtgtcctaaacctattaatggtaaccacatttcatgtcagaaacagctcattaaactaattttagatttggtgagaatgtgtttaaataatgacagcctgcagaagtctgaagcaggtcattaaagccattggaattggtggtttgatttcatttccatccagacggaggtagcgaagatgaggtccataactgaaggaatctcgttctgcaggcag

SEQ ID NO: 469392 - DNA, 1000 bp, Homo Sapiens
gtatcttgttcttttttattgaacaataataaacatgtccttttaaaacaaaacctaacagcttatgcagctttacattcaaaggccttccacacacattcacaactctgttggccaacttcaagaataaaatacaggtaaatactgaaataattcttaaataagttcttcacttcaaataaaatacttctgagatatttcctaagaacatctagtacaacagtcctgtttgtgctaagattctttcaaatatactcctaattccacctatattttaaagttgacatgttttctgctgaaaattgattcttcttttacaaacctcctaaaaacttattttcataccttaaattgaaaattcaccgaagtcacagcacttatgtttaaataaggtccctctgttgctcattttttgacattttttgaaatccagagtgactcctataattatggataataaatttatcatgcctcagatgtttgaaaaccttatagagtcataggtttttattctaaccattttcaacaaataatactagatttctttcctcaagaggatgataaatatgggtagggaagatgacttgcactaacacatttatttataaaaatatataaatatttaccttcatacacacacaaaccaccagtgggtaaaatacttcttagatttatctctgaggtggcatacgttaaagctatttatggaagtgtatgtgtttcctatgccccagaaccgtccttcagatacaggtaacccgggaactacatcagcagccttttgaaattgctctcagttcaaagctgtttgttactcaaatttccataagcttcaaacatcttacttccttcaggggttttctggttgttttattttgacttttcccaaagccaaaaaaaaaaaaaaagcacaattaaattctagagaagctacctaccaaggaagggctaaatattttatttcccactcccaccccctccccatcttctcctgctctta

SEQ ID NO: 469393 - DNA, 1000 bp, Homo Sapiens; identical to SEQ ID NO: 339039

SEQ ID NO: 469394 - DNA, 1000 bp, Homo Sapiens; identical to SEQ ID NO: 339040

SEQ ID NO: 469395 - DNA, 1000 bp, Homo Sapiens; identical to SEQ ID NO: 339041

SEQ ID NO: 469396 - DNA, 1000 bp, Homo Sapiens; identical to SEQ ID NO: 339042

SEQ ID NO: 469397 - DNA, 1000 bp, Homo Sapiens; identical to SEQ ID NO: 158913

SEQ ID NO: 469398 - DNA, 1000 bp, Homo Sapiens; identical to SEQ ID NO: 339044

SEQ ID NO: 469399 - DNA, 1000 bp, Homo Sapiens
tttttttttttttttttttttcttgagacagagtctcgctctgtctcccaggctggagtgcagtggcgtgatctcggctcactgcaagctctgccttccgggttcatgccattctcctgcctcagcctcccgagtagctgggactacaggtgcccgtcaccatgcccggctaattttttattttttgtatttttagtagagacggggtttcaccgtgttagccaggatggtcttgatctcctgaccttgtgatccgccctcctcagccttccaaagtgctaggattacaggcatgagctgctgtgctggccctcagaggttaattttcaatcttcactcgaccactcgtgagctaaatgagttccccttttctgcagtctatttttccatacatccaatttatttaacaaggtggagcctcatctgaagcatttcctcaccaggcttgaagagggccatttttccattagagcatcaggctgacttattggtatcggacgaagactcctctccacgagtcaagtactggatttttttcctcttgagttcctcctggaggctctctcttaggcttatttcccgctctgttgcagcatatcccatttctttcatctcttgctcactttctatctcactggacagagcagttatttccttctgttgtctccacaagaagtaactggctccggcgagaagcagcagcaagataggcagggtccctgccagggctgcgatccagggctgggcgctcctgaagaaggggtctgcgatggaaatgctggctgtcttttccaggccgaggagggaatttctgatgatgcaggatacaccctccccggagccgcctctcatgatcacagatgctgctacttcatataggcccactccatctgcaaccacaggtgcttccacagctgggatgttctctcccttggcgttgctccactgtatttggggttgggggtaccagccggtggacctgcactccagatggatccct

SEQ ID NO: 469400 - DNA, 1000 bp, Homo Sapiens
ttttttttttttttttttcagcattattaacaaatttattgaacaactagaacttgacaagcacatgccaggtagaggggatacagtggagagcaataataatgatgataatgaggagtagtttttccctagcaggcagcagttgaaaggaatattggtttaacatccaccaatgagcaggggtggatagacccctctcctggagacagagtccataacgggattaaaaatatccctgtaagccggtcacccggtggctcaagcctgtaatcccagcactttgggagaccgaggtgggtggatcatgaggtcaagagatcgagaccatcctggccaacatagtgaaccctcatctgtactaaaagtacaaaaatttgttgggtgtggtggcgtgcacctatattcccagtactcgggaggctgaggcaggagaattgtttgaacccaggaggtggaggttgcagggagctgagatcgcaccactgcactccagcctagcaacagagtaagactccatcttaaaaaaaaaaaaaaatccctgtatttcttctagctcccttcatccaaatttcctatatcacagagaatctctagggtatttgctctgcctggaaaccttgattgaaggaaggctggctctggctgcatgatcacttatcacatttgttgggtggaacacatctgttccccatgatttatcaagtgtggcctctagtctctttccaaatcacgtgtcatgtgggtacggtgaggttattctctcaaccaagacactctgcagagctaatccaaggcgtgctgggtctaaggctctgacaatcagctgggaaggagtcaacaggggtgtcaactccacaaccacctacagtgatccttatcctggagccatcctgggaaaagaacctcagggctacaggtgggttcttcctatgggggaagaaacagggtggaaaagaacggccatagggccggggactgaagctgaacatctcccaactgc

SEQ ID NO: 469401 - DNA, 1000 bp, Homo Sapiens; identical to SEQ ID NO: 339047

SEQ ID NO: 469402 - DNA, 1000 bp, Homo Sapiens; identical to SEQ ID NO: 343549

SEQ ID NO: 469403 - DNA, 1000 bp, Homo Sapiens; identical to SEQ ID NO: 339048

SEQ ID NO: 469404 - DNA, 1000 bp, Homo Sapiens; identical to SEQ ID NO: 339049

SEQ ID NO: 469405 - DNA, 1000 bp, Homo Sapiens; identical to SEQ ID NO: 339050

SEQ ID NO: 469406 - DNA, 1000 bp, Homo Sapiens; identical to SEQ ID NO: 339051

SEQ ID NO: 469407 - DNA, 1000 bp, Homo Sapiens; identical to SEQ ID NO: 465213

SEQ ID NO: 469408 - DNA, 1000 bp, Homo Sapiens; identical to SEQ ID NO: 158915

SEQ ID NO: 469409 - DNA, 1000 bp, Homo Sapiens; identical to SEQ ID NO: 339056

SEQ ID NO: 469410 - DNA, 1000 bp, Homo Sapiens; identical to SEQ ID NO: 339057

SEQ ID NO: 469411 - DNA, 834 bp, Homo Sapiens; identical to SEQ ID NO: 339058

SEQ ID NO: 469412 - DNA, 1000 bp, Homo Sapiens; identical to SEQ ID NO: 339059

SEQ ID NO: 469413 - DNA, 1000 bp, Homo Sapiens; identical to SEQ ID NO: 158918

SEQ ID NO: 469414 - DNA, 1000 bp, Homo Sapiens; identical to SEQ ID NO: 157634

SEQ ID NO: 469415 - DNA, 1000 bp, Homo Sapiens; identical to SEQ ID NO: 158919

SEQ ID NO: 469416 - DNA, 1000 bp, Homo Sapiens
ttttttttttttttttgttgtaaagatgtttttatttttatttttaaagacaaggtctcgctctgttgccagattggagtgcagtagcacaatcatggctcactgcagcctcagtcccccaggctcaagtgatcctcccacctcagcctccctagtagttgggactataggcacacaccaccaatgcctggctttttaaatttttttgtagagactgggtctccccatgttgcccaggctggtctcaaactcccggcctcaagcaatcctcctgcttcagccctccaaagtgctgggattactggcgtgagccactgtgcccggtctaaagatgtctttaaatcaagaaaacattccggattctagcctatatttgtggggcctggattctagcctatatttgtgcctcacaagaatacaaagtagagactccagcctgctcttgcttctctccccaggcacgtaggtgggacatcccagctaccacccagccttcttatcattcctgcccctagtcttggggtgaaggtggaggagaggcttgcagaggccatggtggcaggttctgggatatctagggaccttataaattctaggggcccaggaagtcagaggatggtcaagcagtagatagtgagggctggtgggcatctgccccatgatggggaaagggtgctggcgaagcagacatagaatgggccttctagagcacagggcccgaggagcccctggctgtccaggcctgaaggcagtactgctgcattccagtctagcccaaataaactaagtccttaggcctctttaaaggcaccaaatactgaaaaggccgtggaggttttctgtaccttcacgcgtagagcaggtacgcactgatttgaagagtagttggtgtgtctcccatactgtgctgttcattggtgccctcccctggctattcagtagatgggggtggtggaggcagctcctttgaatgatgaactgtctggagaaaagcaagtct

SEQ ID NO: 469417 - DNA, 1000 bp, Homo Sapiens; identical to SEQ ID NO: 158920

SEQ ID NO: 469418 - DNA, 1000 bp, Homo Sapiens
atgtcattcagcctttactgtaaaaaaggaaacaataaaaacaaaaccctattaataaacacaatgcaaacaatgcccgagattatcataaaaacatactagcaagccacaagtaccagagaggggtgaacaggcatatctgctagctctcctcttgcagtcctcagcctcccacaggaggcacaaggtccaaactattcccctagccccagcccctcagctgtggggagaggccacctcctctgatggggtctcgatgctgctgctctgttcctggtctggcacgtcctcctcttcctgctccaagctgaagttctcgagctcctgaaaaatctcatccatgaagtcctgggagttctgtttgtaagacacagctaatcgaattgcatcattgaagagcttcacaacattggtaccatcagcagccgagacgaaatacaggggcagggagaacttcttggcaaaattgaagcttttttgggtcacgtttatgtcatcaattttattggccaccacgatgcatgggatctctggcctgaactcccgaagctctgtataccaggtgctcaggttcctataggtgactttcctctgtatatcaaacaccatgatgcaggcatgggccttgtggtagtaggaggcatgcatgctctggaaccgctcctggcctgccgtgtcccaaaagtccacaaggatggtcttgccatctaccgtggctgtgtgcttgtacagggtcagggcgtacgtggacagctgctgtggctgaaagccatccatgagaaatctctccatgagtttggatttgcccactgcgctgtctcccaggcagatgatcttcacgttgtcatcagcatcatacttcccttggtccaactcactcggtttggttttgtcttctgccattggctcctagctgtagagaggggtccagcccaagggaggggagggtattgtcagtgcggttccgagtgagggctggagagaccagggacgctgcggg

SEQ ID NO: 469419 - DNA, 1000 bp, Homo Sapiens
tttttttttttttttttttttttttttttctttttcacgcatttgctttattcgaaaagaggcttttaaaatgtgcatgtttagaaacaaaatttcttcatggaaatcatatacattagaaaatcacagtcagatgtttaatcaatccaaaatgtccactatttcttatgtcattcgttagtctacatgtttctaaacatataaatgtgaatttaatcaattcctttcatagttttataattctctggcagttccttatgatagagtttataaaacagtcctgtgtaaactgctggaagttcttccacagtcaggtcaattttgtcaaacccttctctgtacccatacagcagcagcctagcaactctgctggtgatgggagttgtattttcagtcttcgccaggtcattgagatccatccactcacatcttaagcattcttcctggcaaaaatttatggtgaatgaatatggctttaggcggcagatgatatacatatctgacttcccaaaagctccaggatttgtgtgctgttgccgaatactcaggacggacctgaattctgattttataccagtctcttcaaaaacttctcgaaccgctgtgtctccaatatcttcttcaggctctgacaggcctcctggaaacttccacatatttttcaatttatttcgatcttgtacaaccagtatttttctagtactttcatcaaatacagctcctgcaactcctacttgatgtgaagcatatcctggtaatctgctgggcccttctctcagccacagagtcaacgttgatgaatccgattctgcgtggtgaaagcagaagcccagggaagcagcaggggcaataaatcggctttggaggatgggaatgtgcagccatacagctgttctaccttctgatcgccattgctgtactgcagcctgcaagcccttctggaaggcggcagcgtccaggcggtccagcgcatcgagccgcgccaggcgcaccgagatgc

SEQ ID NO: 469420 - DNA, 1000 bp, Homo Sapiens
ttttttttttttttttttttttttttttcttttccctggttcaggctttatttaaactctttgttcaaaaaaaatgaacagagtgatagtcggattctaatttacagatataccttagacgtctaatattaaattagaaggtcacactagaaaatcatttacacataaaggttaaaaccatatttaaaattttaaaaactttatattacataaagccaaaatgaaactaaatacatgttagccaacttcattcacaaacattagtcaaaatatatacatttaaaaagaaacaaagctaataattgaaggttccttttttctaaaatgtgttttattgcaatttgcaaatgaattgcaggtgatctaaaaaataagccaattgaggagggaaatccaaaacacattaaaccagctcaacttgggagagaaatgctagctgaaaatgagagacatctgttgaaacaattctgtgctttttttcttcagttttgctaaataataaatatataattaccagacaaaaaagtctgatttaatcttcgataaaattgcgattctgaaatagtttcgcaatttttaaaagttaactttgatattcgctcaaaatgtttttgagtctaaagtcgactcaaacttagggcaacgaaaataacacattttccaagcctcaatgttttcactgacatatacacatttacaatcttaaggtgaactcagccataagggaaaataggagcagtgcctttttccttttttgtaaactgtgtcagaaatccaagcgagtggactcagggagacttctagtagtttgttgttgttgtttgtttaggaagaaaatccaattgacaactttcatctcacaaatatttcttgtttgcgtttcttgcccttgagaaagagctcttgctctgatttgcaaatggcgtgataaacaaaagaaaccgtgatcatctcacacaaaaggccagattcgagccggtcactggtcaagaatggatct

SEQ ID NO: 469421 - DNA, 1000 bp, Homo Sapiens
tttttttttttttttttttttttcactttaatttctttattcatcaatagtatccgaaaaggaagaatcaggagttacaaaaacaagttaaatgcaatatagaagcctactaaatacaaatacaagttcacaaacacatatgcaacagaaacttgtttagattgtttcttgaagtttgactacttaaaaacataggtgtaaaggaaagacattcagactggtccacgtgggcttgttagcaggcagaggaaccctgctttccaaaaactgatatagtccagagtcacggcatgtgggaatgtttccatggacactggatcttaacagatgctatagtgtttacaaaactacacacacagagaaagcccaaggaagcctgcaggctaagccctatgcttttagagggctgaaggaaccaaacctagtttaatcctgtttgtttgctccatgcaaaactttatggaagactccccagactaggctatttagcagcttccatgaatggtcctcagatcatgtgattctacggcatagacgacagctgccctatttacacagaagctgcagaactcaagaggaatgtggatttgctcttgggagttcaatgttgcagggtagagtagtcttggatgataaccatgttctaaatgactagtgaagagacactgtggtttcttgcttttaacaaattggtgtactcttgccctcctcccatagtgtccaagggctggtaaaacctttgattaaggcgtgctgctgtgagttctccaaggcacttggacagggagctgcatttcagactgaacaagtggagtttgaagagtttttagatgggatggatacataaaagcttgaaatgctaaacaaagtggaattttctcctttcaaatgagaacaagaaaaactagaaggaattctatttttggcacaacagtttctcacagttgcctgtgcattacaacctaaataatttccttctgatggtctttaatctgctttc

SEQ ID NO: 469422 - DNA, 1000 bp, Homo Sapiens
aagtttccacagcaggacctttccattttattgtctgtaaactcttctttggtaaacaagaaacccaaagagaaaaggagcacgccgagtaaagaaggcaaggaaagggcgggtgccttccacacacaggagttctgagaggacagctacaccattggcaaggtggtggatggaacctggaagtttggggtgggtggtggcatgggggaccggcagaggggagcgagagggaagagtccactctgttggacatagaagcctaaatcatacagcgagggagctcatgcatcacagcgaagagaattagggaccctccacccatgcccccatcaccttccatgtgtgtgatccactgagcaaagactgcctgggcaggggtgggtgcagggggctcaggacagccccccagctgcccatcctctatctctcgtttcctgctctgcaggcaggtgtgtgcaggctgtaggggtgggggcggggcgctcacggtctctgagtctgggtagacgcatcagggcagcagaagcagggtttgggggaggtggagaagcagcccccgtccccactttacatggggggctcgctgcagagcacaatctccaggtccttgcggtagagcttccctgcctctgccaaggacatgacgctctttctgtagttggtgagctgttgaatattgatttcctttttgtttttctcgtacagatccttcaaaagggcatccagctcatgctcgtcaatgtagccgcttctatccgggacatctctgagaggcccaatttgccatccccgttcaagtcaaacatccgtagtatggtttgggtgtattcctggagcttgggctcatcgtacggccggttcgccttcttcagcaggtctgacaggaatcccttgagctcattggcttcgatgtagccactcctgtctgtgtcgtacttccgccaagcctccataaactcggcgctggagcccacgtgctgcctgaagcacagaaggaagt

SEQ ID NO: 469423 - DNA, 1000 bp, Homo Sapiens
acagtttgaaacagaaatttattctcagaataatgcacagaagcacaggttgaggctactcttgggaagcttccctccccttcctcttcctcctctccctcctctctgaatgccagggagaacacagttgaaggaaggaaacatgcaatcacaaacaatgaacaactctaaagacaaaaaggtttggtccaaaagaactcaacataattaatccaatgactgtgaagagcttcactgagtaggattaagatattgcagatgtagtgtttccacagggtggctcttcagtgcaccagcggggcctgcttgagggagatgaggactgagcgcatgcgggagacatctttggcctgcttgctagacttggggttaaagtcacacagccgggccacccgttcccactcagtgcctggggacgactcgtcaatgtcatttacaaaggcttcttctgctgcctgttctaggctgtagcaaggatggtttatgtttgtgacataaccaatcacgtcagcgaagggttgtttgtagaaagcttcatctgccaccctgttgtttgcttttgttttctgtagctgctcgtcctgtcttgcataccattcttctagctcctttattgccttttctttccactctgcttcttgcttccgagaattggcatcaagggcttccaagcgttccatttgttcttctctccatttacggatactttcaggctctgactgcaatcgatccacttgtgaaatagctgcataactgtctgttggaccattactttcctggtagtattcaccattcattactccatcaacagcatccggaccccccggcggctcgccgtgcggctggggcccgggggcgccgccgtccaggatggcgaaggcctcgtcgttctcgatgcccgcaatctcgctctcttgctgcgccaagaaggccgcagccgggtcttcttcgccggcgccggccactccgttccccagcgcgggaccgccaggggcgccgg

SEQ ID NO: 469424 - DNA, 1000 bp, Homo Sapiens; identical to SEQ ID NO: 339063

SEQ ID NO: 469425 - DNA, 1000 bp, Homo Sapiens; identical to SEQ ID NO: 339064

SEQ ID NO: 469426 - DNA, 1000 bp, Homo Sapiens; identical to SEQ ID NO: 339066

SEQ ID NO: 469427 - DNA, 1000 bp, Homo Sapiens; identical to SEQ ID NO: 339067

SEQ ID NO: 469428 - DNA, 1000 bp, Homo Sapiens; identical to SEQ ID NO: 339069

SEQ ID NO: 469429 - DNA, 1000 bp, Homo Sapiens
ttttttttttttttttttttgttaaaacattctctatatttaatttcaattttataatagattacaggaagatgcttatgaaacaaatacatttgtttcagtacatgtctttaaatgatagacttataagtatgtaaacaactatataataaaaggtttccaaacgctgcctgtaagaaatcaggcaaattttaccataagcaataaaccattccaagccttccagacagtctccatagccgcaccagcatggcaataagctttaaccaaacgaaaacaaacaaacaaaagcacttcgcaatttgttgctgcaaaacagggagagaaaagagtgtacaaacttgatggaatcacaacagtcaatataatttaagggacaataaagtcaataaggttgatggtgtttattgtttaaaaagttgaattctgctgtttgcttggggctgtttagaaagttgcattctgctgtttgcttggacaccgtaccactgaacaaactccacagagtcttgctatccgccagcaggggtgccgtccaaactcacggcaaataagcggcatcaggggctcaccatccacaacaggaggtgttttattttcatggatgtggttgaaatacaatttcttcagcaaactcagcaaaaacttttcaggggcaaaaatgaactctgcacttaaagaaaaatagcaaatgaaaacacaaaatcctaacaactaaataaacgctctgcatcagcacactggtatcaaaacacacatccacagcacgtcctaatcctacgggaaacaatccttgcttatcagaggtgcatatctaaattcaatagcttaccaatatcttcttgggagtaggccaaaaggaaacagaaaacccacattaaaaaaaaagtttcttttcgctaaacgttttcctgaagccgaatctgaagtggggaggacgtcagtcgtcctcgtcattctcgttgaagtcatcgtcctcctcgtcgtcctccccgacgta

SEQ ID NO: 469430 - DNA, 1000 bp, Homo Sapiens; identical to SEQ ID NO: 158921

SEQ ID NO: 469431 - DNA, 1000 bp, Homo Sapiens; identical to SEQ ID NO: 339071

SEQ ID NO: 469432 - DNA, 1000 bp, Homo Sapiens; identical to SEQ ID NO: 339072

SEQ ID NO: 469433 - DNA, 1000 bp, Homo Sapiens; identical to SEQ ID NO: 339073

SEQ ID NO: 469434 - DNA, 1000 bp, Homo Sapiens; identical to SEQ ID NO: 158922

SEQ ID NO: 469435 - DNA, 1000 bp, Homo Sapiens; identical to SEQ ID NO: 339076

SEQ ID NO: 469436 - DNA, 1000 bp, Homo Sapiens; identical to SEQ ID NO: 158923

SEQ ID NO: 469437 - DNA, 1000 bp, Homo Sapiens
ttttttttttttggggtatcatctttctgaaggaataggtacattattaaacaaaactggcatttgccacagaagtttgtgctcataggcacatctgcaaaatttcacttcaattggtgtaggactaatatcggtgagaaaatgagaccctacaatcagggtagggtactgctttacaaccacagctactcttctcaaaatagtcctttttctttcttgaggttttgttgcttccatcgaggcagagcagagaaggcagctggagtcatcccaaaggcctgagtgaaatcttcaatggacaggtgttcctccttcctgctggggtccacaccctcggggagctcctctacaggcttgttcactagctgctccagggggaagatgggcagaggcccagaactgaggttgctgttagcattgaacacgtccactttggggcttgtgacctcagcagtgatctggctccagtccctaaggttgccagactccgccttcaggtcctcataggatttggtgttactccacttgaagggatcccaagccaggaaccagcctgtgaaggtggggggctcgtgtccctgcttcaccacaatgatgggggtctcagggtcacgcccgctgggatgggtcttgaggtattcctgtgcagtggttgctgcggccttcttctcctcctcgttggcatgtttcccaatccagaagaagacctggtcccagacatctagtaggaacacatcatcctcttccaagtcatcctgattgaagtcagggatctctgtggccaggaagcgcccagtcttgttggaacactcaaagagccggggggtgatgaccaggttttcttcctgtagtctcttggtgttggcatagggggccttcccacccagggccatccagaagttggctggctcctgcccttccaccaccacttgcttctccgtccgggagatggtgtcagcaaccatcttggccatctcccgctcgtccccgctacaaccct

SEQ ID NO: 469438 - DNA, 1000 bp, Homo Sapiens; identical to SEQ ID NO: 158924

SEQ ID NO: 469439 - DNA, 1000 bp, Homo Sapiens; identical to SEQ ID NO: 246476

SEQ ID NO: 469440 - DNA, 1000 bp, Homo Sapiens; identical to SEQ ID NO: 339078

SEQ ID NO: 469441 - DNA, 1000 bp, Homo Sapiens
gaattcggtttttttttttttttttctaacatgctatctttattgaaatattttaaacatttattgcaaaaacaataaatgctttttatttttcaaacataaacaatacttaagtataaaagtaaaaactgaacattgcatataaccctggtccatcccatttcctgcagaaaaccactattaacagttttatgcttatacttctagatgtagttttatttcctgaaactttctcttttactaaatactgtatcttagagatcttttgatatcagtacatacagagataccttattgtttcacagtatttcatagacagtgtacctacttacttccactgataaacatttagattgtctcaacgttcacacataaaaacaaaactccagcgattattctttgcacgcacatctctgcataatataaaaacatttcttgaggattctagaattgaattaacatgtcaaaggatctacatgttttatattttaatacattgtattcatcaaaacatttttttctgagtttctcattagattagataagctgtgttttgttttgtttgtcttagctcttgtttaacttctagaaaactagtgacatgctcttggagaagcccctcttacagaaggccaaagaagctgagaaagcacagaggaaataatcaaggctcacctgggaaagcaacacagcttcaccatcattctctcgtccctttcagccatctgcaaaatgaagaactgaattcaaattttgataggcatttctttcagagaagtctgacagaagctatgcatgaatttctttttttctcttttacagttcccttcttacttaaaaaaaaaaaaatcctgaagtggcttagtgatataaactatggagagaggtgtgggtggttcttttaagtgcacaataaccaacaggtctccctcctggaaaaattctcagatgctgaggaagatatttcctgtggccaaaagattttcttcactagtttttg

SEQ ID NO: 469442 - DNA, 1000 bp, Homo Sapiens; identical to SEQ ID NO: 339080

SEQ ID NO: 469443 - DNA, 1000 bp, Homo Sapiens
ttttttttttttttttttagaaagtatgcagcatttattacaaagccaagagatacagatgtcccagggcaaaggagggtacagtcacaggacctcagacacaggacaaggtgcaaacacagacaagcccatcagggggctcccaaccccacacacctacgctatgatggaatctcgagtctcgactcccgactcctctcagatctatgcacacttgaggaaatctcggtgggcagcgacctgccagggtctgtccctaaggaggtggtccgctgacctctcaaggggtgggggtggggtcagagcttacaggtttctgtcttcttgtgcttttagatgcagttgctctgtcctgaccaggtgaccgggcctcagctgggggtggaggggcaattggaaggctgtttgcctctggcaaagtctgggatctgtgcttgtgtgaggttaacccacccccacttccactctaggccccaggtgagactccaccaccagtcctgctagtgagggttccccggtgagggtaaggttggtgggggtgcagcgcttcacaatgctaaagccttagccctcctccaagagctgagacctctcagggcctgaatcttcttttccacaagataaatgatgcaaaggccacacacacaggaaaaaaaaaaaaagaggcagaactatctattctttgcacaaagtttccactgcaagaggaggaggtgatgcaggtgccacctccaccctgcacttgctcctcagaaccagggataaactgcatttgtaaaaggcactgttcttagcaatttctggacattcaacaacgtggggggcggccactggtcagaggcaggacagcagccaagatggggagagaaacggggagagaaagaaacgattctaactgactcctatatgcagccagttggaatcatgcctaaagctttgggtctgaaggggcccccaacacaccacctgccttgggaaacagcgaggatggtgcagagct

SEQ ID NO: 469444 - DNA, 1000 bp, Homo Sapiens; identical to SEQ ID NO: 339081

SEQ ID NO: 469445 - DNA, 1000 bp, Homo Sapiens; identical to SEQ ID NO: 158926

SEQ ID NO: 469446 - DNA, 1000 bp, Homo Sapiens; identical to SEQ ID NO: 339083

SEQ ID NO: 469447 - DNA, 1000 bp, Homo Sapiens
ttttttttttttttttttcacatacacacattttatttttcataaaataaaggataatgtgcccacccataccctgtaagtttcatagcctagaagtcagtttcatagcctagaagtcttcctagtagtcagattttctgtcccccagagggagaactcccgcacccccagttcccagggggcctggtgtttgaggagctgcatcaagctgcatcttcttacaagcccaggggagaaaggatgtgtttaagggtagaagttgttcattttgttttcctttgcaagattttgatagaatctagtataaaggctgtctggcttagctcagaatgcaagaaaaggtgttattctttcgcatttgggcacttcacagagggcatgggcactcccccatctaaacaggcttgaaaaaggacacagacccaagagaggcccttgcggaggcccagcaaagagtggttcaggatgcacagacaggctctctggggctgtgggccaggagtgggaaagccaccttagtcctgctggagcagatttgggaagggtcatgggaacaagtttctctgctctggggtctgggccacagtctaccatgtcccatctctctggttctgcccagtgttccttccttcctgtcatccccagcacctcatcagtgctccccgctcctgaacaccatggtcaatcatcctggggcttctcacatctgtgaaagaacaggtctctcgaccacctaggggtagacttccaggatggtgcctgcttaactttcctacaatccagggtcatcggggaaatgagccaggtggggagggtggagtctcacttgcagccagaaaccctgggatgtagcctatctgtgacaagggcagatcggcaaccatctgcaaccagaaacaggccgggtgttctatccactgcccccagatgctgcctcccaggttccaagagccaccttgagtcccagctcagctgccacccagacaccgagcattcgacc

SEQ ID NO: 469448 - DNA, 1000 bp, Homo Sapiens; identical to SEQ ID NO: 339084

SEQ ID NO: 469449 - DNA, 1000 bp, Homo Sapiens
ttttttttttgatattttagcatttattataattgcgcacattagtgtggattaagtatgattagaaacactaagcaattgaaaagaagcaaaaaggtaatgcatccctcttcctcagatctgcaaaattctgtgcctttttagacatgagagaggctgttttggatctaagtcaataatggctcttgcaagatttctttcaatgtcttgcatgttggttctaaaactcccttaaaggcagactataccttgaacgggggaagccagcctatcttgggcctctttaccttgcctttcatccactggtcctgcactgaggactcagggggataggcaccttctcaccaacggggggtgacttttatttccttcactcattcattgagtgcctgtgtgttagtgtccaccacgtgccaagtctgatgttggggactacagctgaggaagagcagttggtatttagtgtgggtacatgccctccagaggaaatccactacaaataaatggaatgttccctctctgatcatttggcaggaagaacaagcccacaagccaatgtgcatagggctcagaaactggagaaagacgtagacattttataattaaatcaagagcagaggccctcattttgtatcagaaatactctaaggttgttcttcctttcaaggaacttacagagtgatgctgggcccacagatggcagagtccagctgaacctgagcagaggatcggctgactgcatggacaggcttacatctgcccagccatccaacgagtttccatgtcccaagtacctggggccccagcagttgccactagcttaaggcagagtctagacaggaaaatgggtcactgaaagctctctgctcagatcagctagccccctggagcttttcctggattcacaagctcctctttggtaatgtctgtgagtcaaatctgttctcagctgaaagcatctcagtttggaggcattttcatgggcggagaggagggaaag

SEQ ID NO: 469450 - DNA, 1000 bp, Homo Sapiens; identical to SEQ ID NO: 339085

SEQ ID NO: 469451 - DNA, 1000 bp, Homo Sapiens; identical to SEQ ID NO: 339086

SEQ ID NO: 469452 - DNA, 1000 bp, Homo Sapiens
tcatttgtagagtttctctccagcatgaattttcttatgtgtaggagggttgggaactccagtatgaattttcttatgtttactgaagactgataaccagctgaaggctttgccacattcttcacatttgtagggtttctctccagtatgaattaccttatgtttagtgaggattgagaacgtactaaaggctttgccacattcttcacatttgtagggtttctctccagtatgaattttcttgtgatatctaagggttgagggccacttataggctttgccacattcttcacatttgtagagtttctctccagtatgaattaccttatgttttgcaaggattgagaacataacaaagcctttgccacattcttcacatttgtagggtttctctacagtatgaattttcttatgataactaagggttgaggaccacttataggctttgccacattcttcacatttgtagggtttctctccagtatgaattaccttatgtttagtaaggattgagaacgtactaaagcttttgccacattcttcacatttgtagggtttctctccagtatgaattctcttatgttccataaggtttgaggaccagttgaaagctttgccacattcttcacatttgtagggttcctctccagcatgagttgccttatgttcagtaagtcttgagggccagctgaaggctttgccacattcttcacatttgtagggtttttctccagcatgagttgccttatgttcagtaaggcttgagggccagctgaaggctttgtcacattcttcacatttgtagggtgtctctccagtgtgaattttcttatgttccataaggtttgatgaccagttgaaagctttgccacattcttcacatttgtagggtttctctccagtatgaattaccttatgtttagtaaggattgagaatgtattataggctttgccacatgcttcacatttgtagaatttctctccagcatgagttttctta

SEQ ID NO: 469453 - DNA, 1000 bp, Homo Sapiens
tttttttttttatctttatgtttataaatttatttaatttccaagacttatgtgttcatctcaatccttgacatactcatctgccagacacaaaaaatagtggtctatttaagaggccttaatgaatgacaacatttttgaaatatgctatatgagtacaaatatttccagagcaaagagggaaaactgttgattgggtagacaatcaaattccaagcatttatctgatttacagaagtacatctactttttgtttttcactaaatgaatacaaccacttttaatatatatgtgggtgtggctgtgtgcgtatttcaaaacacacacgcacacacaataaagaaacatttcatagtggcaaaattttagtgcactgccaaagtgctacaataactgtcatccacagacatccacatgcaaacactactggactagtacactagagcaaataagagagtatttagcaaaactctctggcaaaaacttttaaaacggaagtaatgaaacagaaatccacttctaatttgaaggctttagaaaataatcttcattttaatcacatatacacatagtattatctaagctcagaaaataacttcttcctgtatgcacagaacttcaatgtacactcagtaaatgttagcatttgaagaaaatgtgccatgaggagaatgtctgagggataatggcaggaaaaagatatatccattataaaagaggacagaaaggcatagcaaggatggggatgtgcaggaaagggaggggagagggaagaaagtaaactgaccataaaagaaaccaattcaaatggaaaacagcgactaaccttgacacaggaatgaatcatgaaggctggatgggtagactgggaggggtgaaaagaatgtatattctttgttttaagctatatataaaattgtcagatttagccaaagcctagttggaatgggagttggctaaattacatgaaatgtaacacagacattgccaaaactacttc

SEQ ID NO: 469454 - DNA, 1000 bp, Homo Sapiens; identical to SEQ ID NO: 158927

SEQ ID NO: 469455 - DNA, 1000 bp, Homo Sapiens; identical to SEQ ID NO: 158928

SEQ ID NO: 469456 - DNA, 1000 bp, Homo Sapiens; identical to SEQ ID NO: 339092

SEQ ID NO: 469457 - DNA, 1000 bp, Homo Sapiens
ttttttttttttttgagacagagtctcaatccgttgcccaggctggagtgcagtggcgtgatcttggctcactgcaagctccacctcccgggttcacgccattttcctgcctcagcctcccaagtagctgggaatacaggtgcccgccaccatgcctggctaattttttgtatttttagtagagatgggtctcaccatgttcgccaggatggtctcgatctcctgacctcgtgatccacccgcctcggcctcccaaagtgctgggattacaggcgtgagccaccgtgcccggccggtgacttctctttaaggatgaggcttatttcgcagaagagggcaagttccccacaaagggagctcttatgggaaagctaagggtataaagtctaaactaaacatatctttgataagtgttgtgcatcttagaaaagagaggttctggaatggtgactacatacacgcttctttgtgtttggggagagagtcacagaacagaccaaagggaaggctaagtggtctcttatcctggggatctggacggcgtgctgaagcctgaatttacactgatgtgttttagacagggaaacttaggagacatcgtaggcctgatactttgttatgattgatgcccttctgtttctctcctgggacaggtagtagatgcggttggcctctgggtaggtgactttgctgagcgggagcttgtagatggcggggttattggtcgtcaggagcaggaaggtgagagctgagagacagaagggccaagtgcagggcggcaatccaaacacagataacatgttagccagggcagcacccaggtaggcagcaaacagtgcgcaggcgatggcgaggaggtgcgtctgccaggtgatgacgtagaacatgcctcctatcgctatgcatgcgagggtgctgttgaagccacacaggccgaagtagatggagtcaaagggcgtcgcaatagtgagtgctgctagcatccccatggtggatccaa

SEQ ID NO: 469458 - DNA, 1000 bp, Homo Sapiens
tttttttttttttttttttttttttttttgcggacatcagtgcactcagggctgggggaggctgtttaatgagcggggggcagtacaaaagagcagccttctctcagtgggaaaaggcaagagcacctggcgctgggcttgctgggggagggagcagcttctcagttggttgggggagggggaggtatgttccctgggccttcggagggaagtgggggcctcagcattgggggcatgggagttggggggtgcaccccaggatttgaggggtgaactcccggaggctgagggtggaccccaggagccgacggatggaccccgggaggttgggggtggacccccggggcctgagggtgcatccctggggctggtgggtgcacccctggggcctgagggtgaacggcgggggctgctgggtgcacccccggggcctgggggtgaacccccgctgatgggggaggatggacccctggggctggtgggtgaaccccaggggctggtgggtggactccgggggctggtgggtgaaccccgggggctggagggtggactccaggagctggggggtggaccccagaggttggtgggtggaccccaggggctgggggatggacgccaggagctggggggtggacgccaggagctgggggatggaccccagatgcagggggatgcaccactggggccggggggtggacccctggagctggcgggggtagctggggtggtcccgggggccctgagggcgcaggccctgtggggggcatgggtggcagaggcaggcctcctggcgggggcggtggcaaagactcaggcagcggtggccgagggggcagaccgttcatcagcgggggtggaggccgcttcaccccaggggggccagcagggaggctgggtggagccgggggcttctccatcttaaagtggaactggaggaagaactgcttggtctcccggttccagtgtgtccagaacttgccctccgccttgtcgatctctc

SEQ ID NO: 469459 - DNA, 1000 bp, Homo Sapiens; identical to SEQ ID NO: 339093

SEQ ID NO: 469460 - DNA, 1000 bp, Homo Sapiens; identical to SEQ ID NO: 339095

SEQ ID NO: 469461 - DNA, 1000 bp, Homo Sapiens; identical to SEQ ID NO: 339096

SEQ ID NO: 469462 - DNA, 1000 bp, Homo Sapiens; identical to SEQ ID NO: 158930

SEQ ID NO: 469463 - DNA, 1000 bp, Homo Sapiens; identical to SEQ ID NO: 339099

SEQ ID NO: 469464 - DNA, 1000 bp, Homo Sapiens; identical to SEQ ID NO: 339100

SEQ ID NO: 469465 - DNA, 1000 bp, Homo Sapiens; identical to SEQ ID NO: 339101

SEQ ID NO: 469466 - DNA, 1000 bp, Homo Sapiens; identical to SEQ ID NO: 339102

SEQ ID NO: 469467 - DNA, 1000 bp, Homo Sapiens; identical to SEQ ID NO: 339103

SEQ ID NO: 469468 - DNA, 1000 bp, Homo Sapiens
ttttttttttttttttttttgttttagaggcattttatttagacaactaaaaacaattagatgttcagaggcagtgtacaatgaacgagaaatcaaaccagttactttatcatgtattccctcttctttacaactgaagcaaaaaaagaaaaggcattctgctttaagatcagaaaaaaatcagccaatatagttttcttctccatattaacataaacagctacaagaaccctaattgtaataatagaaattggatgttggcttgtatatattcattaaaaagataacaggccactgtactataagaggataactccacctcccttcatctgacacttgagttttcacttacaggtaacaccaagttagttagttgttccagcactggagctaattcattttcctcattatttactgctgtttctgccttaagcagacagtaactctggaaggctgatgcttttctctgcttgcttgttttagtcagttgtatactaactgcaacatatgattgacgctcaggccttaacatcaggagctgaaggaaagatgcactctgaattctctgaagcaatttcttctagctcctcttctgttgtctctggaaaaccaatctttggctttgccagctcaccactatcttcttcaggaagcacacatttccaaaggccatacgtttttcctaccacagtttgccatagtctcaatgttccatcttctgaaccactggcatagagttctccatcaggactaaatctcacacagtgaataggaccaaagtgtcccttgtaggattctaattcttctccactattataatcatacttataaagtttaaaatcttcaccgcctgcaacaagaaattctttctcaggatgaagagatgcagaattgatggttgcaggagcttcaaaggatttaattgggtccaaacttactgcactatgaaaagcaatagatcgtccataagttataaccaaaatctctccctcaggaatat

SEQ ID NO: 469469 - DNA, 1000 bp, Homo Sapiens
gaattccggggggcaggagctggggccaggtgaggagaggagggctgtcaccatggcaggaggctgagcaggaggctgggcagaagggtggccgccaggcagtggggctccaggaaagccagcttggcccctgaggtcagccggtcaccatagcggtccagcagcatcaggaccacaccttcgtcccagccaaatccctcctgaacttcatattctcctcccccaccgggctgtccaccgttgctgacgtcatacttctcatacatggctgacttctgcgagtagacatcaaaattggttcggatccaattctgagccagctggaaagccacttcctgggcccgacgtaaaggtgccttggccaggcctctgatgaccaagtcctgcaggggggcccaggcattggggaaatcccactgctggcctgtcttctggagagaggtcgggatcccatactggtaagtcaggatccggttgtcctccaggtatttcagagccttgtccgccacgccagggtcagagaaacacccggcccagagtggagtgaggttggatgggtaaaactcccggtttttcttcttcttctcaaggtcgtaatcgaaccaggctccggtctgctcatcccacaggactgtgttcagggcggccaagcgctgcgaccgcaggattctgtacttcgtggcctgggagtcgttccccagcctggaatagaagttgctcatcagctcctctgcttggcataggaaggcattcaggtcaacaggcaccagtttgcttgttcggatgccgctaagcgagttggggtttgggcctccaatgagccagcgtgaagagaagtcccagccagactcagccccagccttgagctcagcccacagagcctcccggtctccttctggcaaggtgtcagccaactccacatctttgctgtaggactcaggcctgggtcccccataagggacataatagcgattcaggaggtagttctttccctccaagc

SEQ ID NO: 469470 - DNA, 1000 bp, Homo Sapiens; identical to SEQ ID NO: 158932

SEQ ID NO: 469471 - DNA, 1000 bp, Homo Sapiens; identical to SEQ ID NO: 339106

SEQ ID NO: 469472 - DNA, 1000 bp, Homo Sapiens; identical to SEQ ID NO: 339107

SEQ ID NO: 469473 - DNA, 1000 bp, Homo Sapiens; identical to SEQ ID NO: 339108

SEQ ID NO: 469474 - DNA, 1000 bp, Homo Sapiens; identical to SEQ ID NO: 158935

SEQ ID NO: 469475 - DNA, 1000 bp, Homo Sapiens; identical to SEQ ID NO: 158936

SEQ ID NO: 469476 - DNA, 1000 bp, Homo Sapiens
tttttttttttttttttttttttttttttttttttttttttgaaaactaaagcagcacctttattttatacatacaaacagtataaaatgtttattaggtaagagctgtgttttgtttacaatatattatattgcttcaagccaatgcaaaaagttcatacattatattccctatttcattgtgtttagaatatattatattgtttaaatgccactaccacagtgtaattttttttttttttaatactgaatctctggaataatggtaaggtcaaaatatattgtattgagagtttaaaaattaagagcaatttttaaaaatgtaacaaacatctaaatatctgacaataaaatctgaaatgctgtaacttcaacattaactgcaccatccaaattcttgtgacttacgcatttttgcccaatttaacctttctgatgttcccctgcccccagacaccataaatgcattgtaattttgaaaatatctgccaactacacactgaaaattttaacctgatcaattgacataatataaaatctgtcccaaagcactgaaacaagaaaatctataccatcatgctacagacgtacttagaaaacttaaaaggaagagtaaatatcagctcagtgatttataatgaagctaataaaattcaggccagtattcttaagtgtaatgaacattatttgaacattcaacacatgaaaggttaacaaaggctatgaacttggtgtaacttaaaacgtttcagatgtcggagttcaccagatgtaattggattcaggtggatcccgccgctcctcggcctttttaagtgaaggcgtgtgctgcctgagctgggcgcctgctggcctcagggcatgtatgaggctggcttcgtaccttttattgcagtgtcttccatgccaaccttcttgacattggcatttgttgggttcatggcaggttccatgtgcaccacagccaggctcgcagacaggctttgaacagaggtctccc

SEQ ID NO: 469477 - DNA, 1000 bp, Homo Sapiens; identical to SEQ ID NO: 158938

SEQ ID NO: 469478 - DNA, 1000 bp, Homo Sapiens
tttttttttttttttttgaccatgatattctttttattgaaaagtaatataaaatggctttagacataaaagatagtattttacattatttcttctgttatatttttacgctttgtgccagaatttacttcttgcaactattcttgctttatctggaacagtttactccgttattgaatatctattagtgtttaatatagaagagcttaataaaccgctaatccgaaaataatggtattcccttgcttttcagacctttttgctgaatatgcttatttatgtccaatgtggaaatctgatcctgttctcttccactctgccagcagttccttttgtactgcttctggtagttcatagaaaacttgaggatcaatgtcagaagggaaagtaattttctcatcaacagaatctggctctctattttctgtaagtccttcatgagagtctgttgctactgtttgcttatggctatctgtagtgtggtttctggagaaaagttgctcactctgcaagtttggaaatgaatgaaaagcagacacagcagggtttgaatttgtaaagtggaatccttgaggttctttaggtccttgacttattcgttcatcttttaatctattatctaaataatatgaataatccttttggctagacatgtaagaagaactactgctattaaagcctgatgttcccggttcacaaggagatacagaggatacctgtttgctactggataaatgatctctaggatttatgggaatatcttgcatttgttttttagaaaagaaagataatactcctctagaggcatgtaatggacaactcacacttcctttcccttgaaatttttccctagattttccagaaaggatttcttcttgaatatctactggaagctgcttgaagacttcttggtcaacaccttcaggaagtgaacagagtgggaattcattaatgtctttttctttagaaaaatttgtggtatctagtggagactccctag

SEQ ID NO: 469479 - DNA, 1000 bp, Homo Sapiens; identical to SEQ ID NO: 339115

SEQ ID NO: 469480 - DNA, 1000 bp, Homo Sapiens; identical to SEQ ID NO: 158939

SEQ ID NO: 469481 - DNA, 1000 bp, Homo Sapiens
catttcctacaacccgtgcaagcaagctaaaccaaacgatggaatccaactgaatgttcttggcagatggaggctctgaggactcacactgaggatgatggagaggacattacaatccagtccctttttggtaggttttgattgttttgtttggctgaagtcagaacccatgatcttaaggaattttgaatggctctaattgagcgtggatttggtcatgagacaattatcctgataaaacaattttttaaggcactctgtttgagggtttgggaaaaaagaaatggaattatccagattgtttatctgcatcacccaaactcactattgatcattctcttggcattgcttatggagccaatgtcttcccaaggtcatacctatgctcaggtgcctatgcaatacttgcttttttctttatcttctggtagaatttattcttttttgtactgttcatattcatcccaggaaaatttggaggaacagctgctctccactggcctgctcctgcaagaatgccctggagcttctgaagaaggatctatatttaccttatagggccttaagtcctgggatggaactatatactttgggaaccaactttcttcacaagaagaactgggcatgttgcaagcttcctcatttctcttgctctctggctttttgtccaagctcagaaacataacctcagactggctgcattcaaaaggagttttctgagtcattctgtctatcctcaggccttcatcagaaggtagtaaattgttattctggctttcatcatcttccactggaatacttggtacattctccaggaatagaggagaaggacacctgaaggactttagtgatgtgggaggatcttcagcaaaatacaagctggcttgagtactttcaagagtatttaaaacttcatccattgatggtcttaactttgcccgcgttgcagcacaccggcctgccaaacagaagagcttggcagagaaattccgagggcagg

SEQ ID NO: 469482 - DNA, 1000 bp, Homo Sapiens; identical to SEQ ID NO: 339117

SEQ ID NO: 469483 - DNA, 1000 bp, Homo Sapiens
ttttttttttttttttttataaaaactcaacacacattggattttaatgagaaaataactgtatacttgcattgaatgcctcacaatcactctaaaaccaaagcaggataataacatttaagtggttaacatacacaggaaaaccagatacagagtataatttccaaacacagtattgctgcttttttcccctcctcccccaaaaaaagaaaaacaaagaaaaaataatttgggtaaagagcaacacaaaatcaaaattggcagctcactgaatgcttaaaattcaggaaatttgttctttaactaaaatggaatatattcaccatctctaacacttaggctacttttttttcaatacatagtttaattaaatccattctttagttgggaaaaaaaaggtttaattatttgtcttcagagacaagaatcaacactgttttagtgttccttgttacactttatatatatatatgtgtgtgtgtatatatatgtggacattgatctatatacggcttatatgtcattgtctagggtgagcagcatgcatgggtatgaagaggcaagtaaactgcattgtgtcatccaagtaaaacacagcacggcctcctgccactgacagaccctgtttccataatttctggatgagaaagccaagtcatgtcagtagttaatcagctctggaggaaagtgaacacctataaacacggcagaatgcaatacttccagaaaggcttttaacacctacagaatctaaacattttgtaagaggtggggttaacaagcttgtgtgctatttgggggtggggctgagcatcagaggcaaagtttttcgtaagcctctttctctcgatggattaggcaggaatgactttcctccaggggacggtcccatcttcagaaagttaaaagggtccatttgggatcccagagcctagcacggtgctatgtacaaagcggtggcccaaggtttcttgaatgaataaaaaactcaagagcacag

SEQ ID NO: 469484 - DNA, 1000 bp, Homo Sapiens
ttttgatgacccacagctatttaatacacagcaaaaatgtggacagctttcacagcctcaaaagacattcaaaagataaacaacaaacatgtaaatatatttaaatttgtttttactaaaaacaaatatttttactggaagctaacagatcaaatcaaatacctttaggaaaatctaaagcaatgtttaaatattccttcctgcctaaaacctaagaggattttctgatctaccatgctacaaatttctacaagaatgcacctctatagaaggaaatgcagcctaagccctttgtaaagaactccacagcaataatattactaatcaaatctattgcttttattgtttttaagtaagtggtggtatatgtcatctttttaaatgtttcttttgggaagatcttatagaaaatggcaccctgaaactttcagctctatgtcccaaaaattatctttcaacaatctgatgaagtttcttaaagaaactcttaaaaatgaagataatatacctggcctaaatcaaaacaatctgaaaaatggatgtgtcccagtggaaagactcaagtcttttcaagtttatcagaaatgccactatacaccactgtactataagtcgaggaggatggatatccaaaggtatcatttgttgacagttcctgatggtctcaggtatatcctataatcactggttactatgcatcatttcttgtagataaatggtattcatgtgataagctgccatccaacttggatgtctctgagcattccaataatatgaatgagaagcggcagcataatattcttgccatgccctgtagtaagctctccagtactcctcataatcctgataggtatcagaaaaactcagacgtatttccctatgacagtcataccaatcatcttcctgggcttcagtctgcaatctgaaggaagaccgcctgggtaggtttctccggctctgcttagctctctggctagccccctctttaagtcttgtcttc

SEQ ID NO: 469485 - DNA, 1000 bp, Homo Sapiens; identical to SEQ ID NO: 246477

SEQ ID NO: 469486 - DNA, 1000 bp, Homo Sapiens; identical to SEQ ID NO: 158940

SEQ ID NO: 469487 - DNA, 1000 bp, Homo Sapiens; identical to SEQ ID NO: 339120

SEQ ID NO: 469488 - DNA, 1000 bp, Homo Sapiens; identical to SEQ ID NO: 339121

SEQ ID NO: 469489 - DNA, 1000 bp, Homo Sapiens; identical to SEQ ID NO: 339122

SEQ ID NO: 469490 - DNA, 1000 bp, Homo Sapiens; identical to SEQ ID NO: 339123

SEQ ID NO: 469491 - DNA, 1000 bp, Homo Sapiens
ttttttttttttttttttaggagagaagaatatttattatacaaatataaaaatctatacattcttagctgatgatatatacttaatcaaaaagtcttttaatttggatatatgcatcatttccttcattgtggtgtctctgcttctcagatgtattaatccattctccaaagtagtttcagtaaccaaaactgtgaagagaatactcatttcatcatacttcgaataaagttgttccaatgaggactgcatagtttccaaataaccaggccacacagaaatcccattttctagtaactcattaaatagcccttgacaaacctgtcttagttccaatgtggggcctcttcctacatccaaagcaaccttaataggggctaaacaagggtgaagtttaagtacctttctatgaagatttttctttcttgtaaaggagttctctgtcagctggaaagaatcatagaggtaggccagcatgcctcggtctaggtccccatttacagagagaacacaaggaaccacattttttcgtccatctcggccatgtaatttagacacattgccaggatacatgtgtaaaagttcgtgatctcctaggttccacagggtttctattaactcctttccccagggaaaattgtagtaaagtttgtttcctttccggccttcttcatcctgacagtcactgctgctgaagttagatggactcatggcaaactttctccaccactggagtcgatgacgtaaccagaaatcaagccactggtttgaagttctcggaggagtaaaccatactaacgaagcttcagtcttctcaccaatacttttaacaccatttcgtatctgcttagtgtcaaaaacaggatgaaaacacactccaatctgagcaaggccataaggtagcctcttgtttaccagatccaggcaattaacatagtgttccaaggcaccgtgaagaaggttctcccgtagtttcccagaagtttttaatacgttctca

SEQ ID NO: 469492 - DNA, 1000 bp, Homo Sapiens; identical to SEQ ID NO: 339124

SEQ ID NO: 469493 - DNA, 1000 bp, Homo Sapiens; identical to SEQ ID NO: 158942

SEQ ID NO: 469494 - DNA, 1000 bp, Homo Sapiens
ttttttttttttttttttttttttttttttttttttttttttttttttttttttttttttttttttttttttttttttttaacattccaagatatttataagcaagagccacaggagcatgaattcctcagaatatgtagaattatctagattttagcctatctgacaagtttctctccctattaccataacaaaagtcttttaaaccactgtataaactgagatatttaagttaatcacctgccttgcaaagaaccttgactaatgagtaaataaagttcagacagttgtaaagggaagacgggatagctctttcactgtagaaaacattatcattatatactatgtaacagcgtgcaaataatacaaaataataatataaactataggctattagattactagtcctttgaaaaatatttctggaaggccgggcattttctttaaaatgttctgcatatatttcctatatgatcagacctttaagcaaaatatctgatcttcggaaatgcaaagggatttctgggtataggaaaagtcttgttttcttataattacaaaatatattttctacatcataaactgatagtaagtaagcatatcatgtccttgtaacaactaaacactggggcaaatatactgactgataagcccttatgaaagaatacacattcatgttataaaataaaatacatctaaaaccatggccaatattcagccaggaagtaccagtctgggcccataggctgtttctgcaaggcctgagttctggtcagtgtctgtgccttaccacatgttaaaaattttgattataatccctatgtatagtgctatagaaccactaatggataaacataaaaagatagctcaaaaatgtcagacataaaaagatattacaagctgggccaggcggccagcacctgtagccccagctactctagaggctaaggcaggaggactgcttgagcctaggagttcaaggctgcagtgagctatcatt

SEQ ID NO: 469495 - DNA, 1000 bp, Homo Sapiens
gaattcccttagagtgctcctgctccctgctcctgtgagctctgaaagtcttctctctgtgtgttctctgcagagcccagggaagtgaggcatcctcagaaagtgcacatggggtacccacctcaagacccattcaaaactgcccagctcttgtccccacagagaataatgtggacttcactaaggacatggatcactgagatggatacatatactccctcaataaagaggacactggattttatgtagatttccctatcattcaaaagcatctggcccatattggaggaatcaactcacactgagttgcaaggagatcatacaatcacatggccacagcattcccacactctggtgggaatatggaagccccccgttgcttccaagaatttacaatccttgctaggaatccacctttggaaaaatgctcactttattgtttctgctcatcttccgctccaccctgcctaccttgggcacctttgtctggatcagctcttctggggtgttgcccaaggggggaagcagccgcttcttgctgtttcgggtctctgagagccactgaggaggcaactcaaaaggcccaaagccaaactgcagggaatacttatcagggaatgtttcaggttccacaggggctgccggtgccacctgggatacagagtccactgtgctcaggggtggggcagagggcgcaaactgtggcccctgctctccctccaggcaggtgctaaatatctccttggcctggaagtcagctgagccaatgtacttggcctcactctcttcctcatcctctgtgggcttaaagatctgctgctgcccaatgtggaacatctccaggagctggctacccgagcgtatgctgggttccaggctggcctcagccatgccactccctgtactgaccacattacggcgactgtaccggtggtgtagttgcaccagggtccctatcaagcacttgcggacagatttgttcacagtaagaaagagaaca

SEQ ID NO: 469496 - DNA, 1000 bp, Homo Sapiens
ttttttttttttttttttttttttttttttttttttttttttttttttttttttttttttttttttttttttttttttttttttttttttttttttttttttttttttttttttgggatttcactttattttgttccctttcccgtctgttttggcgtagaaaaaatatcaccgagaggaagcagcaggagagggcaggtggagctcgactgcctggactggaggggggcgggcaggggcaggggccgggggcagggccagggcctcagcccaggggttctgcttccggtaccctaatagggtttggaggaaaaggggacaggcatatggcaggcagaatggtgggaggacaggccgaggtttttaggcctttacagtcttaggcggggtatggtgaagcaggacaagcgctgggggatgggaaagtcagggtggggtgagggtgccaggccaggagttattaaagctgcggggaaagggagtgcgcagcctagcgccaagggtgaaaaggggacccactgtggacccaggggacattgggaccgcctccaagccccgcctattctggggctgcactcttatccctttcactttggggtgtactggagggggctaccccagccttgcgggcactccgcataaggaaaagggcacccacgctagctgagggtcccgagaagccattcccctccgcccccagagtggaaggagtgggcgacatggccacaggagcggcagaacactgggaagggggtcccacctagtgaggctgggatttggcgggaggctcaggactggctggggaggggcgctatccgaagtaggggtgctcactctggaagttatagtctgggcacaccttctgcaccagtttgtagtcaaagctgaggaaagagacgaagatacagatgactttgaagggcttggcacagagccaggcggcctggctctgcgtgtgctcggtgaaacacacctgcgacgggtcgtacaggcacggtcg

SEQ ID NO: 469497 - DNA, 1000 bp, Homo Sapiens
acaccacaaacatcaatagctgaagaaccctggtgtcaaacaaaatgaatgaacacccaggagctcacacctactggggtttctcagggtttctcttgagcaggtgcagagagggctcgcagggcaggttgaagctcttgtgactgaccagtcctcctgccccacactcaaccagcttcattccctgttgccctcctcctccctttctgcccaacttctgcactccccagcccactccatttttgacttaatgacgttgcagttcccatcagccccatatttggctctctgcaaagagaaacaaaaataattcatcgtgccaaaatttgaaatttgggagctgcagctcatctgattacaaatgagtacctttgtgcttaaattgccaccacaaagtgcagactatgaccaacatgccagggaacagagcaggacagatccaccctgggactggggctcagctgccccttctctgtggccccctgaccccctaaaccgcagactggttttcattgcacacgtagactgtgcttggctggattctccttcggatccgctcaggcactttggggaggatttggaaggtctggggcagcaactctatgcaggcctcgcggaattttttgattctccagcagtagacgatggggttgaagacggacttgaggtaactgagccacaggacgcaggtgctggtggcgtagaaggaggaaccgcagtaaaagcgctggctaaacacagacaggaggctgtagacggagtggggcagccagcagagggagaagcccacgaagaggatcaggatggtggtgaaggccttggtcttgaagctcaagtccacgctgacctgttgctgccgctgcaggcgccgcaggcccgccctggtgagctgccgcaggtccaggctgtccgactggttgtgcacgcgcacggcgttcttgcggaccgtgttgaggatgcacatgtaggcgcacagcatgacgccaaagggcgcgaagaa

SEQ ID NO: 469498 - DNA, 1000 bp, Homo Sapiens; identical to SEQ ID NO: 158944

SEQ ID NO: 469499 - DNA, 1000 bp, Homo Sapiens; identical to SEQ ID NO: 339128

SEQ ID NO: 469500 - DNA, 846 bp, Homo Sapiens; identical to SEQ ID NO: 158945

SEQ ID NO: 469501 - DNA, 1000 bp, Homo Sapiens; identical to SEQ ID NO: 158946

SEQ ID NO: 469502 - DNA, 1000 bp, Homo Sapiens; identical to SEQ ID NO: 158947

SEQ ID NO: 469503 - DNA, 1000 bp, Homo Sapiens
tttttttttttttttttttttttctggttataaaagattttaatatcaaataaaatgtacatgatcaaaaggctttgattgccatgtaaagcatagtttccaggttacatcaagtgattttatcttctcccatttcaaatgaaatgttgaaagcactaacaatctgccatgaatgataagaagcaaaggcagcacatatcatctgcaagtttcttcccaagctataaaatatcatgttcatatttttcctgtttgtgatcccaaaacaggcaatattttcatttcatccactctattcttatgtatttgaaaagcaggtgttatccacctaccacaagagcactgttcaccataccagttgaaggaacccaacttggcactgcattttgggcaaagaagctgtccatccatcactcccaacaaagcagattccatccactgtacaggttcaatgaaataagatgtacattgagcttgcctccctgtggtaagcatggaagatggtgtcattctcttgtgggcaaaggctataggtccacttccttcacggtgatccagaatactagaacttcgaaataatgatcgcctgcactttctacacttgtagagaacctcatctttcaatccttgtgaaacggtagttgggtcaacagcaaagagttcttgaggtaaattctgcaattctggatacttctctgtaaccttttgtaaacgatattgcttataaattgcactagaggtatccacttcatatcccattgcctggtataatttcagttgccactcaaacccctcattcatcttagcctctggtttgagaatctggagcttttcataggctttttcaaagggaagttggtcagtcttcatgagaaaagcagttattatggccacacttcgactgactcctgcatgacagtgcaccaacaccgcacggccctcagcgcgggcctgaccgatgaaggccacgcaccggtccagatggctgagtaggtccgtc

SEQ ID NO: 469504 - DNA, 1000 bp, Homo Sapiens; identical to SEQ ID NO: 158948

SEQ ID NO: 469505 - DNA, 1000 bp, Homo Sapiens; identical to SEQ ID NO: 339137

SEQ ID NO: 469506 - DNA, 1000 bp, Homo Sapiens; identical to SEQ ID NO: 339138

SEQ ID NO: 469507 - DNA, 1000 bp, Homo Sapiens
ctatttttaaattaaattaaattttgttgttgttgttgttgtggagtcccaagggtggagtttagtttctgtgaattttgcttctgattatgggtgggcatctctttaggagttttcttccagagagtctgttaagggctccaaagggactgccgtggccggctcgtgctgttttaagcgtttaattgtgttcttcagggcttgcctcttattgcagaaccaaactctaactacttctcggtcatagttcagcttctcagcaatttcggtcatttcctgcccagaagggtgtgtgttcttctcaaagtgggcattgaggatctcaagggcctggggtgtgaaggaggtgcgccgcttgcgctttttggatggttcactcccgataaactcggtcaggttctgcatacctgctcgatggcgggcctcagcctcagccatccaccgctcaagcaccggcttgatcttctgggcacttttaggggtgatgtccagcttttcaaacctggcaggatacaaaaggccagggttcagtttggctgtcagactgctagctatagtgttctcttgggcttcctgtggtaggaaaaagtggcttctcaggatggtgtgtctgcagatggccgactggctgtacgcggggccctctgtagcactgagagcctgtcccacctgagtctgggtcaggccaagggacaggcgccggattttaaaagctttggcaaattctcggatctcctccagattaaccccatccacctcacccgctgccgtttgaggattgctgactaactggcccacgctcaaagctgaagaagaggaggatgaggaggaagaagaggaagcctgccggacgggactttgagacatggatgcttggctgtgagccaggtgcagaaggttgccttgggaggctgcttgacccactgacgtctgggagggttggtggagctgctggccgggcttgatgggtgacagcgtgatgccctgggtgttgatcacg

SEQ ID NO: 469508 - DNA, 1000 bp, Homo Sapiens; identical to SEQ ID NO: 339141

SEQ ID NO: 469509 - DNA, 1000 bp, Homo Sapiens; identical to SEQ ID NO: 339142

SEQ ID NO: 469510 - DNA, 1000 bp, Homo Sapiens; identical to SEQ ID NO: 158952

SEQ ID NO: 469511 - DNA, 1000 bp, Homo Sapiens; identical to SEQ ID NO: 158953

SEQ ID NO: 469512 - DNA, 1000 bp, Homo Sapiens
ttttttttttttttttttttttttgtttaaataagtttttacttctccctcaataagatatttgaaactgtttttatatttcatattaaaaataaacctaagagtccagagaaacttgccaccagttctggagccatgagcaattctctcctccctctggcctcagtttccttgtctgtgagatggggagaatctttgatcttgatctttagtgggtcccccctccatggcccccaggtgaacagatctccgctttggcactctcttcactcttcttgacagttctccccaactcccaagcaattccagacgttcctatggggctgtgattgacaaagctattggcaggtgccacctacgtgagccacatcttttcctggagccacgcaggaagaagctttgtcctccacacacagagctgggatgaagcaggggcaaaggggaaagaggtgacaggcactggtggctgggagtgcttcctgctgctctccggagcccccagccctgctggccctcggggaagccaatcaagctgatggcaacagagggatggcctgggaaacccagctgcctgtctgttggtcactgttgtcgagggcaggctgagaaggacgtgggccaggtataagggagctgtccctggacttcctggggcccatgagagctccgatggcgaggcaggacaaaagcctatgtcttccttatcacactgtaatctgaatctggttcctcctcccgaggcctctgagcagctatcctgttggtgttagaatcaaacaccaccgaggcatagtgaagttcttccctgggggaggccacagtgctgtattccacctccacctcccttggtggtgctggcttttcctgcagaggccacatcagcagctccagatttgcgtagtgcagctcactctgcgtggcagcctgcttggggttctgggacagctctgaatggtcaccagctttgatccatttctgaaacatcctccaggctagcagg

SEQ ID NO: 469513 - DNA, 906 bp, Homo Sapiens; identical to SEQ ID NO: 158954

SEQ ID NO: 469514 - DNA, 1000 bp, Homo Sapiens; identical to SEQ ID NO: 339144

SEQ ID NO: 469515 - DNA, 1000 bp, Homo Sapiens; identical to SEQ ID NO: 339145

SEQ ID NO: 469516 - DNA, 1000 bp, Homo Sapiens
tttttttttttttttttttgctgttatgattagatatttattgagcaccaggagagagtcagaacattagacttatagtggaggagcagaactgaaccctggcctgtgaaataacaatttcaattaaaagctgtctggccctgaagaaagagaaatgatcctggatatagctggtcctctgagctggcagagctgagcctccctcgggtcttctggtggcaagatgccaaagttgaatagtgtctgtaggcatgatgaccaagtcctagtgctatgggcatcttccctctggtatttagagaggagtaccagaagcccccggcagagatactagaagggcccagagccaaatccagcagctggcttacttgagatgcatctggcaaattccagggcaaagccagtgactcccagcggctccagtgttggtaggcggacactttgggctatccaggaagagaggtagcagggaagaaggccatgcagaaggcaaggactgactaggcaattatgtcagcagatcctggcctaatggggcatttttaacagacacttttgccctcagtggccagaaactcataatccagaggaactgtgtccagcaggcgggcgtagttgccattgatctgggcgatgatctggtactcctgtcctatgcagggctcatcagagtagttgttgcccagattctgggaagttggctcatcactggagcagccacttgcgaagatggccaccctcatggtttctccagagtcgttggcctctctggcatgtgccctggctgcttcgtagacatgctcttgttgggatgtcttccgacagagcatgatataggccatggtaaaaaccaccatacagcacaaggagatgatgaggatgatggcaaagacaggcaggctctttcctggcccagcactggtctctccaaggtagccatccatgtcagtggtccagtcccaggactgcttcactgtagatgttgctttcaaggggtatg

SEQ ID NO: 469517 - DNA, 1000 bp, Homo Sapiens
aattccttttttttttttttttttttttttaattttttaaattctatatttatttcctcttagaatgttcatgatttttggttttctaatttaaacatacatgatttcaaaattatataaaattgtgttctttagaagtatgtggcaaaacagtacacactgtgaaatcactccatttctattaatgactgaattattttacacataaactgaattttagttgaaagaaaaactacacttagaggaaacaattctatcatacatatacatttacagttttttacttttacaatctctttatttaaaatcattctttcccaaaaactatacttcagcatgagacttttagatataagtatccaatgggtaattagtatgtacataggtggctgtgaaaaattacccacaactctaatatattctcctccaaaggtgaaaaaatttccttttagaaagcactttaacatttcttctcatcatctacaaagcagcagcaatatttaaattatcaaaaatgacaaatccagtaataatcataaacagttccttaagaaatgtatttgaaaagccattattccataaaatatttacattgtttaaattacatgacagcaacattttctttctattttagttcaacatattagtaagaatctctaaaccctccaaaaagaaatgctattcatctttaattaaggagactttatccttgggtttattcagcatctttatatcatccaacagctttttgggtgttaaaacatgtgtagaaccaataataacttcacaggatttatgtgcctgagaaacttcataagcaccacgcacttcagagtatgtgatccctccaattacaaaaacaatcagctttgacccattttttcggtcttctaaataattagctctgggtttctggcgagcacttacagctcctgaaccattccatactgctggacactgggaacaatatggccattcttttgaatctaatctattatca

SEQ ID NO: 469518 - DNA, 1000 bp, Homo Sapiens; identical to SEQ ID NO: 158956

SEQ ID NO: 469519 - DNA, 1000 bp, Homo Sapiens
ttttttttttttttttttgtttttacacagtttattcagaagtttaaaagttaaaatgtgggcattttcccctgaaacaaatcatcccctgccactccccaacacaaagactctcccaacaccgcagttccttctctttacccaggcttaccacacattcttgcaaaacacacaggagtcaacaccccaactatttggtaatacaaagagactacaaagtcacacaaaagaatctcatttacttccttttcactagcaggctatgaatgaaagactgagaggcaaacacatcaccttcatccagagttgacacttccctaaccttttttcttcctctaagaggttaaaatccaaagtagtttcactgacaactgtaactctgatattccatttttctcttctgaatggctaagctaggacatactttcctttcaaagctgatcttcagaacctcaagactggcagaaagcaggctcccagctgcagctcggccacaatactttgcaacaggcaaagttcccacataggtgcaaatgatgctttaagagttatcaaaactttttaaaaaataatgcattaatatggagcctccacatttttctgacgaaattcctctaaaggtggtggcagctgtgaaacagaaggcactttgtgctaaaattcagagggtctctcaagagagaacgccacagcagagagacccaatccgcctaagttgcaggcgaccctttagggtggggaggagtatcccccaggaaggcatctgcaaaggaaaaaattgtaatcatgattccaaggcaaaatggctaaagttgggagagaagaaataccaagagagaagacaaaacatggctgtgccaaggactgaggagtgagctttacaaggacttgtcagctggctctgtacttctattgggctggttccttcaccatttccaaaggggttctggagaccttgcaggaacaggaacagcaccttagccaagagggttccaggcct

SEQ ID NO: 469520 - DNA, 1000 bp, Homo Sapiens; identical to SEQ ID NO: 158957

SEQ ID NO: 469521 - DNA, 1000 bp, Homo Sapiens; identical to SEQ ID NO: 158958

SEQ ID NO: 469522 - DNA, 1000 bp, Homo Sapiens; identical to SEQ ID NO: 158959

SEQ ID NO: 469523 - DNA, 1000 bp, Homo Sapiens; identical to SEQ ID NO: 339150

SEQ ID NO: 469524 - DNA, 924 bp, Homo Sapiens; identical to SEQ ID NO: 339151

SEQ ID NO: 469525 - DNA, 1000 bp, Homo Sapiens; identical to SEQ ID NO: 339152

SEQ ID NO: 469526 - DNA, 907 bp, Homo Sapiens
tttttccacagagaaaaattagattgaattaacttttattactacttgtttaacacagatttacttgtcttagacaagtaagaatttatagaatctatgctctattgcactatatagaaactagaaatgcagttatactgatgtagtgcagtttgtgggaaatcaggaatggtgttctccagaatacatgaagattctcattgattgttgcaaggaatcacgaaagagatctttggtccaaagaaaacgtcttttgggcagcagagcaattcgctgaagttgcagtaacagatcatctcacatcccttcccatcccagaaatgatcctggacattgacatcaatctgtgtcaggtcagctactccttccggaaggttgtgacagttgtgatcttttagtatctttctgtagcaagagaggcgatttgcaggcatggcttgaactcctagcagcaaagttagcccaatggtgaaaacaagtaccatcagtttcattttggcttttggccctttttcttctttccttttggtcttggcagaggatgcttcttaaatgctcacactcactgggtgagtttgggcaaaaggagaagagaggaggtgctggaaggagcttctttacaaatgaacctttgtctgccttgtctctggcctgggatcgacagactcgctgctccagccaggactgtggggaggaggggagtggaaggagacaaggctgcaaggactgcctcctttggaagtgttcagtttgttccaaaccaggcgagaacgaatagaacagcttctttacagagggaaataactagtctatacaagaacctcagggaggcagactctggtagcaataaaacataaaacctgagggattttaaaagaacacagcgtgatttttcccttaagaaaag

SEQ ID NO: 469527 - DNA, 1000 bp, Homo Sapiens; identical to SEQ ID NO: 339153

SEQ ID NO: 469528 - DNA, 1000 bp, Homo Sapiens; identical to SEQ ID NO: 339155

SEQ ID NO: 469529 - DNA, 1000 bp, Homo Sapiens; identical to SEQ ID NO: 158961

SEQ ID NO: 469530 - DNA, 1000 bp, Homo Sapiens
gccaacactgacactttgctgccaaaagcctttaatatgccctggtcccaggctgtgttcatgaaagcggacacagcagtgcttccagcttcatggttcccaggttcaggttcctcccagcggaggtgggagggcagccctcacacctggcacccctgagtgccatactcctggaggaagtcgttgagctgggcacaggctgcccgctggcgggtgctccggcacaggcgttcagagggcatctcctcgatccagctattcgagtccagcaggtactgggggtgtccctcgaggtcataggtggccccatccagacccatgatcaaatattctttcccaggttccaagcgaaggcggcaggaggctcgaaccaggaagttgcgcatctgattagcagcggccttgacatccttggtgaagtgcaggacttgggtgatcttggtctcaaagaggcggaaagcagctctgctgtcttctcggagaaccttaacctggaagccgtactccacacgggggtagtagcaggcaaacttcatcctgtagccatcctcgtcctgcagaccccgctccagggcgcgacgctggcgagggcacttcccctcagcacactggcagacttcagcagaacacaaggtggccaagagtctgctcttacttggtgccccgtaaaacacagaacatctgcgctcggggttgtagtagtcgtacagggttgcgctggccggctgcaccagccccaccggcacttcctgcacagcctcaaagcccacgcactcccgggaggtggggaccgagtcaaaatacagcaggacgtggggcccctcggtctcaaagtgactcacgtaacggtcagagagggaggtcagcttctccaggtcagcacgcagggcgtggaatccactcaggagggtgacgtccgcgatggccatgccagacagccccaccttgccgttccgccagatgcacacggtgtagtgcaccctggactcctgctcctcca

SEQ ID NO: 469531 - DNA, 1000 bp, Homo Sapiens; identical to SEQ ID NO: 339156

SEQ ID NO: 469532 - DNA, 1000 bp, Homo Sapiens; identical to SEQ ID NO: 339156

SEQ ID NO: 469533 - DNA, 1000 bp, Homo Sapiens; identical to SEQ ID NO: 339156

SEQ ID NO: 469534 - DNA, 1000 bp, Homo Sapiens; identical to SEQ ID NO: 339158

SEQ ID NO: 469535 - DNA, 1000 bp, Homo Sapiens
ttaatttctattttatatttttaaaacatgatattagtatataagataatatagctagccagtgttagtaaagaagtcatgattgagtcttaaaaaagaacaatccagtgttgcagttcagagaggttagcatgtcagggcgcaggcctcggccgaggtgtgctttgcatttaggacacagcccggagccgcagaaggtcagcaggagcacgtctggcaccttcagtaccaggctgggtgagagagcccgagaggggggccgggggggcagtcagggccctgcttcgctgcctgggcccttgtagatggccttctccaggccgtccaccacctccctgtattccaggaacgattggtagtgtgtgcactcaaagcagctgctcccgcgcacgtgtgctaggaagtctggcgcacctgggcagatcacgttgtcagccagtagcactgtccccttccgcagcaggccacattcctccaagagaagcgtgtccggcaggtaccggtccttccagtggtcgaggaagaccatgtccagtgtgtccacatcatacttcttcttcagctgggggatgatgtcctgggacgctccaaccacaagggtgaccttgtccttcacgccagcgaaatccaccatccgctgggtgatggcggcacagtcggggttgatctcgatggtgatgagcctcgcccctggtgacagcaggcgggccatgcgcacagctgagtagccacagtaggcccccagctccagcagcacggagggctggtgctcctgaatcacggcgtccacgatcttgcctttcttgtcgcccacgttcatggcccactccttctgctcgcagtaggtgtcaatggcctccagcacgctctgtgcgttcccgggctccgcatgctgcagcacgtggttcaggatgcgctgctccttggtgtcacccatgagcaggttgtggatgggctgcaggatgaactcgttccagccgataaggcacaggccccagcc

SEQ ID NO: 469536 - DNA, 1000 bp, Homo Sapiens; identical to SEQ ID NO: 158963

SEQ ID NO: 469537 - DNA, 1000 bp, Homo Sapiens; identical to SEQ ID NO: 339160

SEQ ID NO: 469538 - DNA, 1000 bp, Homo Sapiens; identical to SEQ ID NO: 246478

SEQ ID NO: 469539 - DNA, 1000 bp, Homo Sapiens; identical to SEQ ID NO: 158964

SEQ ID NO: 469540 - DNA, 1000 bp, Homo Sapiens
gcttcaacagccattttactcttctttaattctaccgctttgggcatacatctcatttgctgtggaagaaggtctgacagcagggctgacagcaccgattcataacacattcttttcatcatacaaagagtaagaccctagaataagtgggaccatctgctaccacgacagagctgccttactggctgtagaaaaagactgcttgtgtgggagagaagaatgaggacagaggaggcatctggggcaagtgagcgtacaagtatgtctacaaattcagaatttggtggaaaatccaaatttgacttcaacatgatagagaattgatgagaaatagctgtactgtttccaaaatttactgaatttggaacctgaggttaaaacttttaggataaagcaacctcaggttcagactggccttgggaagaaatggcaatcacagacggtaatgagtgtcagtgcttgagaagaagaattgccaaaggcatctacatatttgacttgactcaaagagaggggaaaacaagtctcatttaaaaaggatgagtctgcagcaaaaaatcaaagggaagctggaacccctgcccacctctccattccccattctgctgctggtgcctgctcttcctcacagtacctcctgaaaagttcagaattcagttaatacagaattattgggttgattttcaacgtgtagtttaagatgaagagttccgtttggtttaaaccacttcacctaacctcttggtaaccggtagtcctgagagttcgcagtgtcagtgaaatcgtcctgtgaccacgcgtcaagctgctgatggggcacagcaacttccgggcctatcatatctccttgacctcgtccctcaaatctggtagtttctgcaccgaggacacagtccactgcgatgaagtatgttcaaaatcgttttctataggcacctccttccaaagtccaatagtgcaaggtggtcaggaagacttggaaggaagctgcaaaagtcca

SEQ ID NO: 469541 - DNA, 1000 bp, Homo Sapiens
tttttttttttttttttttttttttttttttttttttttttttttttttttttttttttttttttttttttttttttttttttttttttttttttttttttttttttttttttttttttttcgaaaataaaaagaaaaaaagatgtaaaatatacacccccaatcagagaggggaagtgggaaatgaagatagtagttaacagcacgtccaatgggcccagtgtctacactcgtacgagcagccccccaagctgggcgggggtcccaggcctatagttggggagccctgggcaggggcagagggctggctgctccccacaaaggcagggccccacagcagggtgggaagggtgtgggtggcggagaagccaggggctctggctggacccagaggctggcgacacgcggggtgaaggaacgaggtctccagtcccagtgagaagccgtgacaagtcttaatgtgccatttcaattcaaaggaggggagggaggaaatgttcttgtttgttcgctcatcaatatgatgaggtctcgtgtcccaaaccacattcaggcagttcccgagtctgcttttgaacaggacgtgcgggtccagactgtggccggcccagtggggtgtgtggttcccggccccgcacctggacgctgccggtggggtgggggcgggtgggcgggtggatagacggacaaagcagcagcctggtgtgcagccgggctcccggccgctatgtgctcccggtcgtctgcccgtccccttcgtcaccagcaccagctgcggtggcccctgaaggagccaggacatcgtcatcgtcgctgtcgtcctcctcgttggatggggctgccccaggctcaggcgcgggcatcttggcctcctgctcctgctccacgcggctgcgcagggccaggatgcggtggtgcagggctgcatacaactgacctgtgtccttggagctggccgagatcaggaagaccttcacgccctggtcctcggtgtccatgg

SEQ ID NO: 469542 - DNA, 1000 bp, Homo Sapiens; identical to SEQ ID NO: 339165

SEQ ID NO: 469543 - DNA, 1000 bp, Homo Sapiens
ttttttttttttttttcagtgtggaattatcctttttataccaattctgtacaaagagtgcaagaactgatgctttatattttatttcccctctgccctcccatcccacccttggtgatggttgtacccatttgagcatttctgagcacatgaccataagtaaatcttgagagaggagcggaattcttgtctaaacagtaacagaaggggattagctgcaaggatagcataactgttgtgcaggaacagaagctgcccagatcttcttggtggacaatgcatagaagacttagaattatggaacatcggtccccccaaccaccctttcccacccgtctcccaaacccccactcccaccctattccccaccccattaatagtgttaacaaaagcttaatcttccagttttaaagtgcaaatgatttgggtatgactgctgttgcaacaagtctgaacagaaaaaaatgaagtcttctctgtttatacgatgttttccagaatataaaagatgagttccatgacaacggggccctcactaagctggcaggcccctccatggatcaccggcaccaaggcgctgtccagatcattcatgtactgcgagggaaggggctggccattgctccctgcttgatagccaacctgatctgagtcaagtgtcacacgtagtcccagtttggtcattccatcttccttcagaagtttcaggtgaggacagagagcaaggcaaaaagctttggcaacatgctcagtcaatctactgtgatctgcaggatcactgaggcaattgtgctggtcatcgttttctaggaaaaacacctctgtccatctgattacttttccatttgctttatattctgatccatggaatatcttcacatttgttatagtctccatggacttcccatctataggacttacgacacccttgctaacgttcttgtcatcatccacccactggatgtggatgtgctcctggggttcctccgcgtccgccttc

SEQ ID NO: 469544 - DNA, 1000 bp, Homo Sapiens; identical to SEQ ID NO: 339166

SEQ ID NO: 469545 - DNA, 1000 bp, Homo Sapiens
gcgtgacattcctttaggcatcaccactgcatacaccgggaggtgggggttgggcggtgcgcgcctgcaccctggggacggaggggcagagcgcggctgcgcacgggccgcacggggaaggcacgcgctcgggccctgggagtgctggttctgtacaaggtggcgggccggtcacgcacccggagcgagggcgggggcgggcgggtggcgctctcccgtgcccaaggtgcagggcagggttgaagacagtcccgagccagcgtccggggacccccggggaggcccgttctgggctgcaggccggacgaggagaggaggggctcagccctctcgagtctggaggaggcggcccgaggcggcgggaggcgctgccagctgggaagtcagggacggccgtgggggagggcagggccagccccggcgtgtggggtcaaggggcagacggggtgtgggtgggcggtgccgcaagaagaggggagggtggagctcaggctgcagaggagcgcaggcgcccgaggaggggcgacccagccagctggggccatgggccccactgtggctcaggctggtgctgcgggaaggatggggctgccgtctctgctccaagcccctccgcctggggccagttagcccccgctccccactgctcagagaccccagggccctgcctctgccggagcgccctgcgccctgcccagccgactcagctctgccccgtcctcagccgctccggtccgcaccttggtccagcaggggctgcccgccaggcagcggggtgggcgggcggacggacgggaggcccagggtgggcagtctctggggcgggtgggcttccctcaggccttcccgagcagcaggacccatcagtgtccttggccgggctaactgggcaggtgggcgcctccgggggcctcacaccacggtgctgaccgagggatctgagaggttgagcgggcccgtgatatcagtgggatggtactgctgcaaaatagaaatacac

SEQ ID NO: 469546 - DNA, 1000 bp, Homo Sapiens; identical to SEQ ID NO: 246479

SEQ ID NO: 469547 - DNA, 1000 bp, Homo Sapiens
ctgtaagacaatctgtttatttaaatatttcgcatgacaggcatggtacagtgtttctcacattcttggcactcagtgaatgttgactgagatctatattgtgcaatgctacacaaggtttgaggagagggaagactgaaaagaccccttgtctttatgatcaggagatctttggatattgcttctgtatagtgattttccaccctttctgttttaagaaatataaagaacaaagatattattcatatcaaagattaaggtatatgcaacattgcctctaggccatgtgttctgttggaccatgaatgtaaaagtgtctggttttgtaatagtacatatcgtccctcagcactctgctggtttgtatgaacatcagtatgtttgagaatgagtgcaggaaggtggaggtaaccaagctgtccatctctagaaaagtccagtgtggtgggtgggtgggtgcacacaatgaaatagtaagccacaccaaaggccccgtactagatggaatacagtaacacagttgtatcttgtaaacatcatgtccagtaaaaaggagtaacaaatagaaatgagtagaaaaaataggaaataagtgagaattataagagaaataagaagcaaaaacagaaatagaagctatagcataataacatctgtgtaaataataacagactcaaaacaacactgtacaacataacacaaggacacatacatagccaaagacatattcattacagtgaatatctcctgggggtagtgagggaataaacatgctaatcaggatgatggagaaaatcagacaaaacaatagaaggaccttgaaaagattaatgatgaggtatgtgattaattcatgatttgagtagacatcaaaagaaaaaagggaatatgtgatggagccatgtttttttcaaatctcaaacaaaggctcatacaataatcacagggatactatataggttttacatttattatgctcattggcaaacaaaaccagaaa

SEQ ID NO: 469548 - DNA, 1000 bp, Homo Sapiens; identical to SEQ ID NO: 339170

SEQ ID NO: 469549 - DNA, 1000 bp, Homo Sapiens; identical to SEQ ID NO: 339171

SEQ ID NO: 469550 - DNA, 1000 bp, Homo Sapiens
tttttttttttttttttttttggtcccggcatgagaaaagtactttattcgtgcataatttttcagttccattcaaaattacagtacaaaaaaattcccttgcttgcagagtttttgttactttttacttaaatatttagagttaagaaaaaaatcaaatttaaaatcactattgatggaagcttatattccttatgaatatatacatgtatgcatatatacatctctgtatgaatcactcaaagcaattttaaacatcattcttttttgtatttaaaattgcccttttaaacatttagaagttccagaggtggaggctttaatggaatttttcccagagtaaatttcttggattgaaattgttccagttcttctactgttagtttatctctgggtgtgaataacacattatctgttgcaatgatgctgcttgaggctgacagagaagtggatatgctgctatttccaaaagtgtcactggatggcttagaaaaagcagtgtgagaatgtgagcccggactaccaaaaccagccacagaactgccacctccaaaggctggggccactggagctctgacaggacctgttgccaaggaagctggaagtcctgaaaatccaggtgatccaaaactggaagctgcagggcttttgaatgaaaatgatgcagccgatgtgacttcaggcttcccaaatccaaaagctggagcagaagtagagatacctgaactggtagaggctgcagctccaaatgctggggaactcccaaaaccagcagggcttccagaagaggcagcagcaaatccagagtttgttttaaaactaaagttctgagcattatcactgctgctgttattgactggaaagcctggcgacataaatgttgctgcttgactgctgccaaatccaaatgcaggtgctgcttgatttactccatcctttacatcagagagcaaagctactttagttgatatatttagacttttcagttcatttaccctgt

SEQ ID NO: 469551 - DNA, 1000 bp, Homo Sapiens; identical to SEQ ID NO: 339172

SEQ ID NO: 469552 - DNA, 1000 bp, Homo Sapiens; identical to SEQ ID NO: 158966

SEQ ID NO: 469553 - DNA, 1000 bp, Homo Sapiens; identical to SEQ ID NO: 339174

SEQ ID NO: 469554 - DNA, 1000 bp, Homo Sapiens; identical to SEQ ID NO: 158967

SEQ ID NO: 469555 - DNA, 1000 bp, Homo Sapiens; identical to SEQ ID NO: 339176

SEQ ID NO: 469556 - DNA, 1000 bp, Homo Sapiens; identical to SEQ ID NO: 158968

SEQ ID NO: 469557 - DNA, 1000 bp, Homo Sapiens; identical to SEQ ID NO: 339178

SEQ ID NO: 469558 - DNA, 1000 bp, Homo Sapiens; identical to SEQ ID NO: 158969

SEQ ID NO: 469559 - DNA, 1000 bp, Homo Sapiens
ttttgggtgaagtttttttctgttaaaagaccttgggtggtctcaggccaagacaaccggaaccctcagactcatccttcctccgaggagtcccctccggggactacagagaagactgctctcccggcagcgtcatctcggctgacctcgctggaaaggcagctctctgtggccaggtcaagagggctggggagaccaggaatcatccacccatgatgttcctaaaacctgcctgcgcatggcagccaccgggacggcctgtcaaaatgaagatgcctgggccctgccccggatactgagtcacagtctctaagggtaaggaggcctggaatctacacttttaacaagctccccaggcacctctgaatacccaacctgctagggtatcaggccgggcagcgcagaggcctggaggagcccaggtatacaatccatagagccgacttcactactgcctgccactgcctgctgtgtgactgtgagcatgtcattcagcctctctgggtctcagtttcagacctatgggtttggcacaaaagcgcttatgttgggaagggcttgttttgagggttagcaataagatacataaagtgcctggtacataacaggtgctgaataaatggtggctgcagttaggattcgagagctgggagagacccacccagctggcactggctgagaggtgagcaagccgctcccgcacagagggctccatcccaagtgcacatgtgtttcctgcagggggagcacctttaaccagggacgtggatgtggcttgtcactttagctctgaaaaatgggacagaagttgttgaggggaaatcccttctcacagaaagcagaatggtgctttgggaaccccccctccttttccctctgccacccccaatatagagctgactgcacctcactcttatcatccaaaagccttgcccctgaccgcaggctagcccaggaagagaagtaaggctcacctgccaaatcttgctgtgtggctttg

SEQ ID NO: 469560 - DNA, 1000 bp, Homo Sapiens; identical to SEQ ID NO: 339180

SEQ ID NO: 469561 - DNA, 1000 bp, Homo Sapiens; identical to SEQ ID NO: 339181

SEQ ID NO: 469562 - DNA, 1000 bp, Homo Sapiens; identical to SEQ ID NO: 339182

SEQ ID NO: 469563 - DNA, 1000 bp, Homo Sapiens; identical to SEQ ID NO: 339183

SEQ ID NO: 469564 - DNA, 1000 bp, Homo Sapiens; identical to SEQ ID NO: 339184

SEQ ID NO: 469565 - DNA, 1000 bp, Homo Sapiens
ttttttttttttttttttttaagttcatccagctttattgaaacctattacagaagacaatccaaataaaaccactgtctcctgtagaaatctgagttatgttgttttactacaaaagaatataaaacacattaaattacagtgtgaaggaattttaaaaatgaacagtgtatcctcattaaatgtttgcaaagtttcttcctaagcacttacaactagttacagctcttttaaaaattcagatttctacactcagtttaacgggagagacattcacacttaggtacttcagccccaactttcacggactattggaaattagaaggtactttgttgctaagtgaaaaaaatgcacattttttcatatcagggaaaattatactggacttaacagttttaaatgagcaataactcagatatattagagagaaatcacctcttgccttacaaataccaaataaattccctagactcccctccctgtagagaccatcagctcactgtgaaggcttgagcctcagtaggtaaaatttgaggaaaaaaatgagaaatggctaaaagaggcatctgctgcaggaaccttctgtgactgtcaaacattccctcttcaagctcccttttaaaacccagtccattcccaacatcactgaaaatgaaaagaataaacttgctggtcctcatgtcaaggcagtgttttcattgtctcttgatattttatcccatttcctattgacaacatctcccctacccctgaaattatttagaggttccctctatgacaaacccttgcttttttttagctttaggtataacactgacatcttttgaaaaacgtgttagtaaatactcaagttctggcctcatttcctgatgtatgaagcatggaagcagtgctgtcctgtggagattgcttttgcaccaactacacaggaaggtccttgacctctaagcatgcctttagaggttagaattcacagaaaacaaattcaattgtcaaaca

SEQ ID NO: 469566 - DNA, 1000 bp, Homo Sapiens; identical to SEQ ID NO: 158971

SEQ ID NO: 469567 - DNA, 1000 bp, Homo Sapiens; identical to SEQ ID NO: 339186

SEQ ID NO: 469568 - DNA, 1000 bp, Homo Sapiens; identical to SEQ ID NO: 339187

SEQ ID NO: 469569 - DNA, 1000 bp, Homo Sapiens
ttttttttttttttttgggatccaatctctttattgtcagggtcccctccctgtggccccccgccaaacctatagaaaaaacccaagcctgggagtgtcctggggaggggaggtagtatggggaaacccctgtgctctaccctctggcctgggcagtgcagacagggagggctcatggggaaggagtaggccagtaactccacctgcagaggacatggcactggctgggatgcgttgggggaggaggcgcctgctgccagctttcctctggtacccgctggggggtggcatccagggttgggtgcccggcttgaggcctggggcagcgatgcccttcacctgctggtggccattgctcctgtcaggctgcttactgcaaggccccatcatccgcgtctgtgtcctggctgtgttccagctcttcctcgctgtgtgtcaggagcccttcctcatcgccgtcgtctcgggtccgtgcttccccctggggcaggcctgcctcagaagttgtgttctcttggggggctggtggccggctgctgccaccgccaccgccaccaccactgccaccgccaccgctgccaccaccaccgccgccgccgccggcgccacctccatcacccttcttcttgccatctggattggccttttgctccgcagcgatctgctccaagcggctcagcagggcatcgatattggacttgatctgtgtcagctccgtcttgatggcctgcagctcactgctctttaacttgatcttggctgagctggtggtgacagctgtggagcgggcaaagagcttgacaggtacgttagttttgacacgccggaccaaagggactgtgacccggggtcgcttcacagggaccgccctgggcactggcacgggcgacagacggccccggtagtcgaagagcctgtatatggcagatgctgctctctttagccccttgggtctgtcaggcttaggctctccagccatgttgatgtccagggtctgccc

SEQ ID NO: 469570 - DNA, 1000 bp, Homo Sapiens
tttttttttttttttttttttcagaaagaataaaacatctgttttaattggccagtaaaatacattgcaaatcattagtattttataaacagaaacattaagttataaatccatgttaaaaattgcagctcagtgcagccccaacagctgtgtgtccaaaagtctatttttacaacattttcctccagtatttttgtgacaagaaagttcctatctgccatctagatcaagagcctgaactacagtattttcaaacaagaaccgggagaagtcggtacaaggatacgtcgtgctgtgtatttaaacggcgcttcccacacacctgccgtctgcatcccgggaggacgccctttgggaaaggcctcctcggcagtgtgaggtctggaggggtctgcctggaccccatttttaggatgctcccctccccaataaaacagcagcccccgcccctgccctgcacagcatctgggggttcataacacaggtgcaatactgaccatgggccctggagggacgtctgcaccccgaagcccctgtacctcaaactcagagtttcttcccttctttgattttctggaggacctgcagctggccttcctgagacaggctccattcctgttccatttgccttcccggcagccttccctttagtgggtataggttttgacgttctgagttactttgtatcaaagagctaattaaaaatggtccttcaaaaacataaagaaaaacagcttgaaaaatgtacatttctatttttaaaatcttcaaacttccacggggggtggcaaatgttaattctgattttaaaccccattcaacagcaaaacgatgtgggcttcaactgtgggctccgcagacgcctggagaagctggagcccacacctttccctccaagggactctgtggacagaacccgtatcccccaagcaccaaggacatcctcagactgggacttctgtgtaattctgcacctcccagccataaaactgacccctca

SEQ ID NO: 469571 - DNA, 1000 bp, Homo Sapiens; identical to SEQ ID NO: 339188

SEQ ID NO: 469572 - DNA, 1000 bp, Homo Sapiens; identical to SEQ ID NO: 158972

SEQ ID NO: 469573 - DNA, 1000 bp, Homo Sapiens; identical to SEQ ID NO: 339190

SEQ ID NO: 469574 - DNA, 1000 bp, Homo Sapiens; identical to SEQ ID NO: 158973

SEQ ID NO: 469575 - DNA, 1000 bp, Homo Sapiens; identical to SEQ ID NO: 339192

SEQ ID NO: 469576 - DNA, 1000 bp, Homo Sapiens; identical to SEQ ID NO: 339193

SEQ ID NO: 469577 - DNA, 1000 bp, Homo Sapiens; identical to SEQ ID NO: 339194

SEQ ID NO: 469578 - DNA, 848 bp, Homo Sapiens; identical to SEQ ID NO: 339195

SEQ ID NO: 469579 - DNA, 1000 bp, Homo Sapiens; identical to SEQ ID NO: 339196

SEQ ID NO: 469580 - DNA, 1000 bp, Homo Sapiens
ttttttttttttttttttcctctaatactttttattataaattacatacaacatctgttttacaaaattctatctactcttccttttgaatgcacatgcataaagagatgtctgatgtaatgtgaccacctatttctgagtagtaggatttgtgatatttttctttgaatatttaaaaatcatttttataatttaacactttagagatgaacaggaagtaagaattaaccaaagggactgatgggggtttcgtgtgagaggaacattgagggggtgggaatctggggagcaggtgtgataaaaacacggagaatagaaagtagaaacagggaaaagtacatgtgcctaaccacgccgcccgccacaccctcaggactagaagccgtggtaagagaaagggggtaagtccgggacacaggctgccaggtcggggaggcaggccacaggattgatgctgcagagcccagcatcctggcccttctcaaagtagacactgccaggggagaagatggaggggtcctcatcaaagaagttatagggtcggagcaagaagccaactctgttccccagagtcactgtgtttgggatgtcctcggcatggggaatgtgcaggaagctggctgtgacccaagccaccagatcctctcctaagagggtttcattgttgatgaagtcagcaaaggtaactgtgggtgtccagatgtcattctggtgatagatgctactgctctgtgactcctcctcctttctctgggtcaccacaagctggtatctcccccagctgagggccctctccatgtcactctccaggggtatgtgtatgccaagggggctgtggatctggattcggtacccgcgctggtgaccccacgcattagtctggttgctagccaggtagaggtagcggggtagggggcttcccaaggaaaaagctgtcaggtcctcctttcccaggacctgccgagtcagctgtgggcgctgtagccagtgctccgggttc

SEQ ID NO: 469581 - DNA, 1000 bp, Homo Sapiens
tgaatagaaggaatcaatttctggggtatgagggagttagaagagatttgcttcaagatgaaaggacggatgacagagaaatgaaaatacacagacacaaaacaagaaaaaaaacacggaactagtgataaaagcagaaagatgccatttgaggagtgttttgatttgctctaaataaattagaacagagtcaaagcctctcccctcatgccccctactaccacccgttcatttatttgctccaggaatcagatttcctgtgttggccttagggaacaattgtggggcttaaataccatctgccaggcagccacaacagtggatgtcaggctgaccagttaagctgcttaatttttctagattctaggcttgcccaagctctatttaggttggaagctctttggcccaggacctctgaagagatccattatgtcagaatgaacacaaccagccagcggatgtagacaggtttacgtggctttacagaacagctaaatcctagtgttcacttttctcagagctacttccccacccaagtccctggggcaagcatccctaagataagtaggctatatattcccattaacttccccccaattcttcggtacacctacatcctgatctggggctaatactccgttttcaccacccacctcccttgagtcccttctcctaacccttggaagccttgtctcctccacttctctccatctgcctcgtgtgaggagtaactccctgcttctctgttccctcagaaatcaagagccacacacttgactggcagcagggtaaaggccagaaacttaaggtgtcggttacccagtactcaccatactgggtcgaggaagggaggtataggatggcacctctttttgcttccttagctctcatgccccaaaactcagacacagccacactcacattcatatgcacaatcagcacacacggcgaagggtggtgggatggggaggaagggaagtttgcaccaaccagctcatga

SEQ ID NO: 469582 - DNA, 1000 bp, Homo Sapiens; identical to SEQ ID NO: 339199

SEQ ID NO: 469583 - DNA, 1000 bp, Homo Sapiens; identical to SEQ ID NO: 339200

SEQ ID NO: 469584 - DNA, 1000 bp, Homo Sapiens; identical to SEQ ID NO: 339201

SEQ ID NO: 469585 - DNA, 946 bp, Homo Sapiens; identical to SEQ ID NO: 158974

SEQ ID NO: 469586 - DNA, 1000 bp, Homo Sapiens; identical to SEQ ID NO: 158975

SEQ ID NO: 469587 - DNA, 1000 bp, Homo Sapiens; identical to SEQ ID NO: 158976

SEQ ID NO: 469588 - DNA, 1000 bp, Homo Sapiens; identical to SEQ ID NO: 339204

SEQ ID NO: 469589 - DNA, 1000 bp, Homo Sapiens; identical to SEQ ID NO: 158977

SEQ ID NO: 469590 - DNA, 1000 bp, Homo Sapiens; identical to SEQ ID NO: 339206

SEQ ID NO: 469591 - DNA, 1000 bp, Homo Sapiens; identical to SEQ ID NO: 339207

SEQ ID NO: 469592 - DNA, 1000 bp, Homo Sapiens; identical to SEQ ID NO: 158978

SEQ ID NO: 469593 - DNA, 1000 bp, Homo Sapiens
tttttttttttttttttttttcgggaaactggtttaataaggacaattccagaggggcctggctgtggcaaagctgtgccaaacggttgggatccagagctaaaggcacttcttgccacgtgagaccatgggcgaggctccccacgctatctccaccaccacagtcatgagagccaagcgagactggcctgtgcgtggggctccacagctgcccagctccacctccggcatttactggtctcatcctgagaggcattgggtgccactcactggctggatgctgggctggttcatgggtggcagagcagggtatacctttgggatgtccctaacccctcaggaccagaggcagcaccaagcagcatgtcacagccagtgctagggtcagctgcaccctttgctgggactctagctctcctcagagggcctcctagggccattccgggcactgtgggtggcaatggggagcaaggctccctcattaggccagacaccagtctggttgggtcagggaggcccagccttgggccctgtcacacgtagtccagaatctctgtctccatttcgttttcactgccgtcggatggcttgaagtcctcctcctcctcttcctcctcctcctcatcctcctcgtcttccccagactcgtacgtcagctgctcttttccgccatcagccttggctgagctggaaaagagagcaggcctcttggagcggatggtctgccggatcatgagggacatggtgtccctgagctcgtcgctggtcttggggaggcaccacccatcccgttctgtgcaggaattctctgccccgtcattgcggtgaatgatcttctgcaactcttccacattcaagtcgcataactggtagaacatctgccgatagggtggcaaggccccttcccggaagatgtagacagagtccttgagcttgtacttgctggaagctggtttccgagcaccactcgtccccgaccggcccaggccctgcttcaggt

SEQ ID NO: 469594 - DNA, 1000 bp, Homo Sapiens; identical to SEQ ID NO: 160515

SEQ ID NO: 469595 - DNA, 1000 bp, Homo Sapiens
gagatagggtcttgctctatcacccaggctggagtgcagcggtacgatctttgctcaccactacctccgcctcctgggttcaagcaattctcctgcctcagcctcccgagtagctaggattacaggtgtgcgccaccatgcccggctagtttttgcatttttagtagagacagggtttcaccaggttggccaggctggtcttgaactcctgacctcaagtgatctgcctgcctgggcttcccaaagtgctgggattacaggcctgagccaccaagcctggccaccttttggctttttggacagaactctttcaattgtaagtcagaaaaccaacacaaacaggcttaatcaaaataacaacaggaatctgtctcacataattgagacatctaaacagtgttactagatctttgattctcttggctgtttcctttgttgccttcattctttgctggctttctctaggtagtaggaaaagatggccaccggcagtcccatgattatgtgacccttacagctccagatcaaaacagaaagcctttcctgatacctctgagaacaagtccagggcagtccagggctggctcacaggctattcctagagccagggagtaaggttagcttcagccaagtctgaggcacagagcaggaccactgaagaatgggaaaagaatggctccctgaagaaagaaaggctgggaatacaaaatatatattcgctatgctaggcaaagctgtaaaacttgcagagcgtcaaacatcatttcagctcaataaatatttgctgaatcaatgtaggaacccataaaacagagctgctgcagagtactttcaaagcatcatgttccaaactctgatttcatattttagagaagcaataaaacacaatggaagtcagatagtgaggtcattagtgagatgccattttagcagagagctacttcaatcaagtatagcttgctctaagttccagattccatctgtattacacaacagagat

SEQ ID NO: 469596 - DNA, 1000 bp, Homo Sapiens; identical to SEQ ID NO: 339212

SEQ ID NO: 469597 - DNA, 959 bp, Homo Sapiens
ttttttttttttttttttttttttttttttttttttttttttttttttttttttttttttttttttttttttttttggccgcaaaccacaagtgtttattgcagaaatctggccaacattccaattgcagggccccagcacagggctgggcaggtgagatagggaggggtggaggaagtaatctggcccagggcctcagagctgtgagatgatattgggtgccaggctgcaggtgaggcctgtgccatctggttccacattcagggccttcactatgccatcctgtaccaccatggagaacctcttgagacgtcgattcccaaagatggacaccagcgaatcatctagtaataagtctgtctccttcccaaaggccccagtgggatcagccaggagccgaaccttgccttccgccttgtgggctcggccccactcgccagtcacaaaggcatcattaacactcagacaggccaccacctggactcccttggccttcagagcctcagcctgctccacaaaccctggcaggtgtgtcttggaacatccaggggtgaaggccccaggaactccaaacagcacacccttcttgcccttgaacagctctgccaggttcaccttgttccctggctccccttcaaacacctccactgctgggatggcatctcccaccttgattggggccatggctgcagcggctctgctgaaactgcggaccccgccagacgcccactctccttcactgcaccgtcttgctgccgctgccgcagactgaccgccggccccaccgacgagtatatagcccgctgagcgtctcagggcgcacacgccagctagtcccatacccgccccacggccacttccactccgcctcctggctggtgccaccgcagcaggcggggcaccgctagcggcacagcggcgacaccctgcggaaggcgggcctgggccgcctccactgc

SEQ ID NO: 469598 - DNA, 1000 bp, Homo Sapiens; identical to SEQ ID NO: 158980

SEQ ID NO: 469599 - DNA, 1000 bp, Homo Sapiens; identical to SEQ ID NO: 339214

SEQ ID NO: 469600 - DNA, 1000 bp, Homo Sapiens
agcactgatggcttttattgcagattcgtgtcattacaaggataatctgggaatatatttttaaaaaaaccctcccttttatatacacaaaacatgctacatggtacactttgtgagaaatgctgaggtaataggcacacacccagacatggacagtaccaaacatccaacatctcacacagcctggcccacgtgcccaccgggaagggtctcaccttcttgactcatcccttgccccttcttggcaatagtcccgggagtgctgaggctgacacttggtggccaacaggactcagaaagccaccatgctgcagtgcatcaaccaaggggtccggtgacccctgattattcaactcctgagaagtggcctgttttcatttttgtggcacttgttctccagggaagtgtagtttggagatgagatgcggactctagtcagcctgagagcgtggaatctctggtctgtagccatctgggggctctgatgatctgatgacttctgttctgagataattctcctggccagataggttattatttgtgtgaagactcaaatgacctgtaggttaaagtatgaatggaagatacaaaactgcgagtacattatctatacggccggtggagcttttggcctggccttcccttcccaaccagaaacctggagcccggagtgtttcctactcagaagctgaggaatctcgcctggaaagaaggggctgtgcgacagaaaaggcaaggagtaggtaggcgaggagtacagcagagcggaaagggggccttgaactgcagtgagtggccagggactgacacacagaaggcacttaatgaatggtgtcaaatgaagggataagtgggtgatggatggtgaaaagtcctgagaatggggaaaagtatgaaaatgtggggggagggattttgaaatttgattaggtgccaaaaggggttcttaagaagctgggaacctctatgtgagagattagcattgtagacattctggaag

SEQ ID NO: 469601 - DNA, 1000 bp, Homo Sapiens; identical to SEQ ID NO: 339216

SEQ ID NO: 469602 - DNA, 1000 bp, Homo Sapiens; identical to SEQ ID NO: 158981

SEQ ID NO: 469603 - DNA, 1000 bp, Homo Sapiens; identical to SEQ ID NO: 158982

SEQ ID NO: 469604 - DNA, 1000 bp, Homo Sapiens; identical to SEQ ID NO: 339218

SEQ ID NO: 469605 - DNA, 1000 bp, Homo Sapiens; identical to SEQ ID NO: 339220

SEQ ID NO: 469606 - DNA, 1000 bp, Homo Sapiens
ccagccccagacaagccccaggcacgctttataggggcatggagatgcccacaccctgtctctcaaaagctgggtctctggagaccgggatggggagaagggggaagccctagcaagacgcagctccccctcagcctcagcgccccccccgcagagaggggacatagaaggaaaaaggaaggtgacacaggactggggttcaaatactcagaaagccacacaatagaagacaaaaagtagcaagcccccaagaaagcggggacaaggaggaaccagtgcccgatcccgccctcttcccagctggggcactgcgtccccaggactccgtggggcaaggggtgggactgggaggagaggaaggatttgggggtggaggggctcaaggctggacccaccctgcccttggactcctgggctcagggcaagtgaggcccgaggggccccctgcagttggcagtgatggggccagtggaggcctacagcttggtcaggtccagcttcagcttgtagggtggtaggctgtcctcacaggcgtgggacggcggcgggtacaggggccaatcgggctccatcatgaagcccttgtgctgctccagggtcagaggctggaacttgaggtgctggccaggcgcggtcaccagggtggagcagctcagccacagcatcaccagcacggagaggaagaggcagcaggccaggatccagcgaggcagacccgagcgccgggacatgcaactgaggaagtcattgtcctgtggctcttcagactccaccttggccttgctgctggtcttgactcggatcttggccttcctcaccttgtccagggggcctacagggtccacgtgcacctccagggcttcagggtgggagcctcgccaggtcacctccacgcgctgcagacggcccccctggaagccgaggctctccactatgggctgagtctgaaacaccaccactttcccattgtcagtctgcaagtagtatgtccaggtggagg

SEQ ID NO: 469607 - DNA, 1000 bp, Homo Sapiens; identical to SEQ ID NO: 158983

SEQ ID NO: 469608 - DNA, 1000 bp, Homo Sapiens; identical to SEQ ID NO: 339222

SEQ ID NO: 469609 - DNA, 1000 bp, Homo Sapiens; identical to SEQ ID NO: 339223

SEQ ID NO: 469610 - DNA, 1000 bp, Homo Sapiens; identical to SEQ ID NO: 339224

SEQ ID NO: 469611 - DNA, 1000 bp, Homo Sapiens
ttttttttttttttttttgacagaccaggcttggcagtttatttcggtttcacaacccccttccagcccttggggctcccttgagcagcacatctgggtgccctggccttcaggccggggcagggtcctggggtcccagcgcagctggaggggagttcccctttaggagtctcactttcggctgggcatttctgggcttcctggggggcagatctggccgtgggggcaatggaggagccgaaaggggcacctgccccagctccaactccctgccttcctggtcactgctgttccctgagtcctcagcagtagcctgaccgtagaactggtagatactcacggcctcccagcccttgatctcgcagcggcagaaggggcaggtctggctgtccgagtgctgccaggcagccaggcagcagctgcagagcaggtgcccgcacggctcaatcttcacatccttgttgctctcagcacagatcttgcagagctcaaatgtggagtccatggcccagtagagctgcagctgctcctctgacacgtggatgcgctgctggggttctgcctggccgagctcagtcaggtctgggttgtgggtctttccatctgggtagaggtagaagccgtccttctgtccctccaggagcacctgggacaggggtttgttggcagggatggtctgcaggatgctgccatctgagctcacatagccgatggcccactgccccaggcgagtacagctgggccggaagatgtaactgcctggcttgtctctgcaggcctgcagacgctcttggacctcatcataggtgaggaaggccatgtagcctgggtgggtgactgccaggagctgccagttcttgaggagtgttggccatggctgaaagagcctggtgaagacgtcgaactcgaagatggacacgtgcccgctgcaggtgaggtcaatggtggtgcgcaaggccagggctgtgcagcctggttccacagggtggcaggtgcccag

SEQ ID NO: 469612 - DNA, 1000 bp, Homo Sapiens; identical to SEQ ID NO: 339226

SEQ ID NO: 469613 - DNA, 1000 bp, Homo Sapiens; identical to SEQ ID NO: 339227

SEQ ID NO: 469614 - DNA, 1000 bp, Homo Sapiens; identical to SEQ ID NO: 158984

SEQ ID NO: 469615 - DNA, 1000 bp, Homo Sapiens; identical to SEQ ID NO: 158985

SEQ ID NO: 469616 - DNA, 1000 bp, Homo Sapiens
ttttttttttttttttttttttttttttttttttttcggcaggacttttgaacaaatttattaattatttttttgatagagttttgctttgccacccaagctagggtgcagtggcatgatttcagcttactgcaacctccacctttggagtccaagtgattctcccacctcagcctcctaagtagctgggattacaggagtgtgccaccacgccggactaatttttgcatttttagtagagagggggtttcactatgttggccaggctggttttgaatcctgacctcaggtgatccacccgcctcagcctctcaaaatgctgggattacaggcatgagccaccgcacccggcctggcacacatttaatttaatttagcagtaacttactccctgcgcccagaagaggtaggggcaagagttgctttccatgaagagtgcacctgatgagaaggcagctccagaagactcaaaggaaaaccgagaatcaggagagaaagaaacgtgcagtccttgcctacttcaggggaggaccccaaactcccggttgatagtagggacctgcttccccatgcgccccagctccctctccaccatgcagtcgcctcctgggcctggcgaccacagttcggggcttgctctaaggcccagagttctcagtcaggcgatgcccagctgaagtggtctgggcctcgtggcagcaccagatccagggtgaggtcacgctgctggtccgcagagtacacaggccggtagcccagcagctgcagcgcgccggcgcacacctcctgcacgcgcaggatcttagtgaagggcaacgcgtggcgccaggcctgggagacgttgcgcgcattcctagacgaagtatggaaggcctcgattggcttgccgatccccgacccgtgggtgatgttgtggatccaggcctcgagctgtggcgtgagggtcaggccggtgaaggcgtagagtgcgcggatctctgccagcggctcccgcgccagg

SEQ ID NO: 469617 - DNA, 1000 bp, Homo Sapiens; identical to SEQ ID NO: 339229

SEQ ID NO: 469618 - DNA, 1000 bp, Homo Sapiens; identical to SEQ ID NO: 339230

SEQ ID NO: 469619 - DNA, 1000 bp, Homo Sapiens; identical to SEQ ID NO: 339231

SEQ ID NO: 469620 - DNA, 1000 bp, Homo Sapiens; identical to SEQ ID NO: 339232

SEQ ID NO: 469621 - DNA, 1000 bp, Homo Sapiens; identical to SEQ ID NO: 158987

SEQ ID NO: 469622 - DNA, 1000 bp, Homo Sapiens; identical to SEQ ID NO: 158988

SEQ ID NO: 469623 - DNA, 1000 bp, Homo Sapiens; identical to SEQ ID NO: 158989

SEQ ID NO: 469624 - DNA, 1000 bp, Homo Sapiens; identical to SEQ ID NO: 158990

SEQ ID NO: 469625 - DNA, 1000 bp, Homo Sapiens; identical to SEQ ID NO: 158992

SEQ ID NO: 469626 - DNA, 1000 bp, Homo Sapiens
tttttttttttttttttttgaggagtacaagagtagctttatcatggatttagggctgtggttacaaggaagctgtaaggaataaaatgactcccatgaagacgtaccgtgcggacgagtggaaggagaaatttggccattacaaagacacaggaatatgttaagaagtgaggggcaggatgaaatcatctagggtaggtatttagagggagggcgccgtgcaaaataaaatcctcactatgaaacaaaggcggaggcaggaggctgcgttaggtggaagcagcggaggaaggagacgaaagggattgtcattttcatgtcgtggctttttagaagacagccatgtcctctactctgattctatcaaaatgtgttctcggggtgctggtaacgttcagccaacgaaataattcctatggcggcagtaggaataacaaaacgcagaagcgggaacgatgtctttttattcctccccagacgcaaacgtggatgcatgaggtttggtaacaggcaaagtcatctggttaacgtgactgatgcaaaaagtccaggcctgggcaaaaagaagtcactgggtgaatgggatggatcagactccctgtcctgagggggagatggtttcttgcagaacgaggtgaaggaggtggttctgctcagcagtcaacagtggccacatctccacctgcagcgacttgatggcttccgtgtccttttcgtgggtagccatgaccaaagactggagcagcagaaagagctcctcgggaagctggccgctgctctcctgcccgtggctgtcaaaagcctcccaggagtacttctccagggtctgggcgtgctccggcagcagcttggcgggcggtggttgcaggaggagcagcagcagcacgcgggacacctcgcagcggaccagcacgtccgagaaggcgcccagggcggcgggagagggcgccgccgagccggagttcggaggaagcagcgcggccggtagggcgggcgtcgc

SEQ ID NO: 469627 - DNA, 1000 bp, Homo Sapiens; identical to SEQ ID NO: 339238

SEQ ID NO: 469628 - DNA, 1000 bp, Homo Sapiens
tttttttttttttttttttttttttttttttttttttttttttttttttttttttttttttttttttttactgcaaaccagatatatatatttttctcttacattaaagacataacagtgaaaaaggattgtactgtatttatcaccacagacccgtattctttaaaaactttggaaaataaatgtcacagtcctataggacaaatctgatgattagactgtcagtatattgtcttttttctttttttaaatacattttttattaaaatggcacttgtctgccaacctctctggacctggaaatgctgtaaacacacggggcccaccttctgccactgctccttagttcaggccgggtgaagggcggtgctggcagaacacggcacctgcggacgcctctgcatggccaccggccctcagtcgaggaacttgggtgagccacgccaggggcacacgagcatcgcctggaaatcaactttagtgacaacatcagaatgttcaaggctttaaaaccacacttgtgttttgtgttgctttcactctcagaagattcacagctagtttgagcccatcaatttcatagagaatcatgtattaaaaacaagtaaattgaatgaccaaataaattaaaaatgttttaaagccctgagttcatagactggttttaggagatttttaggacacatgggactttgttttaataagcagcttatagattttagcaaaccatatttcctatgacattgggttctcatacaggtctgcagttcaaaatccaagtttgaaatctgggacggaaggcattctggaaaacggagaatctaataaaatcaatgacgtctcatgttcgatgctggctgtcacggaagggctggccatctgttggtctgagtgtagctggtctcgtgaatcccactcggtacacaatcgctaaacactaaaacatgtcaagcaaagtacatggtgcgcagagtgtcttggtgaacctggaccgccttgg

SEQ ID NO: 469629 - DNA, 1000 bp, Homo Sapiens; identical to SEQ ID NO: 339240

SEQ ID NO: 469630 - DNA, 1000 bp, Homo Sapiens; identical to SEQ ID NO: 339241

SEQ ID NO: 469631 - DNA, 1000 bp, Homo Sapiens
acaagtgtgtgccaccacacctggctagaaaaactaaaaattttccagttgaacagttaatccagagaaataaccaaacagctggaaaagcatgtctcattctccaactagctctgaccattttgtacataccaaacaaaacacttgccaggtcacaggcttaataagacatccttacatgaaggtgtaaaaaattaacttttttttttgcataaatgccacgatactttattgctcagtgttcctttgaaaataagttagcatgattccatgttattcttttatcaatcatattattgactaaagcatatcactgattaacataaggtaaaaataatatccactcatattcttgaagagaagtgcttgcagtattttatgaaaacatttgtgcacatttttacttgatttaatggacaatttcatatttttctttaaaatctacaaatgtcttaattcttaccattaaaacaactaaaaacaaaacccaaaaccaatcccaaaattaaaccccaacaaagcacattaattttaatacagaacatatattaagtcactgagtaaagctcttttttatgaacacttttggaaagcttgcattcagttctagcacagctctgttatcaatctgcgaacagaaggacacatcaagtaaagaaagatctttacaagattccaggagttttcttaaggatgccggacttaccattcttgttcctaatatgtccagctgctgtaacctggtacaattacatgccaattcatcaatgtctgtgtcacacacagatctattagctgtaagaaagagtttttgcaagtttgggagctggtgtgccagtctggtgaagcacccggtgctgctctgcagagttgggcaccagccaaggtcaagctcctccagtagtggacacccagaagccagttctgctattccattctcagtaatattcttacatctccacagatccagggtccggagttttttacacttggctcctat

SEQ ID NO: 469632 - DNA, 1000 bp, Homo Sapiens
cagtccagggacctcaactttagctattttcccagatctagctcatagagataaccagaagagagactataactaggatgacttacattattcttatagatactgatctgcaacagtctgtccccatgtcaccactctaggatgcaaatattaaacagagtgggaaacaaatagtagtgtttacaagcattgagggtggggtagggtctgattttcctgctggaaacaaatgatatttatgtccacctaattgtttcaaactcaaaatgatatgtattttcattcaagatggaaaggaagtaatggctcccaagacagaagagcaaatatttttatctttgaaagcaaaagccttagtaacaaaaaagatccacaatttttaagcttgaaaaagcctttcaaaagatctaatacagaatttccaaaaaccagtacgacttgcaagacattctgtggaaaaaagttttgtgaccaaacagatttgggaactgtcacaggtaatgctattctccttccagatttccacagcaccgggcatattagaagctctgagaagttttgccataaagatacactctaaccatgtgtttcctttaaaggaggaaactagaaaggaggtgacacattgaggtcacacagagtaccacatctgtcaaaggaaagatcaacaggcaatgtcaaattttaaggagaatgtgactcaaggaagttcttgaaggacaatatatataaaaatgtaattattcaaccgtaagcagaattatgttcagtaagccccttagccaatgtctactacaaaatggaatgaactattatcttaataattctttaaacacgttttttaaattgttaaccccaaagtgacaaaacctgagaccatttcccttcattcacagacgaaatcagaagcacacaagacatacttttcagaagtcagtgatgacaggttgtccacctggcctccagccaagatgatattcatatcactgaaagtgctgac

SEQ ID NO: 469633 - DNA, 1000 bp, Homo Sapiens; identical to SEQ ID NO: 339244

SEQ ID NO: 469634 - DNA, 1000 bp, Homo Sapiens
ttggaaccaaaatttgcttttaaaatgtgagtttttaacacttgaaggatttcattcttaactctcaattatataattacaaaaaaaatccaagtttcaggaaaacatacttaatcctaacataaaattcatgtcacttatcacaaagacagtcaagtgtataaaggagaaacaaaacagaagcagtatttacaaatttaaactacatgagatgttgtgaacaatcttttgttaataaacagcacgttacatacttttacatactacatttcaaaaatgcatctgtgaataatatgataaagcgcatagtgttgaagactttaaattaaatccaaggtcatcatgttgaagacctgaaattaaattcaaggttgtagtgatgaaaaatttaaagtcaaggtcttagcgataaagactttaaattcaaagacagattgtctaaggacaaaccactagcgttcaagttgtttagtcaattagttctctgtgagtacaaaatattaggaatcactaaatggattagcctaattacaaattttgatcatttctaaataactcacaactgcaagaagtcttttcacagaatgagtcacatagtttctctctatccttgtgcaggtattttaaatccttattcaaaacagttccctctccatttctagatttttgtaagtataaaatattttaaaacaaaggtatgtccattccttagctagagaactattcttccactgactcctggaagagaaaaaaaagattcccatttcttcctctacctcaaaaacacaaagcaaacccaaacaatccaattcctaatgtagtgtcacatagaacccagggcctgaaacaatatttcatgctagttttcctgctatatgcagagaacaatttagttatttacattattgagaaatctatttaacagcctagaatcatcctagtgcttccatcagcagaaggcttgctaaaaaaggcgtgagcagcggcgtctgcgaatggg

SEQ ID NO: 469635 - DNA, 1000 bp, Homo Sapiens; identical to SEQ ID NO: 339246

SEQ ID NO: 469636 - DNA, 1000 bp, Homo Sapiens; identical to SEQ ID NO: 339248

SEQ ID NO: 469637 - DNA, 1000 bp, Homo Sapiens; identical to SEQ ID NO: 339249

SEQ ID NO: 469638 - DNA, 1000 bp, Homo Sapiens; identical to SEQ ID NO: 339250

SEQ ID NO: 469639 - DNA, 1000 bp, Homo Sapiens
ttttttttttttttttttttttttacccaagagagcctttattcagccacactgacggctctgagccagagccacctcctggccccactggtacccaggaaacatgcccaggttaaagctgccccccaggggctaggggctgaggtatggtcagtgggctgaggcttgtagactgtcggggcagtctattgaaccagaaagacagttccttgccctggatggcctcagatgtctttttccatccagaatatggggcgccccctcacattttgatattgtgtctccagcaggctttttgaagggggccctgatggaactgggggtgagatggtcaggcactcaggtaggggagggggtggtggcaatggaggtcccttgggaccccttggggcagcttgggcagtcaggtttggggccttcctgggtggccggggagagggggctgtggggaaggcattaagcagggtggcaggcagccgtctgctggtgaagaccaggccctgcacaggctcacccagctggtagcccaggtgggtatagaagtgcacctggtcatgggtggtgagatgcagcttgcggaagccccgggcccgagcaaagacctccaggccctccatgaggcggcggccaaagccacggcccctcagggcccgggccaccaccactgtctccactaagaggctctggggctggttcagcacccgtgacaggcgggcatggcccaccacaacgggtgctgcttcaagtgtggggtgggggcttagcagcatcaggcagagggggaaggcatctgaggactggcccagggagtgcaggcgggaggtgcggctgcggggccactgatcattgatgaggtcagcacaagcatccaggagctcgggtcggcggtgcacaggctccagggtcaactcagccaggctaggagctggggtctcctctggctggtgttcaggatccagggtaagctcagttggaccaggattgaaggtcatctctggtt

SEQ ID NO: 469640 - DNA, 1000 bp, Homo Sapiens
gaattagaaatcacagaatgtactcaaggggaccaatgtggggcagatgatagaaagctggatttaggagtttctagacgagcagtgaaacattaacgtagcattaaagaagtcccgaagatttagttttatccctttttatcataaccattgccatctacttctcccttcagtttctcttcctcggatttggctgcattgcagaatatggtccccagctctctcccttcctgattgcccgtgaagacaaccacacagacctttgttcaaaggttttactgctcatcctgagaagactgtacatactaagaaagtaacaacctggggaaatggctgaagttccaaaagactccagacttcttacaggtttcatctctcttctgtggccactaacttcccaaggaggcagtgcccaaaagccctgtggttttttgatccgttgtacttcgatagctcctcctttccctagatccagcagaactctagacatgtaagacatagttcacaaaacaacagttatgaaccaacaaatacttggctcacggttatgagccactgaagtcagtcagacttaaggacaactagacagagctcccattttctgtcatctgggcaggaaccaatctcctgttgtataaaatgaccttctggtactttctggaatcttgcttcctcatctgttaagtgaggctaataccgcttactcatagttttgttgtgaagatgactaagagcatgacatattacccgttttaaaattgtacacacagaccctgctttaaccagatgcctgcaaatgctcaggttttccttctacatatagaaaacaatttctcagctgccagggctgaagccagcagatatgcactaaacgacagaacaacggattgtgccaataaagtaggcaaagcttccttgcccagaatataaatcaaactgagtaaaaactgggtatattggcttccaggaaaaggagcaaggacacccagctttcaggcaa

SEQ ID NO: 469641 - DNA, 1000 bp, Homo Sapiens; identical to SEQ ID NO: 158994

SEQ ID NO: 469642 - DNA, 1000 bp, Homo Sapiens; identical to SEQ ID NO: 339253

SEQ ID NO: 469643 - DNA, 1000 bp, Homo Sapiens; identical to SEQ ID NO: 339254

SEQ ID NO: 469644 - DNA, 1000 bp, Homo Sapiens; identical to SEQ ID NO: 158995

SEQ ID NO: 469645 - DNA, 1000 bp, Homo Sapiens; identical to SEQ ID NO: 339256

SEQ ID NO: 469646 - DNA, 1000 bp, Homo Sapiens; identical to SEQ ID NO: 339257

SEQ ID NO: 469647 - DNA, 1000 bp, Homo Sapiens; identical to SEQ ID NO: 158996

SEQ ID NO: 469648 - DNA, 1000 bp, Homo Sapiens; identical to SEQ ID NO: 158997

SEQ ID NO: 469649 - DNA, 1000 bp, Homo Sapiens; identical to SEQ ID NO: 158998

SEQ ID NO: 469650 - DNA, 1000 bp, Homo Sapiens; identical to SEQ ID NO: 339262

SEQ ID NO: 469651 - DNA, 1000 bp, Homo Sapiens; identical to SEQ ID NO: 158999

SEQ ID NO: 469652 - DNA, 1000 bp, Homo Sapiens; identical to SEQ ID NO: 339264

SEQ ID NO: 469653 - DNA, 1000 bp, Homo Sapiens; identical to SEQ ID NO: 339267

SEQ ID NO: 469654 - DNA, 1000 bp, Homo Sapiens; identical to SEQ ID NO: 339268

SEQ ID NO: 469655 - DNA, 1000 bp, Homo Sapiens
ctgtcgccacagcagcggacacgtttaatggcaggcgcctctacagttacaagacatgcctgaggtcagttcgcccccttagggagcatgccccgagctaaacacagatgacagcgacccagggtgctggaggcccggggtcacctgaggactgcagaagtcctgcgctccgctaactgtgtggacacgcggctgccaggggcacaggtaggcaacatggatgggaagagagcccaggccgcccccgtctcacagctgcagagcacgcagaccacggcactgcaggccaaccaggcagagctgctggtgcgacacatcctggggctgggctggtcggggagaagctctccggctggacgctgcctgggcctgcccctgcagggcccgggaaccgagcccaggcctctgtttctctgagaggctggagcagagcccttggtggccctggaaagcggctgcaaggtggccttagtcaggggaggcacgcgggcgtcgcgtccagaatcttctgggctatggaggtgagtgcagcgaaggcggggctcccggggaactcctggatgaagtcgtggccctcctccagagtcctcatgagcgcagggtccaggggcacggagcctaagaagggcaccccggcgagctgggccagctcctctccgccgcccctggagaagacgctggtgcactccgtgcagtgtgggcacgtgaagccgctcatattctccacgattcccatcacccgcaagcccgtcttcctacagaaggtcagctcgcgcctcacgtcccccacggacaccgcctggggcgtggtgaccacgagggcccccaggggctggtagggacgcagggcttctatggtggccatgtgctcatcggaggtccccgggggcgtgtccaccaccaggtagtccagctccccccaggccacgtcggacacaaactgctttatcagcgcgtttttcttggggcctctccacaccacggcctcgtccggcttctc

SEQ ID NO: 469656 - DNA, 1000 bp, Homo Sapiens; identical to SEQ ID NO: 159000

SEQ ID NO: 469657 - DNA, 903 bp, Homo Sapiens
agtactcagtctcaggtattttttttccttttaaatttggttaattttctagttttctttttttttcaattctcccagatcctgatcaggtacttctttatagcaacacaagaacagcctaacacacaggattaagttgattccaggtaaataaattaagagaagcaatgactcgctggagacagcagcaaattcagcccagttttattgcaaataaaacaagtcattcaagtgaattgtggaaattgagggtgcacgtgaaggggtggcaagggaacgggactcttgaagatggtcagtgtttccttggtttgaacttcaaagccacactgttgatgcaaaacctctgaccattgggcccaggtccatcaggaaacacgtgacctagatgagcttcacactgcttgcagacaacctctgtgcgagctgatcctaacgaggtatccagacgtctcaggatccctgtgtggctttcatcagagccagacgtaccatgagcctcagaaaacgaaggccacccagtgccagagcagtactttttctcagaactgaagagtggactgtcgcagcacacgcaatgatacattcctgcttccttgttattcaggtagatcccactgaaaggcggttccgttcccttttctcttgtgacgtagaactgctccggggttagtttcttttgccactcactcttggcaagaggcagctcacacgttgcaagagaccctgcctcccccacgatccccgcggtgccgggcccgccgccgcccgcttggccccgcaccgcccgccgaggcgcagttccgagggtcaggccccggagcaaccagaggagccggccatgacgccgctccggcgctgccgccctctgccctctgcccgtctctgcccctgctcccatcc

SEQ ID NO: 469658 - DNA, 1000 bp, Homo Sapiens; identical to SEQ ID NO: 339270

SEQ ID NO: 469659 - DNA, 1000 bp, Homo Sapiens; identical to SEQ ID NO: 339271

SEQ ID NO: 469660 - DNA, 1000 bp, Homo Sapiens; identical to SEQ ID NO: 159001

SEQ ID NO: 469661 - DNA, 1000 bp, Homo Sapiens; identical to SEQ ID NO: 159002

SEQ ID NO: 469662 - DNA, 1000 bp, Homo Sapiens; identical to SEQ ID NO: 159003

SEQ ID NO: 469663 - DNA, 1000 bp, Homo Sapiens; identical to SEQ ID NO: 159004

SEQ ID NO: 469664 - DNA, 1000 bp, Homo Sapiens
gttagttgtttttgtttttaatttgtctccaataagcaatgtcttctgcccatccagcatgggaagtgggtcccacgtgaagggggcccaccacccactttgggagctgaaggcagagactcgggagccctcccggctcagactccccctacgctgggtgtgggttatattcagaggcccacacccacactggggtaggttaggtatggtttacttagccacaggcccccgggggcaggagacagagtgggggcccgaagctccctgtcctggaagagttaaaagttctggggtagccctggccccgtgggggcagttagagatgagggaggttactccttagcccaggagtggttagagacagtggggctggtagagatgcctgtttaagccttggcctctaggaggtgttagagatttgctggggttgggggccagggttgctgggaccccagttttggggagggagctgtaagagattgggggatgttctgagctccccagacaagaactgctggttaagagggggccaggcccggttggggctcagctgtccctgaggagctcggcatcccgcctgggagatgcagctgtcactggggtttctccctctctgttgtcctggcctcgtccttggcaggtggcggggacttcttgggggaagctgaagtgctggggttggggacccccgcccccgactgggcatctatgctggcgtgctccctccggacaaggtcctccagctccttcttccatccaaggagctcagcaagggccaggcagccctggtcgcattcacccagccaggccacgtccctgtaggccttcttggagtcaaagtccatgcctcctccgaggcccataatcatccccaggaaagggtccgactggccagctttctccttgttgatgagcaggcgaggggtggagaggggtgccttgctgatgagggaggcaaagggctgcacctgcaaggaggtacccatgaccaggaggaggt

SEQ ID NO: 469665 - DNA, 1000 bp, Homo Sapiens; identical to SEQ ID NO: 339274

SEQ ID NO: 469666 - DNA, 1000 bp, Homo Sapiens; identical to SEQ ID NO: 339276

SEQ ID NO: 469667 - DNA, 1000 bp, Homo Sapiens; identical to SEQ ID NO: 339279

SEQ ID NO: 469668 - DNA, 1000 bp, Homo Sapiens; identical to SEQ ID NO: 159005

SEQ ID NO: 469669 - DNA, 1000 bp, Homo Sapiens; identical to SEQ ID NO: 159006

SEQ ID NO: 469670 - DNA, 1000 bp, Homo Sapiens; identical to SEQ ID NO: 159007

SEQ ID NO: 469671 - DNA, 1000 bp, Homo Sapiens; identical to SEQ ID NO: 159008

SEQ ID NO: 469672 - DNA, 1000 bp, Homo Sapiens; identical to SEQ ID NO: 339284

SEQ ID NO: 469673 - DNA, 1000 bp, Homo Sapiens; identical to SEQ ID NO: 159011

SEQ ID NO: 469674 - DNA, 1000 bp, Homo Sapiens; identical to SEQ ID NO: 159012

SEQ ID NO: 469675 - DNA, 1000 bp, Homo Sapiens; identical to SEQ ID NO: 339288

SEQ ID NO: 469676 - DNA, 1000 bp, Homo Sapiens
tttttttttttttttttgccagagaatagtgtgttttatttcattttgaaaaacagactcacacagattgattcttcaggtcccccgacttggacctggcacaggaagaagtccaaacaactctgcatagttacattagtcgttttctggtgctgcagtcgctggatgcgggtagcagtgaaacattcccaagacaatcactaaacatgcagaatgccagccagaagcatgaatcactttcaggggtcttgctgcagggagcatgaggttgtattctgtgtgcattgacaactgtataggataagccagctgtgtccaagggagcaaagcaccccatattcttctgaacctaaaggggtttcctcctcaaagaagcatgttttcaatccctaaactttggggccagatacagctccaagtggcatttattgctctttggagagtcaaagccaagccaccatgagcacgaaagctgtctgagaccctcctcccctcctccccagcatggagagaataattgccatttcaccctacaaatccgaaagagtctcccccttccgtgggtttaagcatggacacaagccaagcaagcctcagatacccaggcctgtttgattgtagctatgttggtgtatctcgtgtacaagatggaaaagtgcttttgttgttctacctgatccagttgggggagcaggaatagggggtgcctgcctaacggcctctagcccatgtgcttatactgggatctgtcccgagggatctgcacctggttggcagtcattttgtggtggacgtggtaaatcgcgagtgttaccatgatgacgaggcccaagatgagccccaaaatcaggggcaaggtttcttccagttgctcccgctcatccactgggcatttatgctcttcactgaagacaaaatctgagataatgtcaaaaggttggatgtggaccgcagacaggatcatggtgaccgtcttctgcggatcactagaggccagtga

SEQ ID NO: 469677 - DNA, 1000 bp, Homo Sapiens; identical to SEQ ID NO: 159013

SEQ ID NO: 469678 - DNA, 1000 bp, Homo Sapiens; identical to SEQ ID NO: 159014

SEQ ID NO: 469679 - DNA, 1000 bp, Homo Sapiens
ctccaaggaggtccaggttgaaaaacaaactggtttttattctaaacacgtactagggcagcatgctggggggcctctcctgcctccagaggtgcccctgctccccactgtggccctctttagacagagtaggagctcgggctacccacatgcagcccagcccttagcacccaagggcctgcctgtgccccactctctgcctgggctagggaggcccaggaccctcggagtgggcaggcccaccctttccatgggtcaccagggtctcagtgcccacttgtcctccaaccaacagtgacacggcaccctccacacggcctgtggctgccagtgccaccaccgcctgctccgtagggaagcccatgcgctccagctgctgcagccgcagagaggagacagaggacttggacagccatggtgcgctctggggttcctgggctggcccgtcaagaagcgaggcctggatgccctcctgcagcatctgctcatccaaggccgcccacatcggagtccctggggagaagctggccccagcccagtccaggcctgcctctgaggagccctcccaggtgggctgcacaggcctcaggcttggtgggggcagggctgagtcttcccagtgggaccagaggtcaggggaggccacataaggcggtccagggatgggaggcctcactccggcaggatgggtgacaggcagctccgccaggctacccggggtggcaaggagcctcaggggccagcaccccgccaaggtcctgcacaagacgccctcctgcagcacctgcagccgtcgctctgagggttccagccaccggaaggccccagctgcataggccaggccggcaaggaggccgcaaaggagctgcaggaagggtggctcagagctgagcagtggggtcagggcaagcagcagccacggcgacagccacggtggcagtgccccacggggccgtctagggcggtgtccctccccagccagcatggccaggtggacagg

SEQ ID NO: 469680 - DNA, 1000 bp, Homo Sapiens
tttttttttttttttttttttttacagacaagttatttacttattataaccctgggccctttttgccctggaaagtgggggtgggccagggggcaggccagcatgcacccccatttctttgggggctgatccctcccccagctctgctgggtcccggggccacagcgtcaggccggtgggggtggaggtagaggtgggagagcaggggagagagcctgaggagccacaatggggcagacagaagcgggggtgcggggacagggaccgtgacccagagcacctgggtccgcgggggcccagcaggccttggcctgcccactggatcgggcctcagagcaggcggcaggcgttgcccacgctgtcagctgaggtgtcaaggtcatgaatgtaaggggagtcccagtccctcaggaaaatggcctccagctggctccgcaggccgcccctcccattctgcgtcaccagcagcgaggtgcccgccgtctccgtgaagtagttgccagaccagttggaggttccgatgtaggtggcgcgttcagtcaccatgtacttgttgtggttgacacgggcatatgggattcgagcctgggcctcatccgcggggaccacaaagagtttcacctggatgtcagagtgggtatggttgtcacgcagggcagccagagagagcaggaaggcccgcatggatggctccgagtgtccccagcagctgatgagcaggcgcaccttgacgccacgctcgtaggtggcccgccgcagcccatcgtcaatggcaggccagaacctgtgagggtgggagaactccagagtgggcaggtagttcatgacagcgacgtagatgaaactccgggcattgtccaccacgttgagtagagccttcaggtctggagtgcggccacttggacacaggggtgggggcgcactcgccaggtaggccagagcaggggttccattgaggcagatctccattggtgtctcttggttgtagcgggtgtcatag

SEQ ID NO: 469681 - DNA, 1000 bp, Homo Sapiens; identical to SEQ ID NO: 339292

SEQ ID NO: 469682 - DNA, 1000 bp, Homo Sapiens; identical to SEQ ID NO: 339293

SEQ ID NO: 469683 - DNA, 1000 bp, Homo Sapiens
ttttttttttttttttttgaggaggaaagcaccacagtttaatggaggaagcatcttctacagacacccagacatcttcctgcacctgacccatgcttcttccccttgatattctcagcagacacttccccaactgctgccccagtcttccagaacctcctcagatcatcagatctgttcccaaggctccaccactctgaagggtgcattgtcctttctgctgtttgcctcctggctgcaccttggggggcttctctggctgtgctgagcctcaaataacagaatcccgaggaacagcaggaccaagccagccacacccatgcggatgagattctccactgtgtaatcctggaggtgtggggcagtcttggaatctgacttcttttgtgctggattgagggtctcagttgctcctgagaccacgagctccaggggctcactggggtgagacagcaggtaggggttggagctgcgtgagccgtagcacctgtaggtccccgcgtgggctgaggtcacaggactcatggggaattcagcctggtacttatgagctccgtacattgatctcagacgcaacgggggatgggctgccccctccttggtcagaaggaaagtgaacatcgggtcccatgactgacacagcagggtcaccttctctcctgaggtcaccgtggggcccggctgcactgagagggagggtctgtcagagatctgtcctgcgatcaggatgtccagggggtcactgggggccgaccactcggaggagacgttgtgtgcgccgtagcatctgtactggcccccgtaggagcggctcacagggctcagggtgaagttggcctgggagagcccagcctggggctgccggccagggcgctgggggaggccatcggccccctccttgtacagagtgtatctgatgtagccgacatcagagccacactggagggtcagattctctccgggggtcacgacagggccctgcagggtcaggagggagggc

SEQ ID NO: 469684 - DNA, 1000 bp, Homo Sapiens; identical to SEQ ID NO: 339294

SEQ ID NO: 469685 - DNA, 1000 bp, Homo Sapiens; identical to SEQ ID NO: 339295

SEQ ID NO: 469686 - DNA, 1000 bp, Homo Sapiens
acaatggaagccaattacattgaattacaattattactatatattaaattgaaacaaaattgagatgcagtaatatatgggctttttaattaatacatcaacttacaggatctgctatcattccaagaggtgacaaatatgaacaatacttcaagatgccctttttatgttacattacagttgctgtaactggtttgtattggtgggaaaatcccaggtactgcttttactactgtgatttgttgccagcatttataacttgggagtaaggctaaatttcagtttcattgctgaaaataaagatgtaacattttcttccatcaagttcatggttacccctggcttctatccaggttaagaatccctgcctttagggaaaattctggacataatcaggacactcctgaagaggtttaaagaagaggtaagacctcactcaagaattcccactgcagtacagacagactttcatggtttctttccttgttgtcttcagggttgttgcagatccctcctcagggcttgtttgtccaggcctcgttgatgagatgatattttgaaaacaagttcatcaacaagttccggttttcctgacattgagcagtttctgagttgtatcagtttgccagcgtaatgggttaaggtgaacaactcatttcattgtcttccatctcaggggccagcagggtgtggcactgaggggcggccaggggctggggaaacgtgtccactctgctgatggggcagtcctgggggcggatctccttggccagctgccccttcctcttcaacgtgcaggcctcctggtatggtggcgagatggggggctgtgtgggtggagtgtacttgtactctgagccgccctctaggtccagtgggtaactgcggtccgaatcataggagctcaggtccccacaggtcacaaaaggcacaatgatgcgggtgggaccatccagctggttgaaatctgggtcgtaagaatggtccagcaggggtttgc

SEQ ID NO: 469687 - DNA, 1000 bp, Homo Sapiens
gtcctgttcaagcatgcacatgttttatttaagtattctccaaaggtctatttttttccagcataatgcagatattatgctatcctttgaaataagatatatgaatttcaaacaaaattgtcaaaaacaatgaccttagttactccatatggtacacagaaataattacatttcacttacaatacagatgcacttaacacagtcatcaatagtcattcaccaccaacacggtatatttttaaatcacctaaaacatcaaaaagttttttttcttttccaaaagcctaataaaattaataattttgggtaagtgataaatcaaaagaggaggcagaattgtcaattgaaataacctaactgcattttcttgtatgtaatattaagaacatgaaaatagaacttctcattgggaatcaaaagacatagtaattctgattatggtttccttagtctactttttagaaggttttcaataaatgccatcagataagtttcactagacattgctctagaagcataaactgacatgaggcaggtgttaatataattgttaatatttgtactgctggaaaattagtaactttttaaaagatgtactaggaatgaagccagttcttcccaagagatagttgagtttatcttactttcactcagcaaatgtttattaagatctaatatgtgcatagcactgttctagaaactattctagaaatgggaagcaagaatttctggctttactagaaaatggttggattaatccctttttatgattaaatatcataagcatttaaaaatctcatctctgacagagggataattattagctctttccatgtacagaagctaagctttattccttacagtggtggcttggaatgaataaaaactttgcatttgacattaaacttttttacactgtcatgtgcagacatgtctgctgaaatattttaagggtgaaaagttataaagacttttcacttaaatgtacagagatcaactt

SEQ ID NO: 469688 - DNA, 1000 bp, Homo Sapiens
attttattttttttttttaatataaaaatttggggacaggtagaggcaggggcacatgcaggggatggcaaagctcttccttgtcctcaggcctctgcccccagcctgcagagggagaccgggaggtcagaggagcaggccgaggagaggcctgccccagggatccagcctatcctctctgagagtcaggagccaggtcctcctttgcttccaggctccctgccctgagccagcgggccgcatggagtccgtggggaggctgccaccctgccttcactctgaggttgggccgaacagcagatggcagcacacctggcaacgctgagttctagggctggtactcagacccctgtgccttcttcctgggtccactggactgtgccagagccatggcagccaataagcaccatctccaggctgtgggggtcccagggcaaggccaggccccctgaccctggtgggggctctccagtgctggtagcctcagcctggctcacaggctctgcgggcccagtcctagccccttcctcagaaggaggaggggaggcaggggtgctgggctcagagcagaggtctcctgaggcagggggctctgagtctgaggtggaggtccagaaagctgtggctcgaggccagggggagctctgagacgctgggggaccccagggccagggtgccatgaggggaggaggccccggacgagggtggggccaagtcccactcaagacagagccagctgggggctgcaggcagtaggaggatgccccagtgtccacacacagaggctgcagaagcccggaggtgctggctgggcacggcccctctcccgatgcccgagggcacggaccctccctgtggggcgccaggacaagctgcacagcctggcgaagtgactgcagtccttcccgcatctgcagcacctgctctgacagctctgtcaccgcctgccgaagcttgtccagtgtgtctgtgttccttgcctcgctgggcccatggggaa

SEQ ID NO: 469689 - DNA, 1000 bp, Homo Sapiens; identical to SEQ ID NO: 159015

SEQ ID NO: 469690 - DNA, 1000 bp, Homo Sapiens; identical to SEQ ID NO: 339297

SEQ ID NO: 469691 - DNA, 1000 bp, Homo Sapiens; identical to SEQ ID NO: 339298

SEQ ID NO: 469692 - DNA, 1000 bp, Homo Sapiens
ttttttttttttttttttttcagggtttaaatgatgtatctttattatactgaggttaaatcaaaaggaaatgtttcatataaaacactggggaaaatcactttaaaagagttatcctaaggattaaatctaaccttggaggtagaacagttatgaggcttctagcatcaataagacagctccatggggttaccgcagagagacaggcaagccataggctataggtgcagccccaataagatacttgagtcggggagcttggcgggcctggtttacatagtagagaaggggggcccctgggcctgctccaagccagccttgcagcagagcttccgtgtagcggtcaatgtcgcggtcagtcacatcccagagattacccagaaacaaggggcaaccagccatgatgtacttgagcacgatgccagccccctccaggtttccatgcacagccagggccgcactgctacagccaaacagcagggccactgcccgacagctcagccgcaggacagcctgcccatcaaggaagcgggcaccagccccatgccctgcatagatatacaaatcatgctttgtcagggcttcctgcacctgttcaggtcttggcacctccccaaccactcctctccagccagcttcactgctgaaattggctcgaaattgctcctctgtgcttgacaggttattgtgagggttcaggacatagaaggtacttcgtggatccaccccttgactcagcactggcgaggccccatactctttgatgatggagtagctgagtaggaagcggaaggagggcagccgggtgacaggcagtgcttggaggctgggcatgctttcccacggcagcttctgcaagtccttgtctaggaccaagacaaggtggctattgcttggtactgtcaggccctgtagacgtcctactgcctcattcaggagctcctgggctcgctctggctgggttgggcacagcccgtaggccagggcctgaatgtcctga

SEQ ID NO: 469693 - DNA, 1000 bp, Homo Sapiens; identical to SEQ ID NO: 339300

SEQ ID NO: 469694 - DNA, 1000 bp, Homo Sapiens; identical to SEQ ID NO: 339301

SEQ ID NO: 469695 - DNA, 1000 bp, Homo Sapiens; identical to SEQ ID NO: 339302

SEQ ID NO: 469696 - DNA, 1000 bp, Homo Sapiens; identical to SEQ ID NO: 339303

SEQ ID NO: 469697 - DNA, 1000 bp, Homo Sapiens; identical to SEQ ID NO: 339304

SEQ ID NO: 469698 - DNA, 1000 bp, Homo Sapiens; identical to SEQ ID NO: 159016

SEQ ID NO: 469699 - DNA, 1000 bp, Homo Sapiens; identical to SEQ ID NO: 339306

SEQ ID NO: 469700 - DNA, 1000 bp, Homo Sapiens; identical to SEQ ID NO: 246481

SEQ ID NO: 469701 - DNA, 1000 bp, Homo Sapiens; identical to SEQ ID NO: 246482

SEQ ID NO: 469702 - DNA, 1000 bp, Homo Sapiens; identical to SEQ ID NO: 159017

SEQ ID NO: 469703 - DNA, 1000 bp, Homo Sapiens; identical to SEQ ID NO: 159018

SEQ ID NO: 469704 - DNA, 1000 bp, Homo Sapiens; identical to SEQ ID NO: 246483

SEQ ID NO: 469705 - DNA, 1000 bp, Homo Sapiens; identical to SEQ ID NO: 339311

SEQ ID NO: 469706 - DNA, 1000 bp, Homo Sapiens; identical to SEQ ID NO: 159019

SEQ ID NO: 469707 - DNA, 1000 bp, Homo Sapiens; identical to SEQ ID NO: 339313

SEQ ID NO: 469708 - DNA, 1000 bp, Homo Sapiens
ttttttttttctttttttagtgcttgatatttattgaaaataatgccaatgctttttccaggtagtattgaggagctgggctgagtgcttgtttgttttgtttttaagtactatttgtccaaatgcacacatctgtgggactgctgcaattttgaaagaaaaatgacagctgtgtaaaaccagtgcataggaaaaaagaagtgtcaacaatttggctgccaggcacaccgcgcccctgcagcaatctggtggggcaggggaggacactcggagtaggtagaaaactaaccaggctgaacggccccttcaggggttggtgagctgtccaaatcaatgtctgaaaaggcatagccaactctggcattttccaggttggtcctgatctcgaaaggtggtagtctgtaggtgggatgtggtgagtggatgtgaagtggcagcatagttctctgggaagatgtaagcctggcagcagggcaggtggcagcagcagggctatgggtggtctgcgcagtttgtaacaggggcctggccaatagctggggttcaggacacagttcagattagcaggggagggatcccggggatggccagggtagatgacacttccaagcacttccgagtgagtgaggctccagccccgaccccagcagcaggtaactggagcgctattcctggaacaaagacaagcactacggagaaatgaagagagagagcagacgggcgcgggtaggtaaggggaccggagggcaagggggagagcagtggctcctggcggggtgagggctgcggggagggggtggcggcgtgcagggccctcccccccgaggcccgagggtcgagggcctaataatcatcctcctcttcttcgtcgtcgtcgtcttcgtcgtcatcccagccaaagcactgtttcatctcatcgaggaaggcccggtaatcacctaggatggggctatccatctcgatgtagggcaccacccactcctcggcttccccggtgagg

SEQ ID NO: 469709 - DNA, 1000 bp, Homo Sapiens; identical to SEQ ID NO: 159020

SEQ ID NO: 469710 - DNA, 1000 bp, Homo Sapiens; identical to SEQ ID NO: 339315

SEQ ID NO: 469711 - DNA, 1000 bp, Homo Sapiens
tttttttttttttttttttttttttttttttttttttttttttacagcatccagagtacttttattgccagaatccagatacagcctgctcagagccccatgtggggccactcaggaacaaggggagacagatgccaggcatgtatgcaacagagaaaatccagctgcacagaaaccctgtgggagagcagctcagtccagcgtgaaggcgtctttgggaaccccacctagaggctgtacccttttctcggcctgtggccagtcacccacttagagcctactgccatgaaggcagccctgactctccatgcctgctgccacagggagatccatggagcaccctggggcagacagaaagcccctaggggggcctcaggggacccctggctctctcagggtcccattcaagtttctgggctagtcccagcactaagctgggtgctggccagggtggataggagccccatcctcagccctgtgctgacccacttggtactagtgagaccctagggcagggtggcagtgtgatggtggggttagcaagaggtgcagctcagggaagctgcgagcagccttggctgcttccttggattccctttctccataggttcccagaaggccatggctccaacccctgctctcatccttggaaccacagtcccagggtgaagggaggcagcttcagtcctggggccaatagcacatccgaggaaatcagggcccctggaacacagcctgcgggactgggggcacatctgctgcccaatccagagcttgaatgctcctggtggtaagggaggtaggagtggagtgagatgtcccagggcctgggaaccacgaagaacgcaacaaactgcccctgcctgcaggagctactaggctcgcccaggaagccagtcaggctggccaccagctaagccacagggaagccagcagctctagctacccatgaccagtggcaggcctatctgtggctggtgtgtgggaagggtcacccgag

SEQ ID NO: 469712 - DNA, 1000 bp, Homo Sapiens; identical to SEQ ID NO: 339318

SEQ ID NO: 469713 - DNA, 1000 bp, Homo Sapiens
tttttgaaatacagaattttatttagaaactgtttaaagtagaaaaaaaccctgtcaagaaagaccaggtggaaaatgggttcccaataaaatggaattttagggcaacaaaagtctaaaaggccacaaaagagaaatagcaccactgtcatttgaacaatggctagttacttgcattttttggcattgttaatcactgaatctgggttttcctctgaattccacacagagcatgcactacacaacatttttatcataaaatacttgctttctacacacatttcaggacaagctaccaccagaaacaaatcaatacaaatacatcaggggctgaacaatctcagtagtgggtgagacacattttgcagaatcctgccaaacaaaggaactgaataggctgtgggcaaagcaaatgagggagagttaaggaatgaagtattttaaatattaataattaattcagacacggtactgtattttccgcaaaagaaaattaacatttagtaacacactaatgaattttatctccaaagagattagtgcactggcaaagtattcggattacagtggagagctgtgaacagcagataccgaaaacaccccagcctggcagatcccaaggtaacgatggccttcactgaccactccctttgccagaggtccagaaagaacttgcagcatgatcacctgcctgctgcacttccaactctaagcagcaaacttcaaggagccaaagaggagtcccagtgggcaaggggagcagagaagagaaacgtggtaaatgtaaacctaaaagacagtaaaatgggatacaatccccattcaaatcccagagatgtgggcaagtccccaaaagtagttgttagattaaaaaactgggcacacctcacttccccaaaaaataatacatagaaatttcgggataactggaaaaatagagaaatgctcaatgaaaccaagctcttcaactgtaacatctcagggctgaaacacatcctct

SEQ ID NO: 469714 - DNA, 1000 bp, Homo Sapiens; identical to SEQ ID NO: 339319

SEQ ID NO: 469715 - DNA, 1000 bp, Homo Sapiens; identical to SEQ ID NO: 339321

SEQ ID NO: 469716 - DNA, 1000 bp, Homo Sapiens; identical to SEQ ID NO: 339322

SEQ ID NO: 469717 - DNA, 1000 bp, Homo Sapiens; identical to SEQ ID NO: 159022

SEQ ID NO: 469718 - DNA, 1000 bp, Homo Sapiens; identical to SEQ ID NO: 339325

SEQ ID NO: 469719 - DNA, 1000 bp, Homo Sapiens; identical to SEQ ID NO: 339326

SEQ ID NO: 469720 - DNA, 1000 bp, Homo Sapiens
ttttttttttttttttttttttttttttttttttttcacctggcaaaggtttattgccttagtgatgacagaatgagcaaagtcacgcttgttaaggacccccccctccccaactgtgcctggcactttgccaacagcacaggactcaagacccatttcttaatcacatggcagttgggaggtagattctgctgttagtcccctttgacacacacagaaatggagaatgggcagcaggtgtgatgttggaggaagaccagggcccaggggcgggggctgcagcagtgacctggtgacccagggcctgggcaggactggaggccaaaggactggacttttaggctattgcagcccaggtaaacgaggctctcattggcagggcctggctccccaccaggccggcaggcagataggcgggcgaaagagaaggcagtatcccagggcccagctcagatcttctccacgtagtttcctgggaaaaggccctcctggccgtgaagccggcccttccaccagcccgagggatcttccatgaggatctcaatgacctcgttcacgttgaagctcagctcgtccacatcttggcccacgtactggtatagggcccggcacctgggaccatgtgtccgaggctggggcttgggtcggcccacaccaggcactggccgttgccccacgctgcgcttcctctgcatgccggccatgccctggtcaggcacgttgaggaattctgtgttgtgctctgagggcggacgtgcccggggtcgtctgctggctcccagggatgtggacggagggccccggggaggcctgtgggtgccccctccagacatgatctccaggggcagggggccccctctggcagaggggggcaccccattgcgatccatgcctctggggggcgcaggggccgcccgggtaggggcttgggacgacctccgaggttttcccttggccattcccttccgcgtaggcttggagctcttgggcagcccatcgc

SEQ ID NO: 469721 - DNA, 1000 bp, Homo Sapiens; identical to SEQ ID NO: 159023

SEQ ID NO: 469722 - DNA, 1000 bp, Homo Sapiens
tttttttttttttttttttttttttttagtcaagtagatttaatctgtaactatgaaatgtctaggttagcagcaattatggatgcccagagactgggcagaatctgtcccccgaaggcatcctgagggccacgaaggctcccctcagttcacagaggtagctggcaggatgttagctttgcgctcagcttcaatgcagtacttctcgggaaggccagtggctctcagctcttcaagctttttcctcttgatctcatcgatgcgctcacggcgtttctgggcctcctctttgaggcgccggcccccctcaaaggtggcaatccggttctgcacttccttctgctggttctcgcgcacctggcgccggagctcattggcatgctgtaagcgccctgtggcctttttctcctcctccagccgctccttctcaatctgttctctctgagcccgaagaatcctctcgaactcatcccggtcccgtgcacctgaacagccagagcgtgctccttgaaagccacctgttcgagccgactttttcgcagctcagcctctgtttccatcttcttccgcgcattttccttttcctttctgcgccactctctgtctgcaacctcctggttgcgcttggcccgcaaggcatcctgttctgcctggtaatcctgggccttctcctgcatggccctcaagcgtgcgatctccttctctttctccctccggattctctcctgctcagcctcaaactctgcttctcgagccatcttcttcttggtaaactccatcaccatctggtctgccagcttctcctgagccagcagttctgctttctgtttctggttttcatcattgatgcgcttaatctcagcttgcatcttcagtttttgttgctgccttcgttccatgtcctttagatcttcctcttggagctgttccatatattccagcatctgctccttctcctgctcccgctgctcagcaagcagcgatcgctcctcctggttct

SEQ ID NO: 469723 - DNA, 1000 bp, Homo Sapiens
tttttttttttttttttactctctagaaaatatttattgacacattttaattttctttccatattctgagaaataaacaaaatacacaaaatacagtaaaatgcacttttcccatttcaaataaatatactatactcttgtaaaaaaatttaataatctgtgtaatttgccacagtatattaatcagtgaaataaaacaaagaatctctaaattgtcacatgttttaatgattctcacaagcatttttctggagaaaaagaacactattttctgtagaatttatattgacttggagactattgcttcttgtttggagaaggcaaagataagctttttaaaaagtgtttagtgtcaaaaagagtcttcatttgggagaaaaacagcatacaagtcctttctgaatcaactaagttatgtgcaaattttcttattaatacttcctaaagaccagactacattctgaataatgattcctatgtatcacactggtaattttcaaaattagtggttaagtatttaaataacagttatatgtgtaatataagcccaggacagaatagtaaagctttattaacaggaaaggctaaaaataatgatgctatacaggacaaattttccttttcataatggttattcttaacattatcagaactgaaatcgactgaattatacagatttaacacagacttatatacaaaaaatccctgatcagcttaagacaatgtgttagcttgctcttttaagtggtaagaatattttagtaaccagcaaaaatcacatttaggtagtcaccaatattgaaagttttctgatatataatttatttagcatcagaagaatagatcgctgagtaataaaagttattagtattttctaacttcctatgttagcatttaattagtactttatatactagttggtagaagtaaatcaacctttactatggctccagtcccaccatatgtgactcgtttgcatggatgcggaaatgctaatcaa

SEQ ID NO: 469724 - DNA, 1000 bp, Homo Sapiens; identical to SEQ ID NO: 159024

SEQ ID NO: 469725 - DNA, 1000 bp, Homo Sapiens; identical to SEQ ID NO: 159025

SEQ ID NO: 469726 - DNA, 1000 bp, Homo Sapiens; identical to SEQ ID NO: 339328

SEQ ID NO: 469727 - DNA, 1000 bp, Homo Sapiens
cgtgccagcaaaaatttattgagcatctactacgcaccaggttctgtgctaagcactttagtctcaggcaacactaagagatgggtgctgttctttatctccactacacagacgagggagcctgaggctaggaggggtcacgtggcttccctgcgcttgatggttctcagcagagcaggggttgatagaagtcgccctggctgcgaagcttgaatgattagtgatgaggttgctcacctgctttgccaggtgactaagcagctggtcattttgcttgttctgttcattcttgcattacattcaggtccgggtttctgggggatccccaaagcctgaagctgtatccattagggtgggactctggggcttcgggggtaaccgcttcatggggtggtgctctccacacagggagctgacggcttccaggaagagttttctgaaggaggaggacacggcgttgtagagaagaggagtcacagctgagctgacgtagaaaagtgtgttggtcaccatgtagaagtagtggtagaaattgtacagtgggtcagtccacgcgtcatcaggtacgtagcagtacatgagcctgcgggcatggtacggcagccagcagatgacatacatgaccacgatggctctgagaacctggacgctgcgctggaggctgcggatccggcgcacgtctttatgtctcaccaggctgacctggcctccctggataaaggtcttcttccatacgatgaagctgaggagaccctcctcactcagcagctccaggcggctgggggtggagctgcccggggtagaagtggacggcacttgggagcagagggccagcaggtggctcactgtgaccccattcaggaaagcagttagtgccaaggggagcacgaaggacaccagcacattcacctggataaagacttggagcgcggtgcggctcaccagcaccgtgcacactcgcgaggcgggctccggctccccgtccgccgtctcgagttcg

SEQ ID NO: 469728 - DNA, 1000 bp, Homo Sapiens; identical to SEQ ID NO: 159027

SEQ ID NO: 469729 - DNA, 1000 bp, Homo Sapiens
tttttttttttttttttggtttcacaatacatttatttagaaaagcaacatacagtaataggtatttcagagaattcagcaaagtataaagacaaatacaaaagatgcttgggatacaaccgctagcttctgccttccacacacagtggattttactgtaactgactagagttactctggtgccactaagttccgagccaagtctacggccaccactggaagctgtggctatttctgtggactgacgttacactgggcttcattgttctttcatttaacaaatgtgacagggaccgggctggggacacacggggaacgacagtgggtctctgcccatgggaactcacaatctaacagcgagacgaggcacaaacggctagcacaggatagcataacaagtgccacccaaggtacaggctcagggtgctacggggacctgcaagaaggccacctgagcttcgggtagctgggaaggcttcctggaggaggtgaggcccaaggtgggggtgagcctgggccaggcaaaaggcaggcctctcggcgcccatctgtggttcctcaacaccctgtgtgtgcaggcccctcagctgacctgtcttctgtgaaattcttgatcccgctctgttctattcacactgtgctgctttgccttggtggttagcatggttagctttcacaagcacaagctcacactcgaaaactaggctgctgtctcctgggagtttctttttttttttttttttttttgagacagagtctctgttgcctaggctggagtgcagtggtgtgatcttggttcactgcaacacctcctgggttcaagtgattctcctgcctcagcctcccgagtagctgagattgagatcacaggcgtccaccacacctgactaatttttgtatttttagtagagacggggtttcaccatgttggccaggctggtctcgaactcctgacctcaagtcatctgcccgccttggccacccaaagtgctgagattac

SEQ ID NO: 469730 - DNA, 1000 bp, Homo Sapiens; identical to SEQ ID NO: 159028

SEQ ID NO: 469731 - DNA, 719 bp, Homo Sapiens; identical to SEQ ID NO: 339332

SEQ ID NO: 469732 - DNA, 1000 bp, Homo Sapiens; identical to SEQ ID NO: 339333

SEQ ID NO: 469733 - DNA, 1000 bp, Homo Sapiens; identical to SEQ ID NO: 339334

SEQ ID NO: 469734 - DNA, 1000 bp, Homo Sapiens; identical to SEQ ID NO: 339335

SEQ ID NO: 469735 - DNA, 1000 bp, Homo Sapiens; identical to SEQ ID NO: 246484

SEQ ID NO: 469736 - DNA, 1000 bp, Homo Sapiens; identical to SEQ ID NO: 339338

SEQ ID NO: 469737 - DNA, 1000 bp, Homo Sapiens; identical to SEQ ID NO: 339339

SEQ ID NO: 469738 - DNA, 1000 bp, Homo Sapiens; identical to SEQ ID NO: 159029

SEQ ID NO: 469739 - DNA, 1000 bp, Homo Sapiens; identical to SEQ ID NO: 159030

SEQ ID NO: 469740 - DNA, 1000 bp, Homo Sapiens; identical to SEQ ID NO: 339342

SEQ ID NO: 469741 - DNA, 1000 bp, Homo Sapiens; identical to SEQ ID NO: 339343

SEQ ID NO: 469742 - DNA, 1000 bp, Homo Sapiens; identical to SEQ ID NO: 159031

SEQ ID NO: 469743 - DNA, 1000 bp, Homo Sapiens; identical to SEQ ID NO: 339346

SEQ ID NO: 469744 - DNA, 1000 bp, Homo Sapiens; identical to SEQ ID NO: 339347

SEQ ID NO: 469745 - DNA, 1000 bp, Homo Sapiens; identical to SEQ ID NO: 159032

SEQ ID NO: 469746 - DNA, 1000 bp, Homo Sapiens; identical to SEQ ID NO: 339348

SEQ ID NO: 469747 - DNA, 1000 bp, Homo Sapiens; identical to SEQ ID NO: 339349

SEQ ID NO: 469748 - DNA, 1000 bp, Homo Sapiens; identical to SEQ ID NO: 339350

SEQ ID NO: 469749 - DNA, 1000 bp, Homo Sapiens; identical to SEQ ID NO: 339352

SEQ ID NO: 469750 - DNA, 1000 bp, Homo Sapiens; identical to SEQ ID NO: 159033

SEQ ID NO: 469751 - DNA, 1000 bp, Homo Sapiens; identical to SEQ ID NO: 159034

SEQ ID NO: 469752 - DNA, 1000 bp, Homo Sapiens; identical to SEQ ID NO: 339356

SEQ ID NO: 469753 - DNA, 1000 bp, Homo Sapiens; identical to SEQ ID NO: 159035

SEQ ID NO: 469754 - DNA, 1000 bp, Homo Sapiens; identical to SEQ ID NO: 159036

SEQ ID NO: 469755 - DNA, 1000 bp, Homo Sapiens
ttttttttttttatcaatgttttatttttaaaaacaggtgaatccacttttttatacatcattgcacttcaatagttacacaaaacacacaagtacatgcatctacaattacgcaccgcatgagaaccgttaggttataaaatctatcatcaaccagtaaatcaatgtgaaaaaatacagtgtcaaaccaaaaagtataactatagttgcatagaatattaccatgctataacatttcaaggtcattggaaacaaaagaaaaattataaaagtttgccttgattgaatgaatgtacaagaataaggttcaacacatcagtgcaaaaggatttatgaatttacatgacttaacagaagaaaagataatcacttaaaaagcaatcatacgtatatactgcaattcattatacccattcagtggactgttccagcttattaaagtcacaggttaagcccttaaaattatagatttcagtttatattactcatctttatgtaccagaactgcacaatttcctcatctgacaacatacaataaggaatgaatatcagcagcttaaaaatgaaacaagcatttactttattttggatttctcccacccccaaaaatataaatatatatatatatatatttatatgctgtatatacctgtaggttttgctgtactttacaaaagtgtatcactagatggcagcagtgcattttagagctttgccaatttaacagctgcattaagtaaaaaatggcgcatgcatgatctgatcctcagaggaccttttcacttctatttaaatattttaacaaaggaaaaaaaaaagcaacattcacagcacatcaagcccaaaatagtttacaccttctacactgaagcattgtttaaaatgtacctggctagatcacccttacaggagaggctaaataaggcatgctttagacagtcattgtggtgttgctcacttgaaaggggagagaaccaaagaggtccaagcagaaaatttt

SEQ ID NO: 469756 - DNA, 1000 bp, Homo Sapiens; identical to SEQ ID NO: 159037

SEQ ID NO: 469757 - DNA, 1000 bp, Homo Sapiens; identical to SEQ ID NO: 339361

SEQ ID NO: 469758 - DNA, 1000 bp, Homo Sapiens; identical to SEQ ID NO: 159038

SEQ ID NO: 469759 - DNA, 1000 bp, Homo Sapiens; identical to SEQ ID NO: 159039

SEQ ID NO: 469760 - DNA, 1000 bp, Homo Sapiens; identical to SEQ ID NO: 339364

SEQ ID NO: 469761 - DNA, 1000 bp, Homo Sapiens; identical to SEQ ID NO: 339366

SEQ ID NO: 469762 - DNA, 1000 bp, Homo Sapiens; identical to SEQ ID NO: 159040

SEQ ID NO: 469763 - DNA, 1000 bp, Homo Sapiens; identical to SEQ ID NO: 339368

SEQ ID NO: 469764 - DNA, 1000 bp, Homo Sapiens; identical to SEQ ID NO: 339369

SEQ ID NO: 469765 - DNA, 1000 bp, Homo Sapiens; identical to SEQ ID NO: 339370

SEQ ID NO: 469766 - DNA, 1000 bp, Homo Sapiens; identical to SEQ ID NO: 159041

SEQ ID NO: 469767 - DNA, 1000 bp, Homo Sapiens; identical to SEQ ID NO: 339372

SEQ ID NO: 469768 - DNA, 1000 bp, Homo Sapiens; identical to SEQ ID NO: 339373

SEQ ID NO: 469769 - DNA, 1000 bp, Homo Sapiens; identical to SEQ ID NO: 339374

SEQ ID NO: 469770 - DNA, 1000 bp, Homo Sapiens
tgtgacttattttccttttactatacagcttggcagagaaaataaatatcatcaaataagatacagtacaagctttcttttaatatatactgtatagatagttatgacatgtttagtataaacagcatctattacaatctatcttacaaaaatgaagtatctgcacattttgcccctaaaccacattaaaataacttaaatatgctttaaataaagcaaaaactaacaaacagctgaaagaaaatgcccagaggattttaaaaaatggccctttgaaaactattaatcacgacttccccagccttactttttccacataacttaattattagaatgtaattttaaggatcctaaatcatttgatacctgctcaaagtggatataaactaagtaatttacagattctgaccagtttcatctaggtttctgatccacaataaattaaaataacttaaatctttacaaccattttgtgggaaaatgtatactgcacaaaacccaggaatgaacagtttttttttttttttttttttgcaatttccactttaccaccagtttaaaagtaaaatgaggaatttaacccatatctggattgaatcatactatgattttccgtggctctctgtttcataaaaacactcctcactgacaacagatgttaaactctggacactgaattctcgctctagaacagaatttaggtcgatggtggcattttcagactgactgtcaagggactggtgacggatctgcgccttgagcaaagttcctctgtccctcttggtgctgttggcttttcgtttaatggggcagaagtgcccccggaccagtttgggctgctctcctcctttctgaccctcacccgactccgggccaggctgctgctcagcctcggggtgaacgtctgggtcctcggaaatcctcagtctctggaactgaatttcgatgtctttagtagggctgccctgcttcacagtctgacggtggtcatcatcttcat

SEQ ID NO: 469771 - DNA, 1000 bp, Homo Sapiens; identical to SEQ ID NO: 159042

SEQ ID NO: 469772 - DNA, 658 bp, Homo Sapiens; identical to SEQ ID NO: 339376

SEQ ID NO: 469773 - DNA, 1000 bp, Homo Sapiens; identical to SEQ ID NO: 159043

SEQ ID NO: 469774 - DNA, 1000 bp, Homo Sapiens; identical to SEQ ID NO: 339379

SEQ ID NO: 469775 - DNA, 1000 bp, Homo Sapiens; identical to SEQ ID NO: 159044

SEQ ID NO: 469776 - DNA, 1000 bp, Homo Sapiens; identical to SEQ ID NO: 339381

SEQ ID NO: 469777 - DNA, 1000 bp, Homo Sapiens; identical to SEQ ID NO: 339382

SEQ ID NO: 469778 - DNA, 1000 bp, Homo Sapiens
ttttttttttttttttttttttttttttggtgagtgttacacatttactcactcgagatatacatgtatagaatttggttttgtttgggatttttaaaaaaagtattctctccctctgtcctcctcctcctctggttgttccccagcactgtgaatagctccaggagcctttagtgtttgagggggcagcttcctgtgctgctctttttggggtctccctccttctgccttttgtcacctttcatttcttcaataaatatttatcgggctcccactttgtgctggcacagtcctggatgcagcagatccagaggcgaatgagacaggcacgtgcctctctgcttcatccacgtcctttctgcactctcacctccccagcttctgttgtaactccaagaaggagaaggaaggaaaaaaggacgtgactcgaatctgcaatggcagctgctcttggcccagtgtgaatgtgtctgggatgtaaatctgttgtctctctgcagtttatcctttgcatggtcccctctccttgaatgtaggtatgacttgtgccttgcttctaacctgtagaaaacaggacaaaggtgaccgggcgtggtggctcacgcctgtaatcccagcactttgggaggccgaggtaggcggatcacgaggtcaggagatggagtccatcctggctaacacggtgaaaccctgtctctactaaaaatacaaaaattagctgggtgtggtgtttatttatttatttatttatttttcaactgaaaaagcttagtagcccagccctgtggttatccactaactccaaagttatcaactagtgctcagctagttacctgcttataaacaccagaattctagctcagcttcagcaaagattagtcaatagctggcaaaaagaaacacagacagatggacaagagccagagaacaccagagacaagagcgaggctgattaggaggccagagctgcgaagccagacagccagcagcctctttccag

SEQ ID NO: 469779 - DNA, 1000 bp, Homo Sapiens
tttttttttttttttttttttttttttttttttctgacacgagacataaaaacttttaatgaaggaggacacagctcagagcccttccacatgcggcccaaccctgccccacggagaccggccatggcaaccgctcaatcagaaggtgttcttgatgcggccggccaccagcctaaggatgtccccgatcttcttctgccagttggcgatgtccttggacacggcgcaccacagctccccatgccgaggctctgcactctcacagcgcttcctcacctcctcctgctgctcctcagtgccatgctgcagctcaaacttgtagaagaaggcccaggcatcccccaggtccgagtcaatcttcacagtgcggtggaaccactccctggccttggtgatcttccgctgactccaaaacagcttggccacggccaggagcacatgggggtcatgctcacacttcttcagggcatccacgctcttggtcctcctctggggccttgcctcgaggaagatggcctcagaccacaggataccggagttggggcactcctgcagcgccttggccatgagtgtatttgcgatgttcttcagccccgcacggtactccagccgcacggactccaaccacagcccagggttctttgggttcttcagacgagacttttccaaaatggcccgtgctcgagtaagctgcccaatcttctcctccagccgagagagcaaaagccacaggggtgtggagtggggacacttcttcaacccctggttataggcttcccgcgccttctccatcatctccttctgctcctcgatctgccccttcatcatccacagcttggggaagtcctcatagtgccgcagggcctcctcgcacagatcttgggctgccctgatgttgtcttgcacccactccagcttcacagacttcatgaacacccgggcggtgggggcactgctccgcgccttggccagcagcctccgggcccgctcgtactcatca

SEQ ID NO: 469780 - DNA, 1000 bp, Homo Sapiens; identical to SEQ ID NO: 339383

SEQ ID NO: 469781 - DNA, 1000 bp, Homo Sapiens
gtgctgttaatatgagttaggaatgtagcccaggttctattattattcaaagtgaatttgacaatttgaaaagctgaatctgtaactttagaaacctttctggaaagtaacctgtgattaaatgtcaaggccattttatgacagtcttagcgacgcaggggagaaattgatttgagtaaataaccacttcagatatgatcaaggaattattttcggacaacctcttgccaaatgggtcttgatgcagctttttcacttgatcactttttcctggatatgaggctttattcttcaaaacctcctcctatttctggcccctccccctccattttgctcttctccaggctagagacaaagatgggaatccattcaaataacagaaaccacacttatcaaaagctagtttggaggcatatttgcagttcgaaagttcctcatttctcttacttttatcagaaattacatacattaatctaaatggattcctattggtgttgacattaaaaaaaacagcgtgacacctattttacttttctgggctacacactatttatgtaatctctaggactcagacctagagttgtttcaggtcatatgttagagtctaaactgaggaaacctttgtgctaatgttggtaaaagccgtccttgctcagcaggttctcagtggttatcaggtctagaatgatgaccatatgcattatggactttattttttaacttgaaccactgtattctgatgaggtactcttaagctgtggaaaagaatttgtttggatgtataaatgtagctttcttggaagacagtagaatttggatcacgtttataattccatgaatccactagggttgttatgatatatatctaacataatttacacatgcaattccactgcccccaatgaatattaaaactgcaacctgaattaggttatctatacctaaagttgccatttttataaagcagttaattaaaatgaagatgctcttttctcatatt

SEQ ID NO: 469782 - DNA, 1000 bp, Homo Sapiens; identical to SEQ ID NO: 159047

SEQ ID NO: 469783 - DNA, 1000 bp, Homo Sapiens; identical to SEQ ID NO: 339385

SEQ ID NO: 469784 - DNA, 1000 bp, Homo Sapiens; identical to SEQ ID NO: 159049

SEQ ID NO: 469785 - DNA, 1000 bp, Homo Sapiens
tttgttttctgttggtgctgccaaacaatttccccctttatacccttgctctgccaaccttgaccaaaggaaagcgatgtcatcatccacagtggataaatttctggagtttcgatgatggtctatatttaaaaccatgagttcttctggcatagattttcttctatagacaactggtttagcccaaagcagctcagcttttcactggagatgggaaggtaaaggacagaagcagaagtgccatcagatgacattttttaaaaatgttgtgataggaaatggatctgatgcttggagaatggggtcttcagttactcgtaacagatacttattttatggctgttcttttacttactcttagactgtcatttagattagggagattagatcttaacccttcagcctgtgaagggcagaagggtgaggcttcccagcaaggtcagctggtcagctcttcctctttgtggatttgcatgtatgactgaaaggcttttccacgtgtggttgatatatctcagaaagaatgtttcatatagcacatctccgggaccactcattccactgctgtagaagataatgaccaaatacctttttggcttttaaattccataaaattcaagtccctgatgggaaaacaaaggtttcacaaaagtaataatatgctagacctgcgaataatttctgaaggaagacagtgtttccctggctacccctgtgaacacagctaaaaatggtatgaaaagaagtttggaactgagtatgttttgagagcaatctgttaggcgaggtcattggtttttagaaacgatgctgaatacataggagcaatccctgagaccagatattcacttcagcagggctctgtgttctcctctggctatgtgagacgagaactcataccgatcatggcttcgatatccacacatgttacactcgaaagggtcacggaagccgtggcagcccatgtgaatcgtgaacatcacatagtccaggaagagga

SEQ ID NO: 469786 - DNA, 1000 bp, Homo Sapiens
ttttttttttttttttcttttattaaagctatcattccaggctttgatcaaagatccaagaatatttgttctaccaggctggaatgaatgtggtttggaagttcagagtacatttaaaagctgcaacaaaatataggtagccaacaatctcagaattttggatcagcccagatggagatagcaatttgaaatgtcttcgatcccttacttaaatgacgaaatgtctatcagcccagatagagcaatttgaaatgttttcgatcccttacttaaatgatgaaatgtatatcatactatctgtaaattggatattccattacagtgataacgtacagaattcccatgcgttattacactttcctgagagtaaagcaattagaataaccttaatcctagcaacaaagttttttttgtaggttttttttttttggtttttttttgtctttttttttgcgtttaaaacatttgggctattccctgacgatctatacatgtaaatttgattgctaaacattgtcactttgaatgtcaaactatttttaatctattgattttgattaaaaatcataatacaaacagagctaaaatcacgctaacaaaataaactaaatatgaaaagttgcattgaaagggcatcacattattcttaataggatcgtgtagaaacattccaatggcagtgttctcaaaataaaacaaaattacattagaagacctccagcctggccacttttgggaccttacctgtaactctggctggtgggtgtctttactcttgtactacatggctcacttacatcagacatcatatttgtataccctgagaaatctgacactgaagtccttactctatggtccacttctccattagagttagtgataaaggtcattggcaccctgctgcccgacttaaactgagaaccaaacgcttgtgcaaagttctcaatctgatacgttgttctaggctctatgtctttctgaggatctatctggctagcta

SEQ ID NO: 469787 - DNA, 1000 bp, Homo Sapiens; identical to SEQ ID NO: 159050

SEQ ID NO: 469788 - DNA, 1000 bp, Homo Sapiens; identical to SEQ ID NO: 339389

SEQ ID NO: 469789 - DNA, 1000 bp, Homo Sapiens; identical to SEQ ID NO: 339390

SEQ ID NO: 469790 - DNA, 1000 bp, Homo Sapiens; identical to SEQ ID NO: 339391

SEQ ID NO: 469791 - DNA, 1000 bp, Homo Sapiens; identical to SEQ ID NO: 339394

SEQ ID NO: 469792 - DNA, 1000 bp, Homo Sapiens
acattagacagcacatgggaaaacttttacttcattctcaacatgcttaagctatttttacaaatcagttaaactatgtctacacaaagcttagaagcactttatttgggagcaatcagtatttttgtcaaaacttttggacaggtctttatttttgttttggaaggttcaacacgaattgtgcaaaatctctggatatattagtttagcgatatggttgttgaagaaaataatatgttttaagcattcacaacgtgacctccccctagagcttttgttgatgatatgaatgatctggattcagtgagttcagtggtcatttaatccagtcctacctctcatacagcagacagatagatagatgaacagacagacagataactagatgtcaaataaactcctgctccctaaaagtacttttgcaatttcagtgaagacatggctaaaactgagtggcacctttatgagactggtgctttttaaatcaaagaagatagaaatgtacctttaatctacggcactgcaccagagcagaacataagctattccttcccccatgacagaggcatgaagctggggaggacacaggcattcaccttgacacagaatgggtcctgggatgtctacttctgggatgaactggaacatgaagagttaagtgcccacatgttctctcaccaacctcactccctgccacattccaaagggatagggctcagtgacaagacagcccagtacccaaaatgaagagggagggttctcgaattaattaactggaaatgagtcttgtcaatgttttggaaaggcagaggggtgaaaagagattgctagaattaatcacagtgagaaactacttcaaccgcctgccagagttcagaaaacccaatgagaagaggaatataaagaatgatgctgacttgccatctgaagggacaaacacagtcaagccaacatccaagttttgtcaaataagggttgtgccctccaagagactggttta

SEQ ID NO: 469793 - DNA, 1000 bp, Homo Sapiens; identical to SEQ ID NO: 339395

SEQ ID NO: 469794 - DNA, 1000 bp, Homo Sapiens; identical to SEQ ID NO: 159052

SEQ ID NO: 469795 - DNA, 1000 bp, Homo Sapiens
ttttttttttttctgtgaataaataaaagtttatcattccgtacaaacgcactcattttccacaacagtttttacacgagccgcggtggcccggtggtggcacgtggggagcggccccgcggcggcgttctcgcgggcggcgtcacagcggctccaggtcctcgtccccgcatgcgtactcgtacaggtccacggcgcccagcggtgagggcgcctcgaagaagggcctctgggccagcggggagcgcagcgcactcagcttctgctccacagggctgagctcggcctcgaacccgtcctcccagggctctcccgcagtctcctcggccaccaggatgtcgtactcctcggccgcgtacttctcccagtccgagagctcggggccgccgctgtcaccgtccctgagcagggagatctgctctttctgctcgtggtcgaggtacttctcgatgttgaagaaggtgtcgaagaagacgttagccagcttgcagcgcttcaggtcctgcagcgtgatcttcccttcagtcctcggcttgaccaggtccagcatctggcagaggcagtcctggaagggcagggcctcgatggccatgctgtccagccttcggcactgctcctcgtagaagtactcgagctcgaacatggacagggcgccgtccccgtccaggtccatgcagcggaaccagtactcgatgctggtcggtgtttttttgtcttcctcagagatcaaaaaccagacaaagtcggcatagctgatcttcccttccttctgcacttttctgcctcgtgtgactgctcctgagaagatcctgtctatcatcttggtagaaagggcgtggtcattgtgccgcgccaggtcgtccgcgtcgatgagcaggtcgtggtccgtgtccagctcccagaacttgcagtagatgacgtagaaatgctcgtacgagaagaattcggtcagctggttgatgtccgcctcctcctccagcagcgccacattctgcaggaa

SEQ ID NO: 469796 - DNA, 924 bp, Homo Sapiens; identical to SEQ ID NO: 339397

SEQ ID NO: 469797 - DNA, 1000 bp, Homo Sapiens; identical to SEQ ID NO: 339398

SEQ ID NO: 469798 - DNA, 1000 bp, Homo Sapiens
tttttttttttttttttttacaaaccaggaatatatcactttattcatttccagattatgagtatgacacagcatatacatatatttagataatatataaaacatagaataaaccgcaggaagaaatattggtctggaattccttatgggccatctttaattctgtaagttcatggtaaaggtatctccccccacactggggcaggcggcggaataagctccagcgttcatgcgccactcacaggactgcttacccccactgcacttacaatgcagtcacagagttacggcatgttcaccggtgtccatgacaagcaacaccaagtataaataacagaactacagcagagcaaactaagataaatatgtttttgcatcgtcctccacatagtttccttttaaaaagaagagtcacatccaggggtctatccctcgagtcacaattccagttattgctttgccttgttctgaactgggagatacagtttgaactctgccggcagctcatcttctgagtagagtctgtctgagaagtaaacccgtcggatgcgacaatttgcatggatctgcactctgagggtctcgatgtaattggtgccgtatgctcgccgtgtgaagtctagcaagttgaactgaatctggttccagccgtcatccagccgcatgggcatggtgcagatgaagggtttgacccgggtggtgctctggtagttacttgcccgaaagcgacgacgcacattcttgtcatctagtacctgcacttcgaaggtaaaatacttcttcaggtttttgataatcatgacaaggaaaggaagtttaattcccagcgtcttcttggggtctgcagggcatgtgatatatgtggtgcttacatttgtcccttcaatctctagcaccagggactggatgtcattatcagtgattcttttgatgtggccattccgtacctttttgtcccagatttgcagaggcttgctgccgatgctgtagaggatggaga

SEQ ID NO: 469799 - DNA, 1000 bp, Homo Sapiens; identical to SEQ ID NO: 339399

SEQ ID NO: 469800 - DNA, 1000 bp, Homo Sapiens; identical to SEQ ID NO: 339400

SEQ ID NO: 469801 - DNA, 1000 bp, Homo Sapiens
ttttttttttttttttttttttttttttttttttttagctcaagaagggaaaaggatttattagaccatttccaggacagggacccaggggcagtggctgggttcagtgttctcacgctcagaggaagaaaaggcagtggtgaacacccgcctgactgccttaccctgatctaaacgacaccatctcctcccccaaggaagacacagccctggatgtgaacctaggagggtgggaatggcttatgtcactcggtctttgaggcagagcttgggctggggttgcaggggcatcagccaatctgctctcaaggagcaaaacttgggcgtaaaaggaacgggcagtggggctagccggctgtctggaggtctgggtgacctggcagcacggctgcttctcccccgccaccccgccccactccttgacacttccaggtgattttatctttataaataagatgaaaatccaagcagcattaatttaggggaacaaaagatggaaaaaaaagggggggaggcagaaggagctgatgagcatccaggagaggaggaagtaggaagagcagtgtccactgtgtgccccagggcagtggagtgtctctgtggctgcaaggcccttccttctggctccctggcagacggccagacagcagagggaactctgtattgactgggacaagccctggagccctgtctggctgttgacatggggagtgcctggatttgccccaatcaacctcccaccttcaccattgcccaagtgaagcagcttttaactctcttgcccaaagtcctctgagaatttcttcactttcaggaggtcgtctgcattcaccgtgggccgggtggtggccagagaccgcagcatgtccgacatgcaaaccacaggctctaagagtttgtccccagggacatccatccaagtcatctccatggctcctgggtcccctggtgagcatggagtcaggaggtcatcaatcatcatgctggggttggtgcgaga

SEQ ID NO: 469802 - DNA, 1000 bp, Homo Sapiens; identical to SEQ ID NO: 339403

SEQ ID NO: 469803 - DNA, 1000 bp, Homo Sapiens; identical to SEQ ID NO: 339405

SEQ ID NO: 469804 - DNA, 1000 bp, Homo Sapiens; identical to SEQ ID NO: 339406

SEQ ID NO: 469805 - DNA, 1000 bp, Homo Sapiens
tttttttttttctatggaagatttttaatacaggttgtttctattttactttttctggctgaaaggattttacatttattcaaagtcaaaagggaaaagaaatccaagaactacagaagagcagttgaagtgatttatgcttgatttctaaatgcaacttatgtttatacataatttaaaactcaaagaaagcatgcttatacaatcatgtgcaactttaaactttaagaactctggatgaatacatggtggcaacagtccatgacacctgaaaacatcatttgtggagtggcgtagagttcagtgttcgcagtcgcatattacaaccatgtttcacacagccctgctcggtttgattttctccacgtggttgataattgtcttcagttgctgctaagtgattttgcaaatttcatttataatcctcgccctacaattacctaagtactgtttctgcaggttaacctgtatgctacgctcagtcatatacctttcaaagttactaatgcaactgccaaagagggacagtgtcaatatcattgtcttcattagaaggacggctgccccacactgtgagaacactgctgttcctaacagtagtttacttttagagggatgtgagaattagtttgaccttaattccagatgtgcatgcctcaaaagaaaaatcccattctccttccttttggggagcacttttggtggcaccaaggctggtgtggggtagtggagagagcactgagcttagagtcacaaccagatgaaactgctctggtcttcactagctgtgtgacttgggcaagcagcttgcagtctctgagcctctgagatccctgatggacgaggagaacaatgaccccctccccaggctgtgctgagagagggaattgatcttggatatgaaaatgctgccctggcacagaggtaggagctgagcaacactgctggatgaataaacacatgtaatgcagggtgaacagaacatttcatctgcaacagc

SEQ ID NO: 469806 - DNA, 1000 bp, Homo Sapiens; identical to SEQ ID NO: 159054

SEQ ID NO: 469807 - DNA, 1000 bp, Homo Sapiens; identical to SEQ ID NO: 339409

SEQ ID NO: 469808 - DNA, 1000 bp, Homo Sapiens; identical to SEQ ID NO: 339410

SEQ ID NO: 469809 - DNA, 1000 bp, Homo Sapiens; identical to SEQ ID NO: 339411

SEQ ID NO: 469810 - DNA, 1000 bp, Homo Sapiens; identical to SEQ ID NO: 339412

SEQ ID NO: 469811 - DNA, 1000 bp, Homo Sapiens; identical to SEQ ID NO: 339413

SEQ ID NO: 469812 - DNA, 1000 bp, Homo Sapiens; identical to SEQ ID NO: 339414

SEQ ID NO: 469813 - DNA, 1000 bp, Homo Sapiens
tttttttttttttttttttagaataagaaataatcttgccttttttttattcaaaaggatcacaagcttcacatcaatttggcttcaaaaagacctcatgtcttaaaactaagtaccgtgacatttattttgccatctgtgacagtttcacgtcgaaaaagcctcaacataaaaaaattaccttcaaaacccactgagacattctcacataaactaggatactgcacaaacaataaagttctttcttcaatagtcaatcttttcaatttcatccatgtcttcagcgttgagttgcttaatactgctgttaaagtggtcctggattttcatgagcgagggcagctcatctacttcaatcatgttgaaggcaaggccttttttcccaaagcgccccgtccgccctatgcggtggaggtaggtctcatagtccggctcctctccttgttttacagggagatcaaagttcacaacaattgtgacctgcttcacatcaatccctcgggcacaaacattagttgttatgagaaccttctctttcccatcccgaaacctctgaatgatggaagctcgctgctccacggtcagctccccgcttaacaaagacacctggtggccatcctgtatcatctccacggtcaaccacttagcgtttcgacgagtctggcagaagatgatggcctgaccaatggtgatgctgccataaatgttgcacagagcttggtatttgtctttcctgtgctcacacagcacgtaatattgccggatgttgttcagtgtgagctcctctttgcgtaacttgataacattagggtcagggatgattcgctcagcaaagtgccacacagagtcctcaaaggttgctgaaaagaggagcatttggcattcggagggtagagctctttgaatacgaatactatgatctgagaatccttgagtgtcaatcatcacatctgcttcatccaggacaaacacacgaatcttagtcaaatcaatcaatttt

SEQ ID NO: 469814 - DNA, 1000 bp, Homo Sapiens; identical to SEQ ID NO: 339415

SEQ ID NO: 469815 - DNA, 1000 bp, Homo Sapiens
tttttatatattgcttttgttgatttagcgcccaatattttatgttatttgtgagttaaacaccaaaacttagtgaaattacagaacttcttaagtgtaaaataaagcagtgtggttaggcaggattttgtcatataggcactatatgtagaatagtggtttcagtagatttgtcttcctctaaattcactcatgacttgcaatggatggatttttttctttgctgagcctcgtctgacagctgcacacgtttcctctggcttctctcttttaatcaagggtttttttgcaggagccttcattctccacatcacaactgggtgccggggcccagcaggactctggattcggatgatcttggttgaggcaatgtaagacattttcactgtttgcactacagcattcattaaatttttggctgcttggatcagggatgtgacactgtccaaagctgacatgatgagctctcctcccaggttctggatctcagctttaacttgactgcagattttcagttggtgggagtagaacttaatctgttccaggtaggccaacaagtcctgtttacaagatggatctgggcactgattagcaatctgccgagcaaggacatccatccttgatcctgattctgatatcattttcgctgcatagatcacatcagttgtatgctttagtggtcctttgcccctagtgaagtctgtcatctccatcatgatcatacacatgttcttggccagaacaatgatgtcgttgcttgtatcatcccatatctcaatctcagcatccagcttactctttactttcttgaaatcagcaacttgctcagcaatcttttctttttctgcctcaggcagttgagtcatcttagccctatcagttttcccttcggtctgaatgctggtgtgactgcggacctcgtgttcctcttcaaggtcagaaacatcctccagttcctctggggtccgaatcatcatgactgaacatctgatatcatgaa

SEQ ID NO: 469816 - DNA, 990 bp, Homo Sapiens; identical to SEQ ID NO: 159055

SEQ ID NO: 469817 - DNA, 1000 bp, Homo Sapiens; identical to SEQ ID NO: 339420

SEQ ID NO: 469818 - DNA, 1000 bp, Homo Sapiens
tttttttttttttttttttttttttttcaatgtcaaatgcactttactgggcccctgggcctcccaacactgtcctcaccaaggctggggcaccccattcccagcaccaccagctgcccaggaagcaggacggatagagggaacacatgtggaatggctgttctcctaccccagagggtgccggatgatgttgacagcacggctgcttccctctcccctgcagcttctgtccccacccagcagcttggcctttcccatagcagggaagggggatacctggggcttcaaaccagccacctgctcctgcttaaaatggggcaaggggccatttgcaaaattcttcgaggggcagtggtgaggtagaaggggtggcagcctgctcctgtctgggagagggctgggcagacactgggagccgggcagacactgggagccgggctggctcttgcttcaggcccagagccctgggccctgctcgctgaggaagctggtggttggagcggcgaggttcagccagctgaggctggagggagtactgggtggccaggaggggtagccagtccaactcggctctcctcagcacccccagccatgggtcaccagtcccgctcagcaggttctcggtaggggaggcctaagagcctgaagacatccttctcagtgggagtgggcagcactcggccaggccccaccttgcagccatgggtgttccggaccacagcagtgctgagggcatgttctgacagactcatgcccttggttttggccagggctcgcatggagcggttgaagtgtgcagagccggtgaagtagagcagggcacaggcaaactcgctatagggcaccacgatgatgtccaggcgccggtgccgccgccctggccctgggagccggcacacccccaagtacttctgttgctgaccattctcctcttggctcaccaagtcatctgtgaggaacccttcctgccgaagactgtcaaggaggcggctgaagatac

SEQ ID NO: 469819 - DNA, 1000 bp, Homo Sapiens; identical to SEQ ID NO: 159056

SEQ ID NO: 469820 - DNA, 1000 bp, Homo Sapiens; identical to SEQ ID NO: 339421

SEQ ID NO: 469821 - DNA, 1000 bp, Homo Sapiens; identical to SEQ ID NO: 339423

SEQ ID NO: 469822 - DNA, 1000 bp, Homo Sapiens
tttttaacactttcacaattctattgttcaggaaatggtaagaactgacccaagaagaacggtaaggaccgtgcatgtggctctatctacccatctgtacttagagacaccgcgacagggatagacaggcagacagatgcacctccaggtggcagggaaagctacggcttccgccggggcttctacggagcgtggtgcatggaactgaagagggcttcagcctaggaaaaaaaagtttgttttttttttttaatcgactacatgattgttcaaagaatgcagtgaaagatgccatgtttctgcaaatctgcaagggaaatggtatggaataagccaggggagagatttcaggaccatatctccagggcaaaagatcttttcttccctctctcctttgtgaggagcctgaaaaccttccatcgggtcgccagcgagtggccagtggcgggagagctgcgtgggagctttgagagccggctgcttctccctggcggttcctttgtgatggccttgaacagagcatgaggtgtccacagatgttgtacaggtagtatccttccagttcaggggggaaaaaaaaaaaacccaacccagccctgcctgcaatattatttttagtccttccctccccaactggcataacttggtataaattatgtcttcaacaatgtcgaattccccctcctgccttctattcttttaaaaaaaattgtcactgttgtgttctacaaaatcgtcagccctccccaaactttgctttctgcggaggaaagtcacccatggaatttctcttccttgctctcttggattgcagcaggctgggcaaagccacatggccacgccagggcagctggggctgaggcggggcagcccgggtgggcgggcatcatgtgtaggagtagtctatgtcggggatgccgccgtcccggtagccccgcgtggtgccgtagccaatggtgtgtgtggccttgcagaggctgctgccgttggaggggaagat

SEQ ID NO: 469823 - DNA, 1000 bp, Homo Sapiens; identical to SEQ ID NO: 246610

SEQ ID NO: 469824 - DNA, 1000 bp, Homo Sapiens; identical to SEQ ID NO: 339424

SEQ ID NO: 469825 - DNA, 1000 bp, Homo Sapiens; identical to SEQ ID NO: 339425

SEQ ID NO: 469826 - DNA, 1000 bp, Homo Sapiens
ttttttttttttttttttgcctgtttttgtataatttaataaaaaccttttaaacattactgcttttgtctgaattttttgcgtttgtgtttctgtccctctgagtcattggtcttctttttgttcctgttcctatttttcacgttgtgtgtttcatagtagcgcacaccaacttttttcggccgttgctgtcgtactgctcgcctccgttcttttgatgtaagcgccctgggagctttatttgaatgttcctgttcctcttccctttgtgccttccgcttctttccctttttggaaggtgctctgtcatctacatcttcttccagtgtttttctttgttcttcaggttttgcaaatatcttttcactcagtcccttggatattctgactgctgaaaactttttggctttggctttgtctagaaacttctgatatttggcaatcttctcatccagtgctttaataacggctttggtgtcgtttcccacattttcctcctcaggctccgaggaagactcttccgcatcatctctttgttgctcctgttcctcctcctcttcatcagaaaagctctcaagctcttcctcaagatctgacacctccacaggaaccaggtcatccccagaaaactgaggcaccacgttgattttaccaaagttctgccgaactcgtgtgagaatctgctgcatctctgtgttagcatcacagtgactgttctcttctgtttcttccttaatgatggattctgacccttcacctgcagtttctgtgacttcctcccctggattgttctgggctgcttctgggacaacttccaaagatgaggagggtagaagctggggggccacaagtggctctgcattgggtggcttgacaaagaaaggaatccggcccctctgccagtcattgaggaccatcttacccacagtctgcaagtcgggctctccaccctttagtaacttcccagtccggaaagcgagcttctcaagaaagtcctcag

SEQ ID NO: 469827 - DNA, 1000 bp, Homo Sapiens; identical to SEQ ID NO: 339428

SEQ ID NO: 469828 - DNA, 1000 bp, Homo Sapiens; identical to SEQ ID NO: 159059

SEQ ID NO: 469829 - DNA, 687 bp, Homo Sapiens
ttttttttttttttttttttttttttttgagaaacaaagatcagttaaattttattgggagccggggtggaggtcgggccgaacagaagcgtcgggcagcggaggcccgcgggtgcccctactcctggtccttggcgtcgccgtgcgtgatgacgtagcagatgtttttgtagtcgacgttgccgcccacgtcgggggggaaggccgcccacatgttcttgatctcctcctgggagaagcggtcacactgcgtggtcagcagctcctccaggaacttcttcttgatggtgccctttccctcagggtccaagaccttgaaggctccggtgatcacatcctcagggtcggcacccttgagcttctccccgaacatggtcaggaagacggtgaagttgatgggaccgctggcttccttcatcatggcatccaactcctcattcttcacattgaggcggcccatggctgcgaaggtgtcccgaaggtcctccttgtctataataccatcacggttctggtcgatcacagtgaaggcctctttgaactcctggatctgagtctggtcgaacatggagaagacgctggagcttccgccctctactgtccttctcttggccctcttgggtgccatgtcttcagtctccggggggcaaggcagcggctccggctggaaagaagcaaggagtcccc

SEQ ID NO: 469830 - DNA, 1000 bp, Homo Sapiens; identical to SEQ ID NO: 339430

SEQ ID NO: 469831 - DNA, 1000 bp, Homo Sapiens
ttttttttttttttttttaccaacaaaacaagttccttttattacctggaaaccatggaaaaagaaacctaagtgctctggcccagtcctggggctctgggaggctcacgctccctcctcaggctggggacccaggtctgtccgtgccctcatcttcctcctctgccatgaccacctcctccagggtacgtcctcgaagtttgctctccactaacaccttgcacgtactggcaggcggtagcccttcctccacgtagcgacccctcaggaacacaactctctcctctccgtccaagggcagcccgtgggcctggcacaggtcccgtgcttccctgagtccatccagggccaagaggttgaccatgaagcccagaggcaaggtctggcccttgggggtgctaaaggcacgagcgaagcgggccagggcttcccggcgggcatggcccacatggcactgcacagcgcaacttggcaggtagggcagggtctggagcagacggaacaggcgggcagcattgccctctcggaaggcagcatctaccgccaaggccttgcggaggggcgggcaggcgcgcagggcagcaggcagctgtagaacctcatgcagggcttccaccgagcccaggttatagagcagaaagaggccctggaaggcgggttggcgggggtgcggcccggcgccccgcgcgtagcagcgccgcagcgagccgaagccctcctgcacctgggcctgcagcagcaccgggtccgcgggtccccgcgccgcgtcgggcccgagccgcgccactacggccagcagcgtggccagcgccgcctccagcaccaccgctgcctcggcgtcgcccgctccctgcagcgccaggtccaggcgcacagctcgcaagcggtctgccacgaagctggccacctcggcgcgggcgatgtcggcgctctccgccacctcaccggccaggtagcgcacggtggccagcagcacggagggcggacgcaactggctggg

SEQ ID NO: 469832 - DNA, 1000 bp, Homo Sapiens
ttttttttttttttttttttttgaatgcaagaaaagttttaattgtatctagctagaagtacaagtatatgttacatgtaaattttcttacataactatcattggtacatggaactacatcagaccaattacattgttttaagtttctgaacaaaccaaaattacttaatgatttaataaataacaataccatcctaaacatacaggacacaactcacaaccccttaccctcacctttggcacgaattcaatacacgagacaagactgtcaagttaacatcagatgttctccctgttcttcaattgacattgattgcataaaattatttagtaaatcttcttcctttttttcttcactcatgtgtgattcagaatcatctgaagaaactgtttgcatgaacagtttccttggtcttctaaaaatcttcagtgacttacatcttgttttagatgcatatccagtttttatcccttctttgtttctcactggccaccaaagggaatgctgtatgagcatttcaggtgcagatgcagctgcgatatcagaagaccccgagtcctctctctccagttgatgtcgccatgtagtgcaagggtaatgctgtttctgtgagtaacgggagctaaggcggcttctgtgatgagtgaggacacctggcttttgtgagctgtgctgaagtacgtgcatgtactgcctcttcattaacatcttcagatagtttgcattatagattttagcaatgctgcacaggtaacgcttctggcctgtggtgaggtctggatgcttgaaaaaggacgcctccatcattgatttagagaggtggattgtttgattttggggagttttccataactcttgcagcttagctatgtgtgagttcactttgtatccatctttgattctatcagaacctttggaattctggtaacaagagtatccagctgatccgccgccgccaccctcggtcccggccacagcgggcggctctgcagaagagct

SEQ ID NO: 469833 - DNA, 1000 bp, Homo Sapiens; identical to SEQ ID NO: 339432

SEQ ID NO: 469834 - DNA, 1000 bp, Homo Sapiens
  misc_feature (41)..(41): n is a, c, g, or t
ttttacatgagaggaagaggtctttataaataactcctggnttaaatggagctgaaaataggaagacaaaagaggaagccaattgctaagcacttattgagtcaataacattggcttggaagccatagtgcaagtggctggtttggtttatttccttctcatcaaaagagctaacgcaggattgaacctgggggcaccaagaccgcatgtgtgtccgaggatgtgtctgaaaggatgtggtgcttctcagatgatgatgtctcgactaagacataacccaggccttgggttagatctctcggtgtcacagaagaacctgtcgggtggtgtggcttggctgttaagtccctggacctcttgagatcactttcttcactggaaggtctagtcactgggttggcttctaagctctgagatttagatagcaattcatagctaagtcttcgatataaaacacaggaaccaaaagtgtgaataaaatcttgactgtgctcaagtgtcctgtgaagtgtcctgtctccactctcaattccattctctgtagggtcttccttcagctgcaacaagggcctgcagtttgtgctctctctcggatgacaaaattgggtggaaatgtgctttattcacttgccgtccccagggcccctgatcttggggtgtggcccagcagcatgctagccagggcaggtggacgcactgggcggatgcaccggtgggggccaggccaggaggctcagcacagagctgactctgccccggttcctaaccctgcctccctaccccaggatccaagtacagagctgaacaatggagggagagacagcctgaacgccaggaccccacgctgcccggttcggggctcccagttccaccaggagggacagcaggagagggggcgccgcttgccgggcagcctggctggcagccatcagcagcagctgcaggtgcccgtgtgcacgcggaggatgcctcggctgtgcaagtgcaggaagttgaagat

SEQ ID NO: 469835 - DNA, 1000 bp, Homo Sapiens
ttttttttttttttttttttttttttttttttttttttttttttttttttttttttttttttttttttatatttttcaagcctttttataaataaaagcttttggttattgtgttagaaaaaaattcgacattaaaaattggaggaataatgagttgaaagattaccatcttttgaagtgatagattagaaataaaataggcacaagttgttatatgtaagctgcattttttaaaagtaatccgaaaggctttaaaattatgttgctggtgggctttctggtaacttacatggaaattattttttatatttttatcaagaagtcagttccaggcatttaaatgaataactcatgaatacctttgggtctatgtcatggacctcttttggatttcaaggatattgcaggattttacattcgttcaatgagactctttagttttttgtacaaatatttgggttaatgagtagcagcaagcctaacaataaagcttgacttgcatttagaaacaggatttctaagtaaacctgtccatatttgctagctaactgtattttttcatactgagtttttttttgtttttttttttttttttatctttcaaagctataattaactttatggtccagtaaggccagaattggtagcacaaaaatcctgtcttttatgcattattttcacatcttaatttttctttctgagccttggtctctttaggtgaggcaaaagtctcagtgacctttgagcggaatgcttttgagaggtgatagtacaggacaggatcaaagcacaggttcgacacagccaggagcagtgtagcctctttggctttgaagagtgaaatcctggttgagcaatcagttatgacttctgtctggctgagggtatacgggattcggacaatgtggtaaggaacaaagcatatgatgtagcccgtggtcactaaaagtatgttgatgagagcctttttcacatttgggtaattttcattatctttgtt

SEQ ID NO: 469836 - DNA, 1000 bp, Homo Sapiens; identical to SEQ ID NO: 339433

SEQ ID NO: 469837 - DNA, 1000 bp, Homo Sapiens
tttgaagtttcaaaaagtcaaactttattcagtgttatggtagaaatttgaaattcttaggtaagctatgaataaatccttgggcaggtgcaggcatacagattctggggtgcagctgctgagtttaaaagcttcctttggagatgccccctggccccctcaccccctgtccgcctgtcaagaggaggccatcctgggcagcacgttaggggcaaatggcccagatgcccagctgagggcaaacctccatgcctggaggaggaggtcgcctctgggagcaggaggacctgctggaacccctgctcacaggctccttttcttgctctccagcacctcctgcaggcaggcaaacagccccagcagcagtagcagcaggcccttcagcagcagggctgctgctctgctgaatgagagaagtccctctccagtgaggcagaggagcccagattgcaaaccctggtctctgcctccatagcttccactgtgcccaggactgggagcagtgtgggagctgctggctggagctgtgctggccacccctctctgccacctctagctccagccacactttcagctccagggctgaggccggtggctctacaggaggtgccatgaagtcaggcagctcctcactgggctggtcctgggcagtcccagggcagcggcaggagggctctggagcttcctctagctccagcgctgtccctggaggggaatctgcccctggtgctggcactggctcaacagctggcactggaaatcgctgtatttctgcacctgaagcaggagcagacagttgtttccacttgactgtcattgagctgccgattatccaattggggaaacagtggaaaaagcacttgaatctgaagcattagagcatgttgggaatgcacaaaaattgatgcattctcttttggtgatgattccaggcagagttgagcatcagtggccttagcagtatatgtaaaggtaatgctacttgcaagtttcccatcat

SEQ ID NO: 469838 - DNA, 1000 bp, Homo Sapiens; identical to SEQ ID NO: 339434

SEQ ID NO: 469839 - DNA, 1000 bp, Homo Sapiens; identical to SEQ ID NO: 339435

SEQ ID NO: 469840 - DNA, 1000 bp, Homo Sapiens; identical to SEQ ID NO: 339437

SEQ ID NO: 469841 - DNA, 1000 bp, Homo Sapiens; identical to SEQ ID NO: 159061

SEQ ID NO: 469842 - DNA, 1000 bp, Homo Sapiens; identical to SEQ ID NO: 339439

SEQ ID NO: 469843 - DNA, 1000 bp, Homo Sapiens; identical to SEQ ID NO: 159062

SEQ ID NO: 469844 - DNA, 1000 bp, Homo Sapiens; identical to SEQ ID NO: 159063

SEQ ID NO: 469845 - DNA, 1000 bp, Homo Sapiens; identical to SEQ ID NO: 339441

SEQ ID NO: 469846 - DNA, 1000 bp, Homo Sapiens; identical to SEQ ID NO: 159064

SEQ ID NO: 469847 - DNA, 1000 bp, Homo Sapiens
tcaagagaagacaacacaaggcctgtccgtccagattcttcttggcctctctgagcagcattctttccttctgggtatggggcaggaccctctctggaatgggggttttatgaccttaactgaagaccaaaactgtcgttgaaaaaacaagtaaggcccagaatttttattttctaagacatttttgggatataagggcataaatacatcatcatctaaagttcttctcattctcaataaaagtgcctttaggtatacctgtgtatttttattttctgcattcactactgaaggatatccattgattaattttagtgtaattcccaccattcttgaagtctgtgttgtagaaaaagggtcccacatattttcagctatcactgttagtttaggaagaatcaccttttccacaatggtaggtagtagggcaacatctacatcatctttttcttgctctcgttcttcacaaccataaaacagcaaagattcaaaccacagcatattctcaaagtcacgacattttgcctcaagaggagtccaagtgaggagctgaagtcgtatgagggggttgaataattttggcaaacaaaggccaatgtaagcatctttgtaggatgtgtagtattttgaacgccatgcttcaaactgtgatttaatacagtcaattgaatagaaactttcaaggacatcttcaaaaactttgccggattcttttgaaattcgatctttttccagattgaaattagtaatatctgtagaagtttcttcatcatcactggaaaggccttcaaggtgatctgccatcttaccggtttgttctctggcttgtctacgacgagtcctcctggcctcccgctctgcaatgcgacgttttgcatgctcttgatacagtgcccgatcgcgtccaaaggagtcaagatttggtgccatcagagctttgtttgaatggcttgaaaactccgaagattcatctttaatatcatcttgtcgtctttggaca

SEQ ID NO: 469848 - DNA, 1000 bp, Homo Sapiens; identical to SEQ ID NO: 159066

SEQ ID NO: 469849 - DNA, 1000 bp, Homo Sapiens; identical to SEQ ID NO: 159067

SEQ ID NO: 469850 - DNA, 1000 bp, Homo Sapiens; identical to SEQ ID NO: 339448

SEQ ID NO: 469851 - DNA, 944 bp, Homo Sapiens
tttttttttttttttttttttttttttttttttttttttttttttttccttttgtaaaaatgggacctttatttttgttttgattataaagtgaacatggtcatggctgaaaatctgtcaagcacagaaaagtataaagtaaaggtcgctcaaaattccactgcccagccagctgatactgacatctaggaggtgtcccactttggctcttattgatccctggtgtgcagacaggggtccccaggtagacagaacccctgaccaaagacaacaggaggcatttgctcttccagggtaagcatctgttttattcagatctgggtggctcagggcctccaggcagccagttttgcaggagattcagcacctagtgtcttcctgcctcacgctcccaagaacctgctcctgcagggggaacatcagaactcatccttgatgtcaaaatggggctggtcttcaggcttgaagtccaggttagggctgccatcctcattgagaattctccgggcagtgtagccgacgatggggtatttggctttgtacactttggtgaagacctcatccagggcctccagttccttggccgtgagacccgtagtgtcatgggtgaggtctgcaggatccaaggacatcttggctacccctctagtggagtccttccccgtcaaggcattgtagggggctcctcgtccataaaactcctttccggaggtgacatcaaacaccactcccttcactgccaagtagatgggctgatcttcctcctccccgccatagcgggccagctcctcctcggtgaaaagccgcactgggggcccccgctcggcagggcgcggtgtctgcccggcccgggctgtgggcagccccggggccagcgccaggaccagggccagcgctgccagcggccgcagccgccgccgcggcgcggggcccaccatggtgag

SEQ ID NO: 469852 - DNA, 1000 bp, Homo Sapiens; identical to SEQ ID NO: 339449

SEQ ID NO: 469853 - DNA, 1000 bp, Homo Sapiens; identical to SEQ ID NO: 339450

SEQ ID NO: 469854 - DNA, 1000 bp, Homo Sapiens
tttttttttgcacacttttacaaatttaatataaagcaagtccagtcttaaaaagacaaaccatatcactccttgctgcggcaccctttctgggccaggtctcgctgggaggtagaagagggcgagctggagggggaagggacacactttgcccagtgacactgagcaaagcccacaacagtggccccatggctgccactttgaatcccaagggctcagaagtacccagcaaggcctggacctccaggcagggcgcacgggtgaacgagcagaggctctaacagtctgtgggggaaggggacagaggtgccaggagatgccctcagggttccaggaatcgctctgacacaaagtcgaagtcccggaaggcggcctgttggcgggcagtgaggaggctgtggggtgcaggtggggtcagggcaggcggcagccctgtgaactcgccctcaaagtagcgcaggtccgcagggccacacagggtaggcacgaaggggggctggatggtgcgggcgagcagggcttgccagttggtggtcctgaagaatggctggaccttgatctcctcggcatcctgctcacctgccccgaggcgcttctccgggcacttctggaggagcttctgaatgaactcaagcccttgcaccgacagaaagccggggtagggggcgtccatgttgacgatgcagtcaaacacctcttcctctgtgtcccctgggaacgggcactcacccaccagcatctcgtagagcagcacacccagcccccaccagtccacagcccgtgtgtatgcctcctgggtcagcacctcgggagccaggaactccggggtgccacagaaggtgctagtccggtccccgaagccgatcccttccttgcagagtccaaagtctgcgatcttcaggaatccctgggcatccagcagaaggttatccaacttcaggtccctgtaaatgatcttcttctcgtgtaagaactgcagccccaggacaacacaagccac

SEQ ID NO: 469855 - DNA, 1000 bp, Homo Sapiens
ttttttttttttttttttgtcgttcagctgagctttatcaccagtttcctgttgctccatagcagcttcactggcgatggggcagggcctggcggaacttggggcacagatgagggaggcagttcccagacacccaggggatcaactggagcccagacgtggaccccgggagtgaccaccccagaccagcctcccagcgtaccaggctctctgagacaagaagctgtgttcccaagtcactgggccaccccacccagagcaccctgagttatacagactcggcagccagcctcggcctcgcctctatttctggttctgtgggctcgccccgggcgctgagcacctccagggcctccaggttgccgggttcctctgcaacaacaggcaggggctcagagtccccttcagcctcagcgtcctcagtgtcactggctccgccctcagtgcctgggcctgacggggcagctttagcacaacgcaggcagcagttggtggcgacagccatgaagaccccagccagggccacctcagagccggccaggtagaagatgatctcatagttcttcaacgcatccaccaggcggccggcagagggcggtccgatgagcacagccgcggcctccacgagcaacaccaggcccagcgcactggggaagcggggcgcgcccacagccgccatgagcacctcgaactgcagcgcgcccaccatgccgtaggagaggccgaaggcgacgcagaaggcgacgagggcgccgtaggagcgcgcgcgtgcgctgctcaggtctgtgagcccattggccagcagggccaggctgaacagatacgggacgtgcggccgcagacgcgccaggcccgccagggcgccgcacgccgggcgcgccacgatgtccacgaagcccacgatggacagcaggaaggcggcgtcggtgtcgggcacgcccgcgtccttggcgtagttcaccagcaggatggcggggacgaagagcccgagcgccatcag

SEQ ID NO: 469856 - DNA, 1000 bp, Homo Sapiens
ttttttttttttataacaccttgagtccatgatatattttggggaagaaacctcttgcaatctttaaattagcatgaaaagctacaccaccaagatttccatagcaaagccattggatgaagcctcccactcaatgtgacataaaagtaattcctgaaactttggaaagtcaataaaaatatatggaacattaagtagaggtaaagaagggattgtaactaaacttagaataacgaattaaaactctcccatggctttgatatggcaactataaaatgtagggttaccacaaagtttgaaattatagaatactatagtattcttaagaaatattatgacattatatttttaaggtttaattaggtaataagatttgatcctttgatggtatattcagttattcaacggacaatatacgtctacttgtacttttataagtaaatatttatatataccggaggtcaatttctgtttctgtggtaactgccctacaggtaagcttagcagcttttaatgaagtagaattgaaatacttttgggggaaagtcacacttctatttaagtatatgtatcttttttcgggattatgtcatagtgcaatgtaaatcttagttatggtatttagaatgtcagaatgtcacattttgtgctgatttgcatacttcaatagtctggagcagttgaagcagctaaactatttagctctgggaaggttggaattcccgtaagaattatagtgatctatgtgtaacataacatgagaatcagacttcctgaagtatcaactactagaggtattactaataacaacgggccaaaaaagaggaaaaacttcttcaaaggataatggatcagtacttttagccaatttgtgattttaaattttgcctgatggagttcaatttcactctagtcgaggcattcttgttcttcaccactggcctttctgccatccattctcttttctttatggctgttgcaaattttcctcatctcttct

SEQ ID NO: 469857 - DNA, 1000 bp, Homo Sapiens
tcaggagatcgagaccatcctggctaacacggtgaaaccccgtttttactaaaaatacaaaaaattagctgggtgtggtggcgggcacctgtagtcccagttactcgggaggctgaggcaggagaatggcgtgaacttgggaggcggagcttgcagcgagctgagatagcgccactgcagtcaggcttgggtgaaagagtgagactctgtctcaaaaaaaaaaaaaaagatatgatctatgtacaaagctcttcccacagttctcatatttgaatggtttttctctgctgtggagaattgatgggtcagatgagttgaggcccagccaaagcccttcccacacttctcacatttatatggcttttctcccacatagacttactgatgtaaatgaagctgtgaattctgagtagatctcttcccacactccagatttcaatggcttttctccactgtggagtctctgatgtttcaaaagacatgaagcccagccaaagctctttccacattccttacaattatagggtcgctctcccctgtggaccctctggtgcatgtcaagattaaatttactgttgtaccccttctcacactgctcacatttgtatagcttttctccagtatggcatgtctgatgggaatgaagttgtgtactctgagtaaatctctttccacactcttcacatttgaaaggtttttccccactgtggagtctctgatgtttcaaaagacaggaggcccagccaaagctcttgccacattccttacaattatagggtctctcacccgtgtggaccctctggtgaaactcaagatccaacctccttttatagtccttaccacactcctcacagttatatggcttttctccattgtgggatctctgatgggaagatcgtcgtgaatttgtataaaatcccttcccacattcttcacatttgaaggatttttgtccactgtggacttgctgatggttcaaaagacatgaggaccatctgaa

SEQ ID NO: 469858 - DNA, 1000 bp, Homo Sapiens
ttttttttttttttttggaaacaaagaaaggtatttatttaatttttttttttggagacagggtctcactctgttgccctggctggagtgcagtagcactaccataggtcactgcagcctcaatcttccagactcaagcaatgtaaggatgcagcaaaaatacaaagacacatgtggctgacattctagtggtcatcaattttgacatgttcatcattagtgttttgaaagtgtgtgaacaaactcttatactaagacctgtctcctgaataataactaattgtcaaacttctgttagaaaccctgcagcattctctgctctgacagtcccacgaccactggggtatgctgagctatggctgaaacactaacttcaaactgtcctcaatcacatggggaagcttaaaaagctgatttcttagaagtagtgagaacagtggctctagaggcagggaagggtaagggataggtgggatggccaaaggttggccaatggatgcaaaagtacaggtagataagaggaagaagttctgctgttctgcagcactaaaggtgactatcatcgacaacaatttattttcaaactgctggaacaatgaatttttaattttctcaacacaaaaaagagataattgaggtgataaatgtgctaattacactgatttgatcattatacatcatatacatatatttaaatatcacactgtaccccataaatatgtacaacacttacgtgtcatttaaaaataatgataaaattatatcaagattcaagcgcctcttgtagcgcttcccacagtcttcacatttggatggattttctccactgtggtttttttgttggtctttacggtatgaccggtatacaagcttctttccacaatcctcacatttgaatggtttttttcggcaatggagtctcttatgattcaaaatacttgaggcctgtctaaagctcttcccacagtcatcacagttataaggtctctctcctgtgtgg

SEQ ID NO: 469859 - DNA, 1000 bp, Homo Sapiens; identical to SEQ ID NO: 339452

SEQ ID NO: 469860 - DNA, 1000 bp, Homo Sapiens; identical to SEQ ID NO: 339453

SEQ ID NO: 469861 - DNA, 1000 bp, Homo Sapiens
ttttttttttttttttttttttttttccaggaaaaacgacgttttattttcataaatactcctgctctcactcacacactgaccccacttctgaccacggacagatggatggacagacgtaagacacccataggaggccccagcagaggccaatgaatgaaggagacacaccgagaactctaggtgccccacagcccctcgctggggccatgggcctctggcattacccttgagcccccacagtccctcagggggcccaatggcaaagggaaacccccaggagtacgggccaggtgaggttcccccagcctggccccctgaggctgtgaccacagggccaatccggaagaaaagcagagtcaaaccacacaccagagtgcaaatagctgggggtgtaggcgtcaccccccagtcactgggttcctatggaggaggcctaagctggtccccagctccagcatggcccccgagttatggctgggccttcccataaggcataagagacaggtggggaagaccccaccccagctggggttggggctgggcctgaggtcctggcccttccccaacagctgtgcttcctccccatgacccaagttcttccaaggctacacagcccctccctctccaggtcccggtgatggagaccccagcggcacaaacccaggcccagcctcctactgggtttggctcagcaggggcggggccggagcaggagggggaagagtcacttgaggcctacaggggtgtggggagaagcaccaggcctgggggtgaatggccatgggcaacaaagggtgtccttggccaccaatgcctccctccaggctggacagtgaccggtccctctgccccttcctctccccagcccctctgttctagaggctaccccaggtttcaggtggggggaactggtccacatcccccatctcgttgtaggtctggtcacccatggtgaaggtgagcttgtagcggaggcgaaccttctccttctgggggt

SEQ ID NO: 469862 - DNA, 1000 bp, Homo Sapiens; identical to SEQ ID NO: 339454

SEQ ID NO: 469863 - DNA, 1000 bp, Homo Sapiens; identical to SEQ ID NO: 159071

SEQ ID NO: 469864 - DNA, 1000 bp, Homo Sapiens
ttttttttttttttctccttccaaaatacttttatttaaaaaaattacaaacaatccaaaaaaaaaaaaaaaagccaccacaaactctgcctttcttttaaataacccggcatggagcagtttggtttccaccctattgcacgtggtccggcctggttatgaaatcaggaggctgctgagactggggtcctgccgaggaagtggggttcagcctggagggaggacaccagcccctcccaccccctcaaggtgcaagaggcagagcctgggtttctatagcaacctggcagcacatccctgtcatccttcgacaggcccagctttctttatcttccctgaggccccagtggtcacaggggagtgggaactagcaggaaaggtggaagaaatgtgtaagtggaaaatcagactcccagaaacagagtctcgttaaggcatttggaatagataaattaattcaggaagacccaccttcacagaaggtcggggtaaccagacacacacacacatgcaagacagtttgtggaaccctgaaatgggaacaaaggaggccatagtcactgcttcgagcccccacaaaaacacacacccagagttgcattcagggatccaggccaccgaagatgacatgaggaaggatcgatcccctctatcacagttttaggaccccagaatgatttccatgatgtgatccagttcattccactcccaagaacctggggcacagaagaggttgtgaggaggctctggtggggcccgtgcaggctccttttctaccgcagatgtgtcaatgtccagaaagaagtcatccaggccagagtcccccaagtaccgggagctcagagcttctaagaagactggatcaggctggggtggcacttcattctggaggccaaggggagtcactggattctgagggggctcagtcccatccatggaggtgtccagctccctgaggatagagccaatggtggctgacagggagaaatcctcctcgccc

SEQ ID NO: 469865 - DNA, 1000 bp, Homo Sapiens; identical to SEQ ID NO: 339456

SEQ ID NO: 469866 - DNA, 1000 bp, Homo Sapiens
tcataggtaaaatatggaatttattcagaaaaaccactcagtacaatgtgtactacaggatatcacttggctcacatcacagacatggactatatgactttacaataaattagatgggaaggcagccctttactcccaggatggcctgcaggccctttcagcagatagagtttattacaaataccacagtagactttttggctattttcaagcggaataagacagcctgaggccagccagtgggactttcagctgcaaggggccttccccatctccttccccttcaaggtgggctgtctcccacagtaaaccgcacagggggtgttcatccctggatcactatacaggttccttgtcatcaagctgagaacattacttcatgattcttattaatccaggctagaaagacgtcgagctctcccagggatttaatggcagcagcgtggacctccagctgatcatagttgtcatggatgactctggtggcattggtggcttcctgcctgcagtgacactgcctctgttcctgacattgccgcagagttttctgcatgtagaggaaagagttggcaatgctgctgatttttctcaagattttggggtttggctcctgatgatccttgaacaccctgtccacgtagaacgccaggaggttcttggtcacgcagcacacatctaagggcttaatgatctgcagagtctccaatgtggacaggatagtgacatttgggaaggtgtccttagcttggatggctcttttgatttcttggaaactctcttctatatggtgcatgtctgtggaaatcagacatctcctgagaccgtggttgtctactgagcacaatatcagtattgtacccaggagccaaagggaaacacactgtaacttcatgcctctcacttggtgcttgcgggctgctccttgtgtctcctctcagtgctctctgccatttggaaagggctggtcatttttattcaggtggataagaggaaatgctgt

SEQ ID NO: 469867 - DNA, 1000 bp, Homo Sapiens; identical to SEQ ID NO: 339457

SEQ ID NO: 469868 - DNA, 1000 bp, Homo Sapiens; identical to SEQ ID NO: 339458

SEQ ID NO: 469869 - DNA, 1000 bp, Homo Sapiens; identical to SEQ ID NO: 339459

SEQ ID NO: 469870 - DNA, 1000 bp, Homo Sapiens
ttttttttttttttttttttttttttttttttttttttttttttttttttttcccaggactggctttaatttgaaaaatctgattggggtctcttcccgtatcagagaaggaacagcccaagctatgaccccagggccagggaattcagtccccaccagaccctgtcattccatcactagggggtaattccaggctccccctgccagccctgagacaggaggacggatgtgaagttgcccaggactagattctgtctctccaaagtggcccaagccctgttctctgtactagggaagccagctgtgtcttttcgaggacagttggtccagccagcaggctcagttcagataccagacaaccattccagcacgagggctcagcgccctggccccggcggtcgctccagtgcctgtgtgcccaccagcacatccatgaggtagtccaattcggcctcgtccagctccggagcttcctccttgcccggcccatcctcagggcctggtttgaggccctcagaggctggtgcccaaagttcattgtcatacatagaggtgtcaatatcctcaaacaggccctcaagcccatcgtccagtagacagccagtggctgggcccagcaggtccaaggcacccaggctgggcgctgctcccccgatgctacggcctggtggcccctcgtctgccaagggttggggagcctgactcaggccctcaatgtggctgaggtcctccaggaggctggccatggaggctgaaagggcagcgtccgagcttgccagtaagttgtcagccacactgggggctgcaggtgggctaggcacaggtggcagggcagccgcgggtgccatggacgcctggatgcgccgcagagtgttcacgaccagcaccaggtgccgcaggtccggctcactctgctgcaggctgtggtggagcttgagcactgagaggtcaaagagggagctagaggccacggccgggggtgcctgtgccaccgctgcgt

SEQ ID NO: 469871 - DNA, 548 bp, Homo Sapiens
tttttgttgacatgttgaatattattaacccattttacagaggggaagcaaggctcagagaaagtttaaaagggacccaaggtcaggggcagaaatgggaggcagaggggaggcacccatctcacaccccacccctagggactaaagccgtagccaacagagcagtagtaatccgcgtcgtcttcaggctgcacgggactaatggtgaggacacaggcattgtgggcctcatccttggctgccgagaatcgatcggggatgtcagcaggccggtggtgatcctcctccgagcggtagtagaggagatatcgaggggcactgcctgcccgctgctggtaccaggacacaccgtagtccctgatggtgacgtgctgggggctgagcgtgcaggagagttgagccacttggcctgggaagaccagcagtgcatccagctgggccaggactgtctgggaaactgacaggaaggtccccatcagaaggaagctgaggcaccggcaggccatggccagaggcagggaggcaggcaagtagaagttctgcaaggc

SEQ ID NO: 469872 - DNA, 1000 bp, Homo Sapiens; identical to SEQ ID NO: 159072

SEQ ID NO: 469873 - DNA, 1000 bp, Homo Sapiens; identical to SEQ ID NO: 339463

SEQ ID NO: 469874 - DNA, 1000 bp, Homo Sapiens; identical to SEQ ID NO: 339464

SEQ ID NO: 469875 - DNA, 1000 bp, Homo Sapiens; identical to SEQ ID NO: 159073

SEQ ID NO: 469876 - DNA, 1000 bp, Homo Sapiens
tttttttttttttttttttttggatcaggagttttattctctctttggaatgactcccagaacagccacttatgcccagaaaatccatgatcccatctcctccatgatggaggaagctgaggaccagagaggggaagggagtagactaagggagtagccagtgcatcccaggagcaggacagaatctctgacccctgacccctagcccagtgctccttccaccacccctggctgctccttcatggaccaatgaggtgacagaggcagggcctagttcacaggctgacaagaatctgcggatgtcctcagatgtcccacaaggtctcctcctgcagacgcccaacccagaccttgtctgctgcaatatcactaccagtgcttgcagacctccagagacaggagtctcaccacctcgcaaggcagctactccatcctgaccctgtggaaggtgtgcaaatgtgggggtgggtggggacgaggagaggtgcctcgcgagctgcggttccttctgggggatccacctgcttccttgcccactcaggctggcagtggggcagaggcgaccacatttcctgttcccctgccaaggaatttccctccaggggctcccctgggcctgtgtgagggggtgagaagtgtttcctgttagtggactcctcctccaggccaggcctccctggagacagagctggctgcccgggtactggaagtcagctctactctgataatacttctgcagagggtctcgagatgctgggacccgccgggctgccctttatcaccatgggactgctcgtcagtggtcttgcaggaaagccatggccaagactctatctctccaagcatgagctctgtgttactttctggctcagccactgcctccaggcggccctcctgttaaccacagtgcacgaaactctcccttcttggcttcttggatatagcacccatcctgcttgagtcccatctgtctgggatgttctccgtcattttcttgagg

SEQ ID NO: 469877 - DNA, 1000 bp, Homo Sapiens; identical to SEQ ID NO: 339467

SEQ ID NO: 469878 - DNA, 1000 bp, Homo Sapiens; identical to SEQ ID NO: 339468

SEQ ID NO: 469879 - DNA, 1000 bp, Homo Sapiens; identical to SEQ ID NO: 159074

SEQ ID NO: 469880 - DNA, 1000 bp, Homo Sapiens; identical to SEQ ID NO: 339470

SEQ ID NO: 469881 - DNA, 1000 bp, Homo Sapiens; identical to SEQ ID NO: 339471

SEQ ID NO: 469882 - DNA, 1000 bp, Homo Sapiens; identical to SEQ ID NO: 159075

SEQ ID NO: 469883 - DNA, 1000 bp, Homo Sapiens; identical to SEQ ID NO: 339474

SEQ ID NO: 469884 - DNA, 1000 bp, Homo Sapiens; identical to SEQ ID NO: 159077

SEQ ID NO: 469885 - DNA, 1000 bp, Homo Sapiens; identical to SEQ ID NO: 339476

SEQ ID NO: 469886 - DNA, 1000 bp, Homo Sapiens; identical to SEQ ID NO: 339477

SEQ ID NO: 469887 - DNA, 1000 bp, Homo Sapiens; identical to SEQ ID NO: 339478

SEQ ID NO: 469888 - DNA, 1000 bp, Homo Sapiens; identical to SEQ ID NO: 339479

SEQ ID NO: 469889 - DNA, 1000 bp, Homo Sapiens; identical to SEQ ID NO: 159078

SEQ ID NO: 469890 - DNA, 1000 bp, Homo Sapiens; identical to SEQ ID NO: 339482

SEQ ID NO: 469891 - DNA, 1000 bp, Homo Sapiens
tttttttttttttttttttttttttttttttttgagacggagtctcggtctgtcgcccaggctggagtgcagtggtgcgatctcggctcactgcaagctccgcctcccgggttcacgccattctcctgcctcagcctccggagtagctgggactacaggcttccaccaccacgcccggctaatttttggtatttttagtagagacggggtttcaccatgttagccaggatggtctcgatctcctgacctcgtgatccgcccgcctgggcctcccaaagtgttgggattacaggcgtgagccaccgcgcccggccagcagcttcatttattaggggcttcggtgagggtggggaaaggcagcgccagggtcagaggcgccgaaagaagagcttggagccgtggtccagcgtgcactcgccggggcccggccgactgggctgcagctggcgcagggcgtccctgtcctcagcgcagaggcgtctgctgcacagctgcagttcccggagctgcgcggctatcttgtcccacaggcccaggcccaggggaccctggacggcgcagcctgacaggccaaggaagctaaggccttggggccgcttttggagggtggacaggagctcttccaagctggcacagctgatctcagggttggcagacagatccagtgagatgagtgaggggcacagagagagacatctgcacaggtctctaacagccttgtcccccaggtggtttgcagacagggtcaggtgggctagagcacagccttccttggccaggtatcggaatacaggctccatgaggtccgaatcacccttgccggctgccacggagctgagctctaagtgcaggagggtgccggcgggcaggctctgcagggtcctggccagggcaggggctcccagggcgttgtaggacagggacagggtcttcaggtgctcagcatcttggaaagcactacccagtgctgtctggtggctcagaaagaagctggggccga

SEQ ID NO: 469892 - DNA, 1000 bp, Homo Sapiens; identical to SEQ ID NO: 159079

SEQ ID NO: 469893 - DNA, 1000 bp, Homo Sapiens
tttttttttttttttttttttttttttaaaaagtacctcaaggcaataaaaaaaatcattttaatttttgatacatattaaaacatcttagtcagttcctcctgacagcattaacacagacaaatacacaagacttcaaacatgctttaaaatgacattcagcaaagtacttaaaatttaataaatagcaaatcacacacagatacatttttcataatcattaaactactaaaacagacagttaaagaataaataaaccgcaactgacagtaaaaaaaatatgttgggttttgcaattcacactacttaaaaaggggggatgatctgaatgatttcttaattttcttttgagagtgtagcatgatcccccccaggaataaaatatattgaaaaaatcactcttacaacaatgtattttttaaatacaacaaataaatatgaaaccagcaaagcaatttcaagttgtaataaaaatgtcccccgcccccagccaaaagctatggaaatatatagttgctgtggtagcaaataatagtatttaaagtgatagtgcttgtgcactaagctcatctgagaccttgatataattttagtgcaaatccctagggtccaatgcaagcgcaaccctgtattagggaaagacattaccaggtggaacttatcttgtacaatttttgtacatgttttataaagttcaagatttaatgcatagtagaatatcttcatccacttaattctgttgctaaatagagatgaaaaaagaaatgacttgggattttaccatttggtttgtaccatgttagagtattaaagtcaacattagaaaatctttataaaagagttttgtttttgccagtaatttatcgaactctgcctaaatttcacatgattgtatgttaaacgtaagagaaaaatttttagacagtttgtttcccactgacaagttcatatgataatgaaatccaataatagacaaatgtcaaacaaatgaaaacgcagg

SEQ ID NO: 469894 - DNA, 1000 bp, Homo Sapiens
tttttttatctttttaaatttgttactttattgttaatatatatttttaactagagatggcatctcgctccattatcaaagctggccctgaactcctgggctcacttgattctgcctcaggcttcagagtagctgggattacaggtgtgcgccactgtacctggcctcaccattcagtcttgagagggctgtccattggttaggcctttaagacagagtacagggtctcgttctgggggctcttgaggggacggtggctgggaggtgctctgggtgaggtggagctggagagggcaagggaagcatagacgatgccgtcatccttgggatttagcttgggatctgtattttgtccttcattcctgatattctcatatggctcctctgtgttttggaagggttccctggctggggttgtggctttagtccgctgctgacctttccttctcctccacctgaggaggcagatcagtcccaaaatcatgattccgagcacagtgacagccactgccacccccacagcagtctccagacttatgtgccaagagtctgagcgtcgtttgccctgtgtgaccctgaggccggttgtggtggttgtgctactgagcctccaggtggtagtcatgctgctgggcctctgggtggtggtcgtgacagcctgggtgatggagagtttggtcccctcgatggactgccactgctgcctccctgagctccgtgtgtccagctcaactcggcagaaatacacagactggtcctgcttctgcaggttggagatcctgaggaagccgctcttctgaccctctgtccagttcagaaagagccggttcacataatccttgtgaatggaaggcggccttgtgctgtagaaggactgcctgtggaagtggccccgtctccaggatattctcacgtcgggagctgtggctaactcccaggggtaatagaaggagaaggggatttccacagagccacccatggaggctgagaggtgttttgg

SEQ ID NO: 469895 - DNA, 1000 bp, Homo Sapiens
tttgtcccaaattccagataagagcaacatgtgggtggatctgtgtcgtaagactcatcctcaaagtggatttggcatttcttccccaaagctaattgaacaaatacttgagaaccatgatttctatgaattattctgtatttctggtttcttttcctgcaaaaaatttcatgtatactgagtaacaacctttgatcgatttattaattagaagctatttataccagtagaaaaatacccacaaacaattaaaattataagactatttttaaattcataaaaatggtactgtactgggtgtgactacatttccagtttttggtgtctcatgtgatacagaatcaggaggacttacatggctggaggggaggggagctgttttcctaatttgttactatttaaaaatggttaagggtggccacatcttgggggcttctcctttaatgtaaagtcccttttggaatatcacttaaaatctgggacaggtcaaatcagctgctactctacacgaccgtgtctgcagtacaggcgtggtgagaagacctatacctcactcggcagagtctcacctatgctgttcgcagcaacgcatcggccgcaggcacagagcgccatggccagagcccaccagggcagccgcctcgcaccacaaccaagggcctcacagcgcgcaatcaaaggtctggggctcattcaacgctgcggtcggagggtcggggcgcctcgtctgggcaattttctgtttggggttttttgtctcttcttcctcttcagtttcactttcacagacatgaaccaccacgctgggtgtcgactctgttcccgcgtgaagttcatatttctctcctggtcccaatttggaaacagcacagagtaaatcataatttataacaggcatcgcatcttcgctctgcttccaccccaccgggggagaggctggaggggagatgaggaactgcttgacaggctggggcggcaggagataggacttgtcccgcac

SEQ ID NO: 469896 - DNA, 1000 bp, Homo Sapiens
ttttttttttttttttttttttttttttcaggtttgccactggtgagtttattacacgactaaagttcaaataaaaaaataaaaaccaaaatcttggcagggaagctagagccagaatcaggaaaatctgcttccttgtccccagactccctggccaagcccagctccactaactcatcttgactcgatcaagttcctcatcaagacttgcatctgtaccctggacatctctgctgctcccactggagagtgagtctggagtccctggcactggggctttggtgagggctccatatacacccatggcctgagccaccatgctggtgacatcgccagggttggagggcagtaggatagtgttggagtccttggccagtttggagaacgcgctgacatactgctcggccacagtcagtgaagctgctgcatctccattatgttgtgtcagagctgcagccaggattcgaatagcttcagctttagccttggccttcgccagaactgcactggcctctcctgctgcctgatttatctgttcagccttttctgcttcggaggccaggatctgggcctgtttcttcccttctgccacattgatggccgactctcgggtcccctcagactctagaactgtggcccgtttccgccgctctgcctccacctgcatctgcatagactctttcacccggggtggcacatggatatccttgatctcataacggaggcagcggataccccagcagtcagcagcttggttgatggcatccacaatgctggcattcagggactcccgttcccggaagactttgtccagagagagtttgccgagctctgatctcatggttgtttgagctagctgggtgacggcatactcagggtcctccacaccgtagcttgccttgtaagggtccatgatgcgcaggtaaaggactccatcgatttgcagagttacattgtcgagagtcacagccgactgctcaggcacgttgatgacaatttc

SEQ ID NO: 469897 - DNA, 1000 bp, Homo Sapiens; identical to SEQ ID NO: 339486

SEQ ID NO: 469898 - DNA, 1000 bp, Homo Sapiens; identical to SEQ ID NO: 339487

SEQ ID NO: 469899 - DNA, 1000 bp, Homo Sapiens; identical to SEQ ID NO: 159081

SEQ ID NO: 469900 - DNA, 1000 bp, Homo Sapiens; identical to SEQ ID NO: 159082

SEQ ID NO: 469901 - DNA, 1000 bp, Homo Sapiens; identical to SEQ ID NO: 339492

SEQ ID NO: 469902 - DNA, 957 bp, Homo Sapiens
ctacatcattacatttttttctgggtagagtttactgaagaaggtcttcttcatggcgaccttcagctccttgttcctgaggctgaagatgatggggctgaggaagggtgtgaggaccgtgtaggtgatgcccatcaaggtgtctccttccagagactggggacttttgggcttcaggtaaatgacggaggcaaagccatagtgcacgaccaccacagtgaggtgagaggcacaggtggagaaggccttgttccgaccttcagcagaagggatcttcaagatggcggccacgatgaaggcataggagaggaggatgaggagaaaacagcccagcagggccgtgatacacaccaagcccacgcctttggccaccaccagcacatcgtctccacaggccaacttcaacagaggtggcacatggcaagcaaaatggtggatctccttgtgtccacagaaggcgaggtggaaaatggccgaggtcaccaccatccccatgaccaagccaccagcccaggagcagcccaccaggcaggcgcagccccgcgggctcatgagcacgttgtagcgcagggggtggcagatggccacgtagcggtcgtagcccatgacggtgagcaggaaggagtgggtgaagccgaagctgaaggagaagaacatctgactggcacaggccaggaaggcgatggagcgctgggtggacagcaggtcggccagcatgcgcgggatgatggccacggtgtagaggatctcggagacggagagggcgcacaggaagaggtacatgggcgtgtggaggctgcgctcgctccagacggtggccatgatgagcaggttgcccagcagcgtgaacaggtacatcagcaggaacagcaggaagagcatcagctggaggtgggggaagacagagaagccgacgaggatgaattgggtcactgtggagtgattggctctctgcat

SEQ ID NO: 469903 - DNA, 1000 bp, Homo Sapiens
caaggcttgagaggcacattcttatcctaaagtgactgctcaaacctgacgagaccaagtaaattactgaagatacaaagagacaaaatgcagattaccgtccttattcctataactcaaaaattttctttgttgaagtagaattgaacctttctaggatccagactggaatatcggtgacagcatttgcgcaggctctttgccaaagtccgagggccacataagaaaactcccactacagacttggggtgggaggtagctattgtagaaaactcattgtcccacattggtctcccaaaggaggttttctgtttcagacctgtcacgatgtcagtggccttgtcaaagtttaatgctgcatgaccaaccttttttgttttgaggttgtggtctgcacactggaatttgtaccagatggatttcaagatagaagcaaagggggtgaccccaattcctgctccaaccagcacagccacttcatactggaaaacatcctcactggctgtgccaaagggaccatccacttcaatcctgggaattggtgaatattgttgttcgaaagcccttatgagattttctgtccagtcccctgctgctcggatatgaatggagaagaaatcttcctctggagcagaggtcaaagtaaaaggatgccattccaggagagagattgaggggcaattaacaaagatatactgccccacttccatgctgaagccacgcttgttcatctgcaattccaaaactttggatgggtgcataacaaccttggtaatcacaaccttctgctgggagcggtaaaaccggaggatcctttcacagatataaagaatgaccggtgcaaggatccacttccaagactcagggggatgcccttcaaacttagggcgcctacagtgggagtcacgatcatcccacatctcaaaagactctgcacacttgcgaggatgactctcattcatgctctcctctgtttgaccccggacaattccaccaatgc

SEQ ID NO: 469904 - DNA, 1000 bp, Homo Sapiens
gggttttttttttccttttattatgtttatttgtgacaaataacacattctgaatcaaaattaacttaccatcatttcaagtgcatatcggttacagcttagcaacacccttttcaggatgtggtcattgtataaagaagatggactgttcagtagaatgatttttattttatcaataaaagtgagactttgaaatgcctttattatcatatttcactgcttgatattgactatcaatttgtatcacatcattcaatatcaattccagaaacatccggagcctcacacacctattagtatctcagagccaactagtcgcgaacagaggaagtaatacaattgcttttgttaatgttctcatgcgacaggcagaggcagtcaatattagatctggtaagacacatctagctctaggtggaatctgaggggagatgcagcaacaagaaagcagcaccaactgagcatgctcctattcaggcagagacagaaagggagtggacgtactgtagaagctggccattacgtagttttggcagcgatcaccagtaaactcatttgggcacttgcacaagtatctcgaggggtttgaaaggtctttcaccatgaagcactcccctccattcacacagaaagttttctccttctccgcacattttacaagatggcttgtcccagtggtggatgtagatgtagaaagtttaggagcagtttggagattagtttctgttgtttgtggctgagttgctgacttgggcgttctcacctcagggttccgggtgggtgaagggaaggatggcgcagtggacggcaagaaagaaaaggcaaaaatacgattcttcggtgtcggtgccgctgatggttcaaaggagacaacagccttgtcaccttgcactgtaacttgaacctcactttcagattgagccctagagacaggtgaagtgtatgcctcagacgacacccacacagctgaggcagcagttgcgtccagagaaataatagg

SEQ ID NO: 469905 - DNA, 1000 bp, Homo Sapiens
ccttttattatgtttatttgtgacaaataacacattctgaatcaaaattaacttaccatcatttcaagtgcatatcggttacagcttagcaacacccttttcaggatgtggtcattgtataaagaagatggactgttcagtagaatgatttttattttatcaataaaagtgagactttgaaatgcctttattatcatatttcactgcttgatattgactatcaatttgtatcacatcattcaatatcaattccagaaacatccggagcctcacacacctattagtatctcagagccaactagtcgcgaacagaggaagtaatacaattgcttttgttaatgttctcatgcgacaggcagaggcagtcaatattagatctggtaagacacatctagctctaggtggaatctgaggggagatgcagcaacaagaaagcagcaccaactgagcatgctcctattcaggcagagacagaaagggagtggacgtactgtagaagctggccattacgtagttttggcagcgatcaccagtaaactcatttgggcacttgcacaagtatctcgaggggtttgaaaggtctttcaccatgaagcactcccctccattcacacagaaagttttctccttctccgcacattttacaagatggcttgtcccagtggtggatgtagatgtagcgtttgattccacgatggtgatattggcagaggcactgtcatttcctaatttgctgatcactttgcacatatactctccagaatcagccagtgatgctttgttaatgcgaagttctgacttccctggctttttttgtatcttgatattttgtggtttgttttttcgattcaattcattcccattcttgaaccacttgaatctgagagaggagtattcagaactggtttcacaccgaaggactagtttggaacctgcagccgattcctggcttttcatctctttcaattggggaggcaaggcgcaccgcttgcacagcacc

SEQ ID NO: 469906 - DNA, 1000 bp, Homo Sapiens; identical to SEQ ID NO: 339498

SEQ ID NO: 469907 - DNA, 1000 bp, Homo Sapiens; identical to SEQ ID NO: 246487

SEQ ID NO: 469908 - DNA, 1000 bp, Homo Sapiens
ccgaagctgtaaatcaggatgttacatataaatagtttccctataaaaacgcctttgccgttagctagtattataagacaatttttgctaaaatgaaaataaaacattttgttatacttttttccttttatagaaaataaaaatatttttatttcttttttcctcctttctctccagtaggcggtctctggtctccttaaagatagtggggcgggcggggcggaggggcgcgcggcggggccctagagtggcgccgagtcctgcttggcccgcgggggcggcccgcggctgtgtctgctgctggcccgcgtgctgtggctgtccagtgagtagtaagtcctgctgtcggccgccgggcacagtggcggcgagtccgagcgcagcgcgtcgtgcgccccacgcaggcccaggaaaggtgtgctctcggccgccagcgccccgtccgcgtcgtccgcgtcgtcgtccgacgccgaggctgagccgccgcccgagccgctgctcagcgacagcgagtccctcgccgcccgtgcgcgctgcgccgccagcccgttgaggcgcgagcggcgccagcgccggggccccgccgacgtcctgcgggacgcaccgcgcgcgcgcggccgcggcggcggcgggggcgcgcactcctgcgtggtctcgtactcgtcgtcctcggggatgcggaaggggctggcaggcaggctgcccaggctgccgccgagcgcgcaggtcccgcgccgcggtccgggccccgccgcggggtaatagtagctgtcatagctgcgctgcatgtctgcgccgggcccgggcccgggcccgggtccgggtcccgggccggggggcgccgggtgccgcagtaacggctgctgctcggccaggcggtaactgatgggcgccgccggcggcagcgacacggcgtgcgccgagttgggggacgtgatctcgaaagttggcacctgcgtggccagcgagtagtggaagtccacgggcgagaggcgcgcgg

SEQ ID NO: 469909 - DNA, 1000 bp, Homo Sapiens
cctttaattcaaatccaaggtgcttggagaagttgaccattgcgaactgctgacacctgtccccggtgtatcccacaggacactttgcttaggatctggcatgtacaatcgcaaaggcagtttctccaaacatctctgtccgaagaatccatttggacatttgcaggagagctggttgatgccctcgatgtagtagcagacgcctccattgacgcaataggacttggctgtctcgttgcacttccgggcgtgccccgaccaggatgacagggtggtgctcacgctgttgacgtaaagccggccccggacggtgtccttccccaggatgttctcggcctcgcagacatactccccagcgtcctccaccttcaccttgttgaactgtagtcgtgagttctttctgccgttgccatatttgatgcgaatgtctcggctgcggttgagctccttgccatccttgaaccaacggtaggaaggctggggattaccggctgctgcctcacacttcagcgattgcttctcacccacctgtcccgtctggctcttcatcttcttcaacttgggccgggtggcgcagtcagtgcacaggatcttgcccacctctttcttgagatttttgccgttggtatcgaggggggcaaaggccgtcttaaagactaagggctgttccgtgggctccaggaaaaagatgtagcgctggttcctttcgagcggcacacaggagcccacgctgatcacctgctcgcgctgcagccccccgctccggagcggccacttgtccagcacctttaccaacgccacccgacccgaggcgggcggctctcgggtgctgttggagctggagccgccggctgggaccagcccctgtaccttgccctccaccaccacgggtgccttgtacgcctggtcctgcactgacttgaggctgggcgagtagcaggcgagcgacacaccgaagagcagcatggagaagccgggggccgggtcgcgcctcatgccg

SEQ ID NO: 469910 - DNA, 1000 bp, Homo Sapiens
ctagtagggccgatctctgcgctcctgacggtgctcgcctttatccatttttccaggtcctccacgtcctcctcttcttcctcccatctgttccatcaaaggtccagggggccccccagggccacctcgtcttcctccaccaaagccacctcggtccatgccccggccaccacggaagccacctctgtctccaccacggccacctctgaacattccaccgggaccaccacgatccatgaggccacctcttcctccccgcatgccaccagggccacctctgccacgatcaccacccgggggcggaaagggtggcgggaggaagccttcaggctttggggccttacactggttgcactctgttctccaggcgaagttctggtttccacaacccggattgggacactgccagtctccagctcggtgctggacgtttcctcctccagaggggttccctcgggaaccccggggtcctcttggagggaagcctcctctatctcctccacggcctcccatgcgacccatgggtcccccaggacctcctgggcctcctggacctccacggagtggtggtggcatgcctctgccctcacggggtggcagaccaccccgcatactgttcattggaggcttcttccgagcaagggagactttaagtttgctcccttgaaaatctttcccatcaaaccattccacggcagccttggcagtgggtgggtcttcataggacactgtggcatcgcctttgggctttcctgtttccttgtccaggtagatgtggatcatgggttgcccagttctcttgttcatcttaacaaccccacactgcttaaagaagtctgccagatcatctagagtcacactgtcatttaatccttgtacataaattgcactgttgtcagagtcttcatctggatctacaggagggcctagatcaagatctggtccttcatccatgggtctctgctgcccgtagctgctgctctgttggctatattgactt

SEQ ID NO: 469911 - DNA, 1000 bp, Homo Sapiens
tttcagtgctacatctaaaaagagaagccctgttgccgatttaataatttacagtctctaaatccaaaagggcctccatgtgctagtgagactcatgccctcagttatgttcacgatcttcctgagaagtcagacaatacaggtagaacaaaagatagtggttgtactttctcttctgcgtagtgtgggtaagagcatgcggtttgccgcatgcagtgttgttaatcttttgattgtgttgtgaatggctgaaaaaaaagctgaaagtttgattgaactgaaatccaatccatgtcaacataaggaatattctagtgagtttactgtcctaagagaaggtctctcctggggaacccctggtatgcagagctccctgggacttgcagattggacagagagggtgtgccaaaggggtataaacccttctgatggagagagtcgggcgtgtcttcattttggtagttctggaaaggctcctctttaaagattctgatttaataatgttcacttttgttaagattgaatatcattttgaaatcatttctaaacgtgtttcctttataggcactttatctattaaatttacagtggagccaaatgtattagcaaaatctccaagttgcaaaatgaatactcagaatcaaactatagattttttggtgatactttcagaaaaacaatttctttctaaagttgcaaatcatgaaagggaatgaaagtacattaacttgatttcttccctgtaattcaaacattcaacattcaaattaactttcataatttctcactttgtgacaagttgatttacacatagttggtatttcgattaatgcgatttatatagatggaattcttaaggataaacaaatgtttttgactattgcctggggttctttgggaatagatgctttctgaaaatttaaataagaacattactgttaaagccatgaatctagtttggagaacccactgcagttcattttacagagaaacaccttgt

SEQ ID NO: 469912 - DNA, 1000 bp, Homo Sapiens; identical to SEQ ID NO: 157471

SEQ ID NO: 469913 - DNA, 1000 bp, Homo Sapiens; identical to SEQ ID NO: 339499

SEQ ID NO: 469914 - DNA, 1000 bp, Homo Sapiens; identical to SEQ ID NO: 159085

SEQ ID NO: 469915 - DNA, 1000 bp, Homo Sapiens; identical to SEQ ID NO: 339502

SEQ ID NO: 469916 - DNA, 1000 bp, Homo Sapiens; identical to SEQ ID NO: 339503

SEQ ID NO: 469917 - DNA, 1000 bp, Homo Sapiens
gagacagaatcttgctgtctcccgggctgaaatgcagttgtgccatcacagttcactgcagcctcaatgtcccaggctcaagcgattctctcgcctcagcctcctgagtaattgggactagagatgtgtgccaccatgcccggctaattttttttttttggcagagatgagtctcactacattggtctcaaactgctgggctcaaggaagggaccctcccaccttggcctcccaaaatgttgggattgcaggtgtcaggccaccacatctttttaaattacagaaacttgcactgtcaagtatcaaatagggctatggatctaaaatttcggttgtatgagaatcatctcaggtgtgctttaaaatgaaaatttgctcttactacccatttcagaatttctgaggtggagccttgaaccagaacattcaatgaggacttaggtgctgctaatgctaatgcgttagcaggtctaaggataggttgaccataggccccaatttgtctggaacaggctcaatttaggtctgtgatcttgtatacttatttacagcaccccctttgctctcaaagtgtctaagatattgggtgacaacttagtttttcctatatagtaattacaacttgaaaagagacataggaggagcttcattattgtttcatgattctaacttgaattgaggaatgttaactacagatgcatataaggagacctattaggcaaaataggaaagtgtctcttctgctttcacctctctgttttgaacttgacaggctgttttgaattttaccatctctggatccctgtgagttcatgtttgctaatgacctcaaaagataaatttattactaaggtgttcacagcccttctgagaatttgcatatgatgagagcttgtactctgagagagaatagagattaatatgaaggactaaattaccaatcccatcaatacagccgtcaataataaagaacacattttaggccaggcgcggtggctca

SEQ ID NO: 469918 - DNA, 1000 bp, Homo Sapiens; identical to SEQ ID NO: 339505

SEQ ID NO: 469919 - DNA, 1000 bp, Homo Sapiens; identical to SEQ ID NO: 159086

SEQ ID NO: 469920 - DNA, 1000 bp, Homo Sapiens
ttttttttttttttttttttgagcacaaaactggtccaagtactttattgatgcgccctgacgcccaggccagcaggccagaccagtctacagtcaagtgtagatgggagggcagtaggtggagacgcctggaagagccgagatggagaggtctgggcattcagatgggacatccttctggtctggtttattgtgagggtttctgagggttggccagagcccagggacaaggaagatttttttacaaaaagacacccaccacgtaaaaaactactttgtgcccagcttggggcttcggccccatcgtctgtctgtccatcgctttcccgggatcccccaggcttggatctgggggatgctcaggccatcagggcagcaggcaagcaagacccatgatgcagactccaggtaacggcgcctttgccccgcagtggcgtccctggagcccagaatgcacctcagtgacccgccaactctcagaagggcggggggcttcagagcacggccagattgtggcaggacttggagcgggccttgagtgcccggcggcgtgcgctgcgggctgtcaggcgtgccaggaagcgacgagcgcgctgggctaggctggccggccgtcggggtgctgggggttccttggccgcactgtcccggcggcgcaagcgcagttggcgcaccacgccctcgaagagctcggccacattgtgctgcagcgtggcggatgtctcgatgaatttacagtcgaacaccacagcgcaggcgcggccctcttccacagagacttctcggcagcgggccaagtctgccttgttgcccacgaggatgatgggcacatggtctgcctgatgtgtgcgccgcagctggatgcggagctcagaggcactctcaaagctgcctcggtctgcgatggagtatacgatgacataggcactgcccccctgcaggcatgactcctggctccagcttttatccagtttctcggcctcccaggtgtccacgacca

SEQ ID NO: 469921 - DNA, 1000 bp, Homo Sapiens; identical to SEQ ID NO: 159087

SEQ ID NO: 469922 - DNA, 724 bp, Homo Sapiens
ttttttttttttttttttataattatagcttttatttattatatcttcattcaatcatttattcacaattagtctaattgcattcttgatgaataactgacttcagcaaaggagtcaatccactaagcaaagttcatttatttttcatgatgttcttctttcgatcttgagtctttactctcctggattcccaagagaactgcattagcctctagtacagttgtatctgttgttgctcccaggaacctagacgtaagttcaagatctaatagccgcaaccggaccctggttcctttctggtatttctctccatccacttctggtcttctacatacacaatgaaactttccaccaaaatctatgtacagatcattctccacaatatgaaagatccgtccaatgaccagtttatcctttgcaggtcccatctgtgtaagaggagaatgtctcagcatagatgcaaaggattccacattttttggagaacccttctgtaggggctccaccttctgtagaagctccgagtgccgctccaacgcgctcgcgaaaccgcctgcgcgcgtcttaggctccttggcattggaactaccactttcggatccactctcagtgcctacaccccgaaagggcctgaagaagagaaacactcgcagaaaatggctctcggcagccacagcacgggtccgacacagcgccgccatgacttctttacctctgacctttg

SEQ ID NO: 469923 - DNA, 1000 bp, Homo Sapiens; identical to SEQ ID NO: 339509

SEQ ID NO: 469924 - DNA, 1000 bp, Homo Sapiens; identical to SEQ ID NO: 339510

SEQ ID NO: 469925 - DNA, 1000 bp, Homo Sapiens; identical to SEQ ID NO: 339511

SEQ ID NO: 469926 - DNA, 1000 bp, Homo Sapiens; identical to SEQ ID NO: 339513

SEQ ID NO: 469927 - DNA, 1000 bp, Homo Sapiens; identical to SEQ ID NO: 339514

SEQ ID NO: 469928 - DNA, 1000 bp, Homo Sapiens; identical to SEQ ID NO: 339515

SEQ ID NO: 469929 - DNA, 1000 bp, Homo Sapiens; identical to SEQ ID NO: 339516

SEQ ID NO: 469930 - DNA, 1000 bp, Homo Sapiens; identical to SEQ ID NO: 159090

SEQ ID NO: 469931 - DNA, 1000 bp, Homo Sapiens; identical to SEQ ID NO: 159091

SEQ ID NO: 469932 - DNA, 1000 bp, Homo Sapiens; identical to SEQ ID NO: 339518

SEQ ID NO: 469933 - DNA, 902 bp, Homo Sapiens
ttttttttttttttttttgaaaatcactcctttgtctttattaaagaaacttagaccagacctggcaatcaaggggtgaggtactggccaggaaggtggagtaggtttcaggccctggggatttcaagtgcagactgatggcctgggaggggccaaagagaccagatcctggcagcagctgaggaggtgcccaagggcactttcaggcactggggccatcagctggttctgtgggcaggggttgggggttgggatgcagggtagtttgggctggcctggaatctccctgaggccaccctgccttgtctacctagatcatccactggtcctgatcctgttcgttgccttccatgtccacctcattgacctctccatcatccggtgactcattgtagtcattcatctcgtccatgtcctgcatatcctcatcatcctctgagtcctcttcactatcctcatcatcttcatcatcctcttcttcctcgtcatcatagtgctctgaggctggcttgccaataggaaccaggttgttgtctttctccgcgatgctttggagccaggcctgatgctgctgttcctgctgctgcagctctgtctcttccacacagggtcgatccagattaaaccacagagtctcagtcacacgagggaagagtgaggggaacaaagtggacatggctcctagactggctttgagtcctggctccaccacttactagctgtttgaccttggctgagtcacttaacctctctgagcctcagtgtcttcatcgcgccgggaggctgctgccggcggcgacccggaagcgcttcacccagcctgagcggaagaacccaccagaatccgggactcaccaaacgcatgcgtccttcgtctccttttgttttccccgctccccccc

SEQ ID NO: 469934 - DNA, 1000 bp, Homo Sapiens; identical to SEQ ID NO: 159092

SEQ ID NO: 469935 - DNA, 1000 bp, Homo Sapiens; identical to SEQ ID NO: 339520

SEQ ID NO: 469936 - DNA, 1000 bp, Homo Sapiens; identical to SEQ ID NO: 159093

SEQ ID NO: 469937 - DNA, 1000 bp, Homo Sapiens; identical to SEQ ID NO: 159094

SEQ ID NO: 469938 - DNA, 1000 bp, Homo Sapiens
tttttttttttttttttttttttttttttttttttttttttttttttacatcaaaatgtcttttatttgagacacaaaaatgcaaaattgctgagatatcaaacatttcccgatcagctacaatactgccactatgtacaaaagatctgatgataaatgtgcacacatataaaaatacagtatgcattacttatgtacagtacatgtgcaaaatgtatggcattcaaacatgatatggaattgatttcaggggtgcaaacagcaaatacaaaggcatcatggtttttcttttaaaaaacaacataaaggcaatagatgaatggacccccgattgccataattttttgttgattaaactagtgcttcaacaagcagggctctgtagattggtatctttctcctttttttcataaagtgagatgctaagacataatgtgacaatgaaaataagaagagaaacacctatcacattgcatttctattgcaagcaagaaaagaaaactaatttctacatagaaaaaaaactttgtattactactgaatgttactcttaaaccaacaaaacaactctatactattttacatgaaaacaataagagaaatatctacatcttagtgaaaattataaccttaaatggataatacctttttggggctgatttttgagatctcattagtctcaaattttaaataaaaagtgcctccttttggcaaatacttggcaatgcctttggttcctttaaagcaagtttgcattactattggttacttgaggtcaagtacttttggtagatactaaaccctttcctaaatgcttcctcttcctaccaaattagcaagattccttacagcatcacgtagagaggtaattgttacgagtttcagtattctataaactttgttaaagctttgtcttagtagttggcataaagctctgttaaacactatagatgtgatgatatctctgataacatattttatttgattcccgacagcacct

SEQ ID NO: 469939 - DNA, 1000 bp, Homo Sapiens; identical to SEQ ID NO: 159095

SEQ ID NO: 469940 - DNA, 1000 bp, Homo Sapiens; identical to SEQ ID NO: 339523

SEQ ID NO: 469941 - DNA, 1000 bp, Homo Sapiens
tttttttttttttttttttaattttcaagtaagtgtgtttattcccccaccacatacaaacccagccttggtgctcacatctctctccaaggatgatcacattgtccccaattactacgggacagtaactttgcctttctcttcaaattgctgattctgactgcttggacaacataaccgtttttggttcttggtctgtgggactgtcagctggtatagctttaacatcaacatttgtaattcctatatttatgttgtgtcttcgcagatcagacttgattaatgctgttaatatgatgcctataaacatccagacacagagaaaaatgttccctgccttaggaccatagtctgatgtgagctttccttgagccaatgtgaacaaaattccaaatatctgtgcagaagcattaagaagaccagatgaagtaccttcagattcagggtaagtgatttcaacagcaaattcaaaacccaaagggaggtaaccagtcatgaagaagccaagcacccctccagtaacaaacacgatgataatatatctaaggtccaatgtgaaagtaaagataaccattccaataaaagacaaaatataaactatcagggtagtctgtttgtatgttttagtataatccagccataagccacaaagaatagagcccaccattccagctactactagcgttagcccaatccttccagcattgacttcttctccctcataatatgtcaatatcatttgatttaataacgttgagactgaataaaaggcaccagtcatgataccataagtgatcaacagaaggacaaaaggaatgtttttaaacaggtttcttattgatttcttataggagtactcttcagggggactgtcttgaagagctgcttgagcctgacttggtggataccgaggtttttctttgaaggcaattgctgttaaaataaataaaagtgtggcaacagctgatgttccataaaacatggtgctgatattacaagc

SEQ ID NO: 469942 - DNA, 1000 bp, Homo Sapiens; identical to SEQ ID NO: 339524

SEQ ID NO: 469943 - DNA, 1000 bp, Homo Sapiens
ttttttttttttttttttttcatgggtcacttactttaataacaatacatataccatgttaacaccatggaatgcaaattcagattagacaagagaatttcacaagtgtgatagccttctgtatattatataaaagtttgggtatactgtctggccaaaccagcttgctcataagtcattaaccaaatccattataggtaatttgttcagttcaatgtttacaattcttatggaaaaaattagcaacacacacatttaaaacgtgttcatttacctttgcgtgagtgcttaaaatacatatttctatttcaagatgacattttaaaattattctaatatatcagcagcaaaaatataatttgcaattacaaaaaactaaactagaaccttaagttattctcatgtttacagttggtgattctttaataaatactattatgcagctctattgtttaagctttctggatttggtttaaacacatgcatatatattgtcaattgtgggaagctttacaagttatattccatgcactttttggacagagttctaacagagccagccagtccacaaaacaggcagacgaaagttgaattaactggggcaaataggactcttatgcaacatccaaaatatctgacattctgcagcaaacagggagtaccttcaggattggcctgttatcttctttagaactaagttcatcttaaaaatttaagaaggtggacatttcaacaccatcaagtgcatttaggtgacatgtttaagttaacttgacttccttgaatgacctagttagtaaactagtcactagtaattcggtcaccaagcaaatcaagcctgcaagaaaggaagccaatattcaaaatgccatgttaccatctaaacccatacaaattagtttatttccaacaataataggtaactttaataataagacatctaactaaagcaagctcctccaacaagaccaagacagcatctcttcttctaaggctcagg

SEQ ID NO: 469944 - DNA, 1000 bp, Homo Sapiens
tgggtgatttatattttattgttatatgttgacatcctcagtaacaatgttaaataaatatttgctttaatttgcttagaacaagtacattgcatgaagtttgtataattattataggtcacaaaaaaacagaatcttcttcacatttatcatagtagttgtttggaaatgaaaataaggatatatcttggcttctttctggacttccttaacttagttcccatacttcctaaatgatgaagtgattggtattctgctgtctttgcttgacctttcataatgaatatgatcatttctaatattccactaagaaaaacacctaatacttttctgtgccaataaaatgtaggggatttttttcttcttatattttctttcactccttgttctgcaccttgaaaatggatatttgctgaaatgagaggagctgaggaactgaagaaaaggagtgcttcaaattgtatatatgcattacaaatttatgtcaacaagtcaaaattctgacaaaacttctagagaacaaatgaatacaggctgtaatgtaatattgtattatctatttctctatgtacataaagtttcaactattgctcacagatgacagagttgatctggcagaagcaggatgcttacgtgcggaacagagctgggaagaaaatacatgcatcaagcaaacagtttattgagatcagtcaaatctagctgttttgcaagtcttctccaattctgtatctctaaaaatggcctccacacccaaaaaacaaaaaaaaatgttatctgttccatgaggcttttgtctcttagataccagtttttgaagtaatccagtcccgcaaggccgtaactctagtataaacaccaggcttgttgggtttcgcacattcatctccccagctcactattccagcaaggtaccagatatctctagcatctgaactaaccagtggtcctccagagtcaccctggcatgcatctgtttttccttctaaggagccagcac

SEQ ID NO: 469945 - DNA, 895 bp, Homo Sapiens
ggcacgaggttcagttcaaattttatttgtatacaaaaatatattataatgggaaagcttactgctatttccaactatatataattaattacaaatattttcataaaagcactttaaattacaggaaagctatgttttaagagaaaatacaatattagcatggatcgtctgttctaatatgctgcaagcaggtaaacaaagtcagtttcactgtctaaattgcccagaaatgggatcaagggctgattttaaggtgagcctgagagtggcctggtagaaggttgagtgcacgtctttgtcccctctggcagcagattctagtagctgattttagcaggtcctcggaactttctgaagcttctcccttatgatgaaaggacccagaacttcttgtttcacatacttgctaaagttttgtcaagatcagcaatgaaggcttctagctcttttgtgtctcctaatttagctttctgaggagtgacagtggcagagagaagagctggggtagagtctgttggagaattcagtttttcatcactgaagctgaagctgttcctataaagtgaatctgcactctccgagtcgctgaagccgctgctgtcgctgacactggcgctgctgcgccgcttcatgcgctccaggtgctcctcgtagtggaagtggcgctcgtggaagggcgacgcgaagtcggccagcaccgcgtcaaactcgcacagcgcgtccgacaggtcctccgcgggcggcttcatgaggcggctcagctgggcccggcgcgcgtggccttgggtcctgcgaggtggcagccggggctattcgggggcttgctgtcccgcacacttcagccctgccagtcccttcggcgctgcgctccagccgcgccggtcgacgcggccgc

SEQ ID NO: 469946 - DNA, 943 bp, Homo Sapiens
tttttttttttttttttttttagcatctggtgaatttattcagcataaccacaggcattatcttcatgctgtcacacacagacacaaacacagatacagcacaatatccatatttagcccaagtgcattccttctgaggctcatttatatgtcttcatatgccacagcccatcatttaaataatggatattttcaatgccaattcctttgttgactttctcaatgtcttctgcagacatcttcatgactccaacacatagagcatgctgttttccttctgccatgatagcaacaatggtatctactgcagcagggtaaagcttagctccaggagaagttaagcctggacacatgatatttgctccactgagtacaaatttgatggctcctttatcaacctgctggtgtggcaggataaaaggatatttgtgaagtaatcttagggttggataaaaaggcccttctctttgtctaaaaaagagtaattctccatttactgtaaggatttctatatgttcatggcatcggactattttgacaggatctttcttaggcatgatttgattaagccatggttcaatacctggaaattgctctatcaattgattcttaatacccttaataactgaagttttcaactggatgcagttggacacattttctttttcatcaaatttcttgaacatgatccaaggtgaagggggcgacgatagggaagggcccggaatgggaaagaaattgaatttgcaggggtccggcagatcccctcacacgaggaaggccggcactgacagtcggagctgtagtcgttatccggaaaacgagagccagccgcgctttacggctctcagtcaaatctgactacttccgctcctctggactccacgtaggcgcttttgccggctccttttaggcaaccggttcctcagcagttggaggtagc

SEQ ID NO: 469947 - DNA, 1000 bp, Homo Sapiens; identical to SEQ ID NO: 159096

SEQ ID NO: 469948 - DNA, 1000 bp, Homo Sapiens; identical to SEQ ID NO: 339527

SEQ ID NO: 469949 - DNA, 1000 bp, Homo Sapiens
aaaacaacagaaatttattgtctcacagctgtggaggccggaaatctgaaaccggggggtcagcaagcagggccgtgcccccctgtgaaggctttagggaaggatcctgtcctgcctctccgggcagctggtggttttctggcagtccttgggttccttggcttgtggttgcgtccctcactctgatctccgactccttcacacggctgccttctccctgcgtgtctgtgttcatgtggccatctccttagaaggacaccagtcatggtgggttaggggccaccccagtgacctcatggtgactaattaatctgcaacgactgtgtttccaaacaaggtcacattctgaggtgcttcaagttaggacttcagcctatcttggggtcctcagccctaaccagggcacccactgcctccggcatcagctcctgctgggcaggcgcccggcctggtgctctgctcccctgcttagccggtgggctgcccagcatgacaagggagatgggtctgcgtgcatctcagctgcagaaaggaagcccctcacctccctttcagttgctgctgggtcatcaccgtcactcctgcagcagggcaggaccaggtcctacagaggccaccggcttgtaggggcctcgggaagcaagttggacagtccaaagttgtgaaaagtaggggccgtggagccgggcatggtggctcacgccggccattctagcgatttgggaggccgaggtgggcggatcacgaggtcaggagatcgagaccatcctggccaacacggtgaaaccctgtggctgcgtggttgtggttgtgaacgtgattgtgtcgtggtggggaccgtggttgtcatgatcatagccgtgtgttgtggttgcatcctgtcatggtttgatcacagacatcaaggagatgtctgacctcagcagaggtgccctctagggttacagagtaggacagaagcctgtgcttacttggagagtccagaaggaacgcagatgtc

SEQ ID NO: 469950 - DNA, 861 bp, Homo Sapiens
gcggaccaggcagggaacaacctgggaggaatcaaattttattttggacatgttacttctgaaaggctaacagacttccaggcagaaaggtccttgagggaaacattctaggggtctctctgggaggcttagatcaaggagctgagaccaaaaggagaatgggagggaggagacgagtacaatagagttggagccaaggtcctagaggcggataggtggattcctgagggaggaggaaggggctgaggttgctggagcctggcagcttcttccggagccattggcaggactgatgcaaacagctctgggtgggaagagggaaccaggatatcctcctgtgtccttccttttctgcagtcatcctgggtggctgccagatggaattccttggatatcattgcttggaggtcccctgcatgccagaaatggtttgctggctccatgtggcaaagtcggtcaggattaacgtgggggggacgagtttccttggagctgggatctgtgttaaggagctggggtccttgtaaagctggggtctgtgtgccgagagctctttgagagtgacttttttggtctgtgcaagtcatatcacaagtgccaaagtcaagactggatggaggactgcctggctgcaaaccaattcttcccaggctgtgctttgcccactggcatggagcccacggtccgggggtgatggtttctgttgcatttcaaagccactggggcgctgcatagatggctggctgcagagtctatttgagacgaaggcaagaagtcagggcccatggactgtagattccacccttgatcgtctacttctagatgccatcctctctgggagtcatgagtctcgatttcctg

SEQ ID NO: 469951 - DNA, 1000 bp, Homo Sapiens
tcccttaccaataacataactttatgttctatgacaatgacatttatttaacacgttatttcacattgtacaaatccttagattctctttattcactggtccatttctacaacaaatacatccaaaacactatataataaaattatttacaacatttccaaatgagaagattgcttttgcccccactactgctattcacacacagtacttccacggcacaatacatcattaggagatctaaaaatgctcaccctgtactctaggctgcttaggaaatgtgaaaactagtaacatttataatggcattagctcctttcaatacaagacaacattttagaaaccttgaacttcaactcgcaacaccaaaagggctcaacagtcctgctttccccattgcactttatgaaacaggttgcagggactaggaaaagggccacattattaaaattactaactgtacagaaattgatttaaaaaagtcacagctcaaaattgctctttgtaaaagtcacacacatttccaagtatcaagtcgcagtcctgcttgtttacttggattttcttcgcttggattgcaccgcactggttatgtctttagtagagctggaggctgaagcaggtcgagaagatcgtttacgatgtccattttccacactttcagaggccacagttggctcttcagttcgggagtttcttcggcctgggattttggacttttcaactatctctttgggctcactgctttgtccagagactatggcagcatttacctccagctctggtctggcaacagaggcctgcagtgctgtggttgaagtttcctttgagactaaattctgcgacggggctatgctgggtagaagttctggatgggatcccaccttctcctccactaggccacccgcaagtgactcagatgctatgccaccatgattgctttttgtggtcggtacggcggagatgagctcggagggtaccagagtggttactatcgagcgta

SEQ ID NO: 469952 - DNA, 1000 bp, Homo Sapiens
ttttagtcaaccaagtaagtgattttattattatcaactataacattcaaatcagattacataaaaatggttctataaaattatattttaattacaatttcctattgaaggactataccttcctgacctttccccacagtgattcggcacataaaacaggtgctgaactgtagcagttgttttactccatcctgtaggttagagaaactcatcagaagaaagtttcaatcacttcactgttattttctgcaattcttattctcttatagccgataatcttcaggtggagtccacaatcttgggaaggcgtctatttcttcttgtgtgtactcatctagacgtttaggtatttttcgtggttgaggaagctcctctactaaattcttaagaatatcttctggaatatactcatctggaaaaagatgcaacctttccatcattgttcttctgtgaaggttttttggcagcatgccataaatagctagttttacaattgccactggatccctcaggtgaagctgagcagctgttacttgtctaaatccacctgggtagccagtatgcgaagagtatactttttgttcccatttgtttccagaaaatgcaatgtgtcttgtgttcattataacaacatgatccccacagtcactcagtgcatggtacacaggtttatgtaatccctgaagtcttatagatgccatagcagcaagtttgccaggtggctgcattttcccatctaagagataccatattctagcaaaagtggcccattgctggggcgccctagagaaactcgacatattcctctactagcaggaccgtacgtccttctcctagtagccacgccgggtcactcagccttactggcccggcgggaaacgctaacacccaagcaggacagttcctagcccgtcgagcacttgtcggcttctccctcttcctcgagtttcctccagtcttctccacggcagcaatttcgtcatgaaaggagcatataatg

SEQ ID NO: 469953 - DNA, 1000 bp, Homo Sapiens
tttttttttttttttgtgagttctttttctttttattggcaaagtaaatatatttttatgaaggaccaaagaaaatatacgtaattgtaacatatgtacaccagcttcatagatttttttaaatttcaaatttacacaaatgttgatatgttattaaaagatattttatgtggatggacctatgtacagtttatttacatacattcataggatgtgaaataaacctgtcaaaacaagctagttcatttattaatttctagacaaaataaggaatgcatttctaaatcagggttgggaggctctatctagttctctcacacccaggacagcctggccctctcctcccaaggccaccctaaaggctggtgtctggatttgtctgggaaaccggaggaggggacgagcccctgggtacaggcccttctggctctgtctgccctgcacatttaactcaagcacatgcactgccagccccctagtgggggacgcttttcacctctctcccacatgagggcccagcggcccggtccgcccccccccccccccccccccgctccagggacctgcccacaccctctggtgatcatgctgagcaggcatcttagacaaagccaccctcacaccacagtgcagccctggacttctggcctacttccttctcctccagcatgactctctctggaaacccaacatttcaaaactgcacatttcatcttcccctagcactaaagttctggccttggcccaggatgggggagcccagtgggagaagggccaggtccccaaaactctgcctgcaaccagcggctgcagcagaggcctggccaccgcgggaaggcacgaaggcacgaaggcacgaaggcctgcctccagccccgtgcgcctggggcccagcccccagggacgcgggttcgaggctctaagtactcccgagaaaggcagcggttggcgggccctgggttcacacctcccaggcttcagaaggtgggctggtaacatt

SEQ ID NO: 469954 - DNA, 1000 bp, Homo Sapiens; identical to SEQ ID NO: 339528

SEQ ID NO: 469955 - DNA, 1000 bp, Homo Sapiens
taaagaatcaaagcaactgacacaataaattttattgtttccataataataggctctggacaaagacaatggagacaatgacaacacatttaaactcctataacaaattaatctgttacaaatttccagtggctcaacatattaaaatgcaaaacatataaagaaaaaaacaagaaatataaatattcagatttttgcagtacaatgaaatgtcttttaaaaaaagtttgttgtaattgtgtatgtaattctgacagtaattcaaaacacaaaatcacacattttccctaacttcccatgttctggatctggggactgcaatattacagaaatatgcaaaaataagtttagtgctcagagataaataattttccttatttcaatgcatcaatgcgcaaaaatttcaattcaaaaaagccaaccactgctatatgcagataaataaaacatttgacaacacttttataatcaaacccaacattatacaaaaaatgtgtggcacatgcacatacgtgtgcatatgtgtatgcaatgcctattttagaaaaaaggtgtcttgatgaaaatgattttgaaaatagtcactgacacacattatatacaaaaccttttatataaaaaattaaactattttcaatgaaattccatgttcacatcctatctgaaaattgcaattgaatcataaataggtctactaacgaaatcatggctaaggcagttctctttccaagggttttcttttatatccacctgatgtcactaatactaatgtagtcaaatatacagatgcaacctgacatgcctatgcgttattacctggagctctgttcactgttataatgggagaatttacagttgctacaaagaatatttttcttttttaaaatatactggtttctctattccaaattaagcacttacttaagacattaagaggctgagaagccactccatttggtgtcaatatcaatagccctataagaaagaactctgtattgga

SEQ ID NO: 469956 - DNA, 1000 bp, Homo Sapiens; identical to SEQ ID NO: 339529

SEQ ID NO: 469957 - DNA, 1000 bp, Homo Sapiens; identical to SEQ ID NO: 339530

SEQ ID NO: 469958 - DNA, 1000 bp, Homo Sapiens; identical to SEQ ID NO: 337069

SEQ ID NO: 469959 - DNA, 1000 bp, Homo Sapiens; identical to SEQ ID NO: 339531

SEQ ID NO: 469960 - DNA, 1000 bp, Homo Sapiens
ttttttttttttttttttggtttttttgtttttattcattttatgattaaggtgtttatcactactccagttgggtaaaccacattgaagaatctgactgcaggtctttagattcagccaaatgctttccatcaattttgctctaaaaaatattaaacattttaatacttcagccatgctcagaacgctgcagtctaaggatgaacttcaacttgcccatgccaagttagggcgacaggagcagaactaaggagctatgacgtctaaaagaatcagagaatctggcttaagacgaagagagcttctgttccccaaaactaaactgtctagtttttaaatccacccttaaccgttcaagaaactgaaaaagtcaacttgtttttaaaataccacacaggtatgcaatcttccatgatttgttttgcatctcagctagcacagggaaacccttgaaaaacctagctgtcagaagtttttcctgagggaaatcattacgcttctactgctgagcttcatgtttattctgtgcgtcggggaaaggagaaagcaatgggacagagaagggaaaagttgcgactgggtgacaaattcattaggtgcatttgaaagtaaatgcaatggaaaaaagtaacaaatgctaaagttttctaaaagtttaatgaagccaataaggcatataaattgtgttctggcagacattaagacctgctttctcttaccaaagaaaatggcacgttttatcaaaatttgacaattcagagtaaagggtactgagattaagcttcagagcaccaacttaaacaaaacaaccaaaaaattgttatccaacgtggaaagaggagcaagaaccaaggcataaaggggaattaaatatgtgttcctccatctcaaaatccttttaggaataggagttctggccacttgtgagcaacacattgcaccaccaaaccccaattccagaatctaaatttacgatagaaaaacaaaggtaactccaaac

SEQ ID NO: 469961 - DNA, 1000 bp, Homo Sapiens; identical to SEQ ID NO: 339532

SEQ ID NO: 469962 - DNA, 1000 bp, Homo Sapiens; identical to SEQ ID NO: 159098

SEQ ID NO: 469963 - DNA, 1000 bp, Homo Sapiens; identical to SEQ ID NO: 339534

SEQ ID NO: 469964 - DNA, 1000 bp, Homo Sapiens
tttttttttttttttacaaatactccatgttttactagatgtgagcaaatcattaagcagcaagtttagtttggcgacaaaattgtaacatctactacaatatatcttcaaaagaaatcattcacaaccacactcacatgacaagaagacctcacagactcaaaataaataggaaaaactcatacataaatactgtcccgttccaacactgagactctcagtcatgcagaaaacaaattgaggcattgagtggaggcaaagggcacttctgcaggaactgaccctcaaattagggattctcaacccgtcttcctaggatgagcaatggatgatttgcttggaggctccttgttcagaagtatcctttctccctgtcacaggcgtcgatgagcccctcaggcatttgaaagtatcaaggtctccctccaggctccctgtttgactccatctttcttcattctcctcctctgctttcgccaggttccattttcagtgcttgggccttttaagtcccacattgcctgcatcccacgggcccattccttcctcttgtcacgctcagccccgatgaacccctaaaccacaggttgagaatccctgcttgaagatcagaagttccaatgctggattacgtctcctccaaatgtgtatcactttgcttctttgagtttgtatcttggatgccacattttttcacatccatcattctcccttttcttaaacggaagatgaatgtcagtgctacaccaaggcataataagatggctcccagaattaccaagtgagtcctttcatttggaggatgtgccagaggtagttctgggatgaccaattcagctgtatggttttcctcaggatctaatctcctaaaagtgcagtagaaaatctcattagttgttgtgttgattctcagtgtgctggtcacattgaaaagcttctcctctctcttggaattggtggtggtggtcttaccactcaggacttgatggtcactgcttgt

SEQ ID NO: 469965 - DNA, 1000 bp, Homo Sapiens; identical to SEQ ID NO: 159099

SEQ ID NO: 469966 - DNA, 1000 bp, Homo Sapiens; identical to SEQ ID NO: 339537

SEQ ID NO: 469967 - DNA, 1000 bp, Homo Sapiens; identical to SEQ ID NO: 339538

SEQ ID NO: 469968 - DNA, 1000 bp, Homo Sapiens; identical to SEQ ID NO: 159100

SEQ ID NO: 469969 - DNA, 1000 bp, Homo Sapiens; identical to SEQ ID NO: 159101

SEQ ID NO: 469970 - DNA, 989 bp, Homo Sapiens
tttttttttttttttttttaagagttcataatatgcctttattttgtaatttataaacaacttctgacttgccctttgaaagttaattataattgatgactgcttttcttagatgcttctgaagcccaagagaggggcagaacgtagttcttgatttaaaaaaacagaaaggggaggaggatgaccttaactacaaataatattccactgcaacattattgctgtaaaacttccaagctggctgttcttccagatgctctcttttgatggctgtagtggctgacagatttatatttacatgttcaaaacaattaatgcttccatttattcatagattctctgaggttcccgtagaaccacaccaccttctgtcatggcactttgtagtcgtttcatcgagtctgaggctgcctcccacggggttggttggtagaccatgaagttgattcccgcctctaagcatctctgtgccagcactcgtcctatactctcacaagccaccacatttctggtactataaaggtgctttttaatagcccactcacgagtggaggccgaaaccacaaccttgccattctgatgctccacaagtgcttctacatgatgctgagtccttataactcgcaacctgtgccagaactcacgggagggaaacaccgtccgccagccccgctctttcctggctacagataaaagctccaggttccgggggttccggttggtgaattctggggcgacagcttcattttccacagggtccacttcaggtttcgctgccggctcggagctggttgacagggctgcgaacctgcacccagggttcctgcaaaccgagaacaacccccaaaaccgcgaccgaagcgccatcgctgagacgatctcggaaaagcctcgcctctttttcctcacggacgactcagtcgctcgccaggagcagccatataaagtcagggacaagcctttggctgctgtagatccccaaactctcc

SEQ ID NO: 469971 - DNA, 1000 bp, Homo Sapiens; identical to SEQ ID NO: 339541

SEQ ID NO: 469972 - DNA, 963 bp, Homo Sapiens; identical to SEQ ID NO: 339542

SEQ ID NO: 469973 - DNA, 1000 bp, Homo Sapiens
tttttttttttttttttcgagatgtttgctctatttatttcttttagggggcaagacaggaggtaaaaaaaaaaaaaaaaagtttggtttttgcttcaaagagcttttctcagagcagggatttattttcattacatgcaacatggacaaacactgttctggttttcatgacaatttgaattcaaagtaatatgtttttctaaaattcagtgtatttatttggccatatggatgctccttgtgttcttggtcacatattaaagaaactggcactttggctgcaagaacaaataaaaaatatcataaatccaactggtctttgatttgggtctaggttaataactaaagaaccattcagcaataatggcttgaaacatttatatatcctatgaaaccgcaattagttaagaggctgctgattctaataactatgacaccagcaagggagtgaggggagaaatgttaactctggatgccaaattcagagcaaagtatctattatctccttctcacttttgcagtatctataaataaagtggtggggggagaattatatgaataatgttaaataaaagtgcatacagaactgagaaatattttcatggaatttgccacttagttcttaaaattcttataaggaaaataaccatttacaacaaaagactagttacactgttgctgtttagaacatgagagcaaaatgagtaacaatcaaattctctggtttaaacttaattatcttaaaacatgttattctgtaagttgacatctatgccttgaaaattcaaggcagaaagtaaaatcatttagaaagccagaaattccatcaatacatctagacagatgtttgcttgtagtttttggtatccaaaaccttttttccacacatcgcacagatgccttttttgtaggcacagccctggcagtaatgagaacctggttggtgcacagaacttttacaaattctacaagtggagaacttattctttccatatggatc

SEQ ID NO: 469974 - DNA, 1000 bp, Homo Sapiens; identical to SEQ ID NO: 339544

SEQ ID NO: 469975 - DNA, 1000 bp, Homo Sapiens; identical to SEQ ID NO: 339545

SEQ ID NO: 469976 - DNA, 801 bp, Homo Sapiens
ttttttttttttttttttttttttttttagtttggtctgaataaaatccagcataaatgtattattttattctgggtataatggctcggtgtctttgtcccaacagctttcttcttaagggcaaaccacccttaagtgaaacttgccatttgtttttgttttctttttaagtctccagatcttgctaggacacttcttccagaccaacagtcagatagttgtggcacgtgatcctatttgaaatagaggtggtttaaatcagccaagcttggtgatctggaggtctccatttatctttatggtgtcaattgcagataacgtttgaatgcgatggtaaaaatcaaaaagttggtgtccatccacaaacactcggaaacgtgggtactcacaaagaatttccaccctgaatggctggtctggaatgaatggaaagtaagggattgctgactgttcttcacccctctccccagatatacaagaatttctgagtagctgccgatctgtgaacacagctttgagttcgattgccacatcggcaggagggtcttctgagtccccacaggtcaagctgattgcaaagctctctgggttgaggtctacgatgcccatcactaacaccttcttgcctggtctcatgccacctttaatgtgcccacaaaatggaactatcagtcgtgggaagtacacgtccgcttgaactggagagctcaaagagttgtttaaatggccatcatctagtttcaccacggcatcgctgtcggccactgatcccgccatcttcttgcccggcgcggcccgtat

SEQ ID NO: 469977 - DNA, 1000 bp, Homo Sapiens; identical to SEQ ID NO: 159105

SEQ ID NO: 469978 - DNA, 652 bp, Homo Sapiens; identical to SEQ ID NO: 159106

SEQ ID NO: 469979 - DNA, 1000 bp, Homo Sapiens; identical to SEQ ID NO: 159109

SEQ ID NO: 469980 - DNA, 1000 bp, Homo Sapiens
gaggtttgaccgggaatttttattgtgtctctgccccccgtccgcctcccgcacagtccggataggctaggctgggcacgcggcccccgaagcggtacgtgtactttcgccccccgctcttgcgcacgatgtcgcggcgatagtagtagcgaaggccccggctcagcttctcgtaattcatgcccggctttctcttgcgctcgccccacagccgagccacctctttggggtcgcacagctggaactcgcggctgttgccagtccaacggatgcagctgctacgcgccccgtcgtggagcagctccaggaggaactgccacagctgaatgggacctcggtggttagttttggggcatcgagccaaactggcacggtccgactgcgggctcggttcggagcaaacggtgagagctgagctctggtaccgcttcaaagaggtggtgccacccgcatgcagccccgggttccaggaggtggtacagtccgggcccgcgggcccgccccacgaaatggtacagtccgtgcgcggctccccgcccaggccactgccccagtaggtatcgccgtcgggccccacagaacagtcccagctggtgttgctcccggcggcctgggcgcgcgaccacgaggtggcctctcccgccacggggacgcagttctggcccgcggcgccttcggagccggcggcggggatggggcccgggccgagaggggcggggcccagggtctgcgaggcgccgctccaagagtcccaggctgtgcacgccatgtctgtccagttcccggaccacggaagagcctgagagtcgggctccgccccccatggaacttctgggtgcagtaacgcggagccccagtccagctgtgggaagcttgccagggatgagcttgtacctttccagcatgtctctgctgtcgctgtcggcgtgtccccttggagtgccagatcagggaaacagaagcctaatttggctccttctgcaggcgataagggattagg

SEQ ID NO: 469981 - DNA, 1000 bp, Homo Sapiens
ttttttttttttttttttggtgggtagctaatatggtatatttatttcacagttcacatctttatcattgtttttatataaaaacaatgcttaagtggggtttcagaacagatatttccttttaaactttttttaaaaaatcacaaatatgattggctcatacaaccacatttcatctcttttcaccagcactcccacccattcccgttagaaatattttgttaaaaaaatcaggtgatcaaactcatagaaactgaattgtgagaagtataatgggaaaaggaatgagaacctgtggctctagggagttacagaagggaaatcatcttttagagccttggtttatttctgacaggaaaggtaaagccgtgcatttattagaacaggaagctaagaaattaaagatggcgagattgtctaaaataactgaggctgaactggaagcctttaccctggcacactcaaaaatcacttttggtactgttggctgagactggccgaggaatgtgcatctctggctggatttggagagggcagctcacccgcaacctgaacataggttctgtaacgtgtctcattgttactcagaaagttcagtactcagggccagcacgctcctgctcatgcgggataagccactcagagcagaccagctggaaggatcagggatctgagcaaagccaagtttacttaagctaagccacttgttcctgggtcaagcagtttgttttctaataagcatcattcctgatcattagagcaaagggatgaatgctcctcttggaatgatacaggggatctgccactgggagagtgttgctcagtgttagagtagcagcaatgacagaatgacagcgactctctgagtcaacccagtacttttagtaccccatcactatgtgaataaaggcagctagaaaatggactcaattctgcaagccttcatggcaacagcccatattaagacttctagaacaagttacaaaaaaatcttccattt

SEQ ID NO: 469982 - DNA, 1000 bp, Homo Sapiens
gagcagcgcgtccaatgcactgaggacaaaccccaacccgcccgaggccctgggctcctctaagcctcactggagatctccaccgaggtcccgcgtgctccctgaggaaagggggctttcgcaactggtgggcaaccccgccgggcttcaccgtgggctagcagccggggtgtccgcactgttgtcgctctgccttcattcttggaattggggcgcacttggcccctgtttgggcagtgctgggggtgaggggactaaactacagcacttttcagaaacatgggggacatttacacaagagagggctccccaagccagcttgcactcacaaaatatagcatttcttaaggaaccaatggagcaggaaagagagggagtgggatagggcgaaaccccaaagccacttggtttttccaacacgtaaacgagcaaatacagagtcccccaaatacctcagagaccaaccacacagtcacttctatctaaaaagaaaaaaaaaaagaagaagaagtccaagtcgctggagagtttctggaaatcaagcaccaaacacccacaaaggaaaacagcaacaacaacaaatccgctgcccttgagcgctcccgccagcaccgcgccgggtcagtctcctttggggcatttctccttgctcatctttttcattttcatcctacggttctgaaaccagattttgacctgtctctctgttaggttgagaatcctggccacctcgtagcgccggtcccgggtgaggtacatgttgaagaggaattctttctccagctcaagcgtctggtatttggtgtagggacagcgctttttccgggtggagcgagcgtggatccagttcgcggcggggttgtttgggtcaagttgctgctgctgcggctgcgaatgctgcttctcctcctccttcagcgaacagcctgggatcgggtggtcgctgcaagctgagggctccgacgagccgcccgtcccagtcgcggccccgatccctgcc

SEQ ID NO: 469983 - DNA, 1000 bp, Homo Sapiens
tcagtgccctggacccccattttgagggctgcagtctcttggagtgggtgaggagtcaggctctgcatcggtggtaggcagggagccccgggccccccggcattccgggctgtagtagaaggagaggaggcggaaggagggccgcagctcctcctgtatgctgtccagaatgtgtgtgaaagatgggcgcaggcgtgggttcggctgccagcagcggctcatcagctcctgcagctgaaggggacagccctccagctcctccaggaccccgccatccatgacgaacttcagcacctgctcattggacaggccctggtagggttgttctgccagggtcacaatctcccagagtaccacgccaaaggaccagacatccgagtgggtggtgaagatcccatctttgagggactcgggggccatccagcgcacgggcagcagccccttcccacccttgcggtaatagtctgtctcatacacgtcccgagtcatcccgaagtccccgatcttgacggtgaagtcctgggacaccatgcagttgcgggctgctagatctcggtgcacaaacttgttggcagcaaggtaggccatgccgtctgcaatctcaccagccatttggatcatttcccccaatgctggctgtgggagcccagggttgttctctgcctcaggccgcaaagatcgaagatggctcttgaggtccccacgggtcattaactccatgatgaccagagttggctggccctgagataccacacccaggagacgcaccacatggtgacacttgaaggctttcatgacagaagcttccttgaggaactcaatgcattcccgtgggctggccagctcattcaccgtcttcagggccacgggtgtggactcctctccagcctcaagtcctcgtgccagcccctcatataccatcccaaaagagccctggcccagttcccggattatcgagatctgctcccgaggcacctcccattcatcagggacatacata

SEQ ID NO: 469984 - DNA, 1000 bp, Homo Sapiens; identical to SEQ ID NO: 159112

SEQ ID NO: 469985 - DNA, 1000 bp, Homo Sapiens; identical to SEQ ID NO: 339551

SEQ ID NO: 469986 - DNA, 1000 bp, Homo Sapiens; identical to SEQ ID NO: 159114

SEQ ID NO: 469987 - DNA, 1000 bp, Homo Sapiens
tttttttttttttttttttttttttttttttttttacttctagacctttatttctctgtgaaaagggggaaaataaaaggaataaaataaaaacggcacagttgacacacaaaaaaaaaccaatgatggggaggacgggaggtggagaagtaaatgggggaggggttcccattacagcagcaggatccagtgacccgggatgctcacatctctccctgacgtgggcggagtagccccttcctcccaaggtcactgtcctgtccaaccccgtgctcccctagcccgttgggaggtggacagtgagacatcttcccaggctggggagaggaggaaccgtgctgggggaaggggcctggggtcagaccatgcacagggagtgacagccaaaggccccccagtgtctccccaaagagggacttgtgggggttggagggtggacaccagaggccagtgtttgctcctcttccagcatcaggcgagagacagaacagtcagagcctcctgggcaaagtatttgacgtccacatcctggtcctgggtcagcttctctaggatgggcttgacttcactctgcaaggtgctgttgtccaggatgggccctatcttctgcagagacttggccacattgaagcggacattggcaaccgggtccccagccatgcgcagaaccgtgggtagcatgtgcttggtggtgatgtcctgcccacagacctcagacagcacattgatgcagaagagcgtagtcatgcggtgcaggtagttggggtctccggacatggccaagaccttggggatgattgtggcatgggcccactccttcccaaacttttccactagcttcttcaggttgctggtggctgcctcgcggatggcatatacatgatccacaagccaggccatgcacaaggagttaagtttctcatcaaagaactccactcccagctgtccagccaggaggggcatgtactcaatgatggccagccgcacccgccacttggcg

SEQ ID NO: 469988 - DNA, 1000 bp, Homo Sapiens; identical to SEQ ID NO: 339554

SEQ ID NO: 469989 - DNA, 1000 bp, Homo Sapiens; identical to SEQ ID NO: 339556

SEQ ID NO: 469990 - DNA, 1000 bp, Homo Sapiens; identical to SEQ ID NO: 159115

SEQ ID NO: 469991 - DNA, 1000 bp, Homo Sapiens; identical to SEQ ID NO: 159117

SEQ ID NO: 469992 - DNA, 1000 bp, Homo Sapiens; identical to SEQ ID NO: 339559

SEQ ID NO: 469993 - DNA, 1000 bp, Homo Sapiens; identical to SEQ ID NO: 339561

SEQ ID NO: 469994 - DNA, 1000 bp, Homo Sapiens; identical to SEQ ID NO: 159120

SEQ ID NO: 469995 - DNA, 1000 bp, Homo Sapiens; identical to SEQ ID NO: 159121

SEQ ID NO: 469996 - DNA, 1000 bp, Homo Sapiens; identical to SEQ ID NO: 339563

SEQ ID NO: 469997 - DNA, 1000 bp, Homo Sapiens; identical to SEQ ID NO: 339566

SEQ ID NO: 469998 - DNA, 1000 bp, Homo Sapiens
ttagaactttccgagcatctctttcttccgcatctcatcaatgagctcttggattctttggtttctggtcttttcataggggctcggtcgtcgagggattaggttgggtggctggacttcatcttccaggccatggattttgtagggttcatctacggcattggtttctgggtgatcctctgtggcattggtgctggaggcattgagagggacctccaggggggtgcttggtgatggccgcacctccatggctacagtgggcactgggagggtaggcatgaacacgtcaatgtcgttgtgcttcccaggcggtggctctatcctgccctccacgttggtgaggttgttgtacaggttacaggacttgcaggacagcttgttgtagcctgggatggagcaatagcgggacaagacttccatcctacagaatattgacttgtcgccttggcagtggccctttgacgagatcttccggatgggcgagtcggggtccgggcgggacagccactgaactacgtagctcttcttggagggatctgagatgtttcggggacaggggccaagcctgcaggtcctcgctgtctcaggacgctcctcctggcagatgccgaagctgtcgtccgcggtgcggcagggcactggccgctcctgggtgccgttgccacaggttactgagcactgggaccagggcccggctcgccaacgaccagggcagagctcgcggctgcaggcccggcggctctcgggccgggcgtcattgcagtgcttggcgtgcacggagcgggtggtgttgtcgtgtagcggctgaatgcagcgcacggagcgcacctgcatgcctgtccgcccacaggtctggctacatggctcccattcgcctgtgacccacactggctgggagcattcctgtgggttgcacgctctgcggatggctttgggcttcgagagggcggcacagaagccacggtgtaccatcttgtggtccagcctccggcggcagcca

SEQ ID NO: 469999 - DNA, 1000 bp, Homo Sapiens; identical to SEQ ID NO: 159123

SEQ ID NO: 470000 - DNA, 1000 bp, Homo Sapiens; identical to SEQ ID NO: 159125

SEQ ID NO: 470001 - DNA, 1000 bp, Homo Sapiens; identical to SEQ ID NO: 159126

SEQ ID NO: 470002 - DNA, 1000 bp, Homo Sapiens; identical to SEQ ID NO: 339569

SEQ ID NO: 470003 - DNA, 1000 bp, Homo Sapiens; identical to SEQ ID NO: 339570

SEQ ID NO: 470004 - DNA, 1000 bp, Homo Sapiens; identical to SEQ ID NO: 159127

SEQ ID NO: 470005 - DNA, 1000 bp, Homo Sapiens; identical to SEQ ID NO: 159129

SEQ ID NO: 470006 - DNA, 1000 bp, Homo Sapiens; identical to SEQ ID NO: 339574

SEQ ID NO: 470007 - DNA, 1000 bp, Homo Sapiens
gcggtcattctgcctcctgcgtcttgtcctcgggcgcctgggaccctctctggttccacatgtggttgttcagccccagctgtaccatctgtgcgtggtggataatgaggggttgcagccctgggctctgagggggtgcgggtgaggccgtagggaaggctggggggggtggcggctgcgggcaccccggccaagtgggaaagggtggcggggctcccaggggcacctggcccccaaagggcattcgagccccatagggcgccccagtcccaaatgacatgtggctcccaaaagccacctggagctgctccatctgtgcctggtaggacaagtagctctggaggtaggctgagtaggctgcgttcagtgccgccgcctgcatccgctcaccgtccaggtgttggctctgttcccgcagggctcgggtgtcctgttccttcctccacatggcctttcgggcctgaagcctgtggggcttgaaggtgttggccaccttcctggcgaagatctgggagtgttcgtccagccgcaccagcccggagagcaggctggccgtgtcggagctgagctgggccggggagctctccaggggcaggaaggggatgacacagtctggcgacccctgtcgcgtgaggttgctcatcatggcttggttcacctggtgcaggctcaggcgacagtcgaagttggaggtgagaagtaggatgatgaaagctgagtggtctatggcgtcctgcaggcagctcagctccccgcgccccggcacctggaaatcctcgcagaaggtggccccgtcgggcacgccaagggcctccagcttctcccgaacccgcagggcgatgtgttcgtctgccctggcgtggaggatcacaaagttatagaatttctgttccgatgatgattccagggaggaagggaacagggaggagggggtcaggtgagctgaacaaggagtagatgaaggaggaggaggaggaggaggaggggatgtttctggggt

SEQ ID NO: 470008 - DNA, 1000 bp, Homo Sapiens; identical to SEQ ID NO: 159131

SEQ ID NO: 470009 - DNA, 1000 bp, Homo Sapiens; identical to SEQ ID NO: 339575

SEQ ID NO: 470010 - DNA, 1000 bp, Homo Sapiens; identical to SEQ ID NO: 339576

SEQ ID NO: 470011 - DNA, 1000 bp, Homo Sapiens
tttttttttttttttttgggaatctattgtttatgcaagatctctcaatttttaaatattagcaatacattcaaaacatgtaaaagtactatgtgtccaatatcaatatcattcagaccaaatatatttgcagtgcaaacatggcctacaggtcaccagttcgcaacctggtttatcctattaatttaactgaaattttctccatttaaaaagtgaaaaccactttaaccatgccagtaattaattatacaaatatatatgataaaacatttttaaattcttagttataccaaattgtagaaaacctcaaatgatatagctaataatgatttcagaagctaatctaggaaagagatccacaaaacagaattttacatcattttcttaactgtgattgtaatttgacaagttaatggttaaaacaatcaagatgttgcaatcaattgtacatttaatggatgtacaatttttcttattcctccaagattagtgtgatgtttttatgttttgttttcattagagaatgaatcaattcctattacagattttaacttcggagatatttctttacaatcatcttccttcttataagaatggataattgaaattttaaattcatgcaaaggttctcaggcatatgttcctcttgaaaattttctttagtctcttcaaagtctaacatgaatcagaaaatgttaaccttcttgagtcgagagcaaatactggtgagatagtatatttctctgccatccagattttccagttttccaagttgataatttagccattagttcttgcttagctgttgcttcatgcttttggatttgagtccttaggtgtagacattggattatccttgaaaacagtagggggaagtgcgtttgtgtctttatgaaaagaggctgggggctcattgccttctactggcagatcatacacatggggcttcatctgactcatctcttggggttgaacagcctttaccatctggggtttcctc

SEQ ID NO: 470012 - DNA, 1000 bp, Homo Sapiens; identical to SEQ ID NO: 339578

SEQ ID NO: 470013 - DNA, 1000 bp, Homo Sapiens
ttttttactaggaattatttttttaatgtaccttttctggatacagtttttggaattggtactgattgcttttgtttaccacttttactccggtaaggtgtcacatgaggttgactctgggagggtgtcacccgaggttggctctgggagggcgtcacaggaggttgactctgggaaggcatcaactgaggttggctctaggagggcgtcacaggaggttgactctgggaaggcatcaactgaggttgcctctgggagggtgtcacaggaggttgactctgggaaggcgtcaactgaggatgactctgggaaggcatcacaggaggttgactctgagaaggcatcacccgaggttgactctgggagggtgtcacaggaggttgactctgggaaggcatcacctgaggatgactctgggaaggcgtcacaggaggttgactctgggaaggcatcacccaaggttgactctggggaggtaactcatgaggtcgacgctgaattttttcctcttcttttgcagatggagtttgaacatcttgctgcttttttattggtttactttttttacaaagtcgataaagacaacataataaaataaacaaaacaataagcaacaatatacacagataacagaacttctttttcttctttctcttagggggtgggccactgtcaacactacctccatagccttttatcaggcagttgggagggtcccacagataattgcaatggcagtgatgtttattgttgcagatgcccctcttgttacaaaatgcaggtgagcaattactattcaagatggttatatggacacagtgcctgtggatgcatatatgatctatcccacactctgttccatctttcacttcaccaatatcaggtcccttcatccccaaatggtaatcagtactccagcacattatgtcattgaagcgagcccaatgcacagtagtatgatcactcatattgggaatttctgtcacattctcacactgaa

SEQ ID NO: 470014 - DNA, 1000 bp, Homo Sapiens; identical to SEQ ID NO: 339581

SEQ ID NO: 470015 - DNA, 1000 bp, Homo Sapiens
tttttttttttttttttttttttttttttttttttttttttttttttttttttttttttttttttttttttttttttttttttttttttttttttttttttttttttttttttttttttttttttttttttttttttttttggataggattgattttaatgcagctgtagaatccctgatcctcaggactgcgtcctgctgggcctgtgggagaagtgactgggggggacagttaaggcggcaagacctcatcactgtccaggcacctgcccagccaccaaatctgtggaccagggagcaaacacaggcaaaggtactatgcctggctgcagtcagagagagtctcgggaggagcaggtctttgtgctctagggcaggacacagtgctctaggtgggaactggtgccccaggtgggaccgaattccccaggtgagacttagagagacccggtgctccaggtggatctaatattccaggaaggacctggtgctccagggtcctgatgccccaagagcttgccccctatgcctggatgtgtgaagctgtgtgttttctcttcaagaggggacacagatgcctggagggtaaatgtcccaaacttggctcctcggggcatgtaaaattgtgtgtgagaggcagggagagctgaagagagaaaaggacagaaggatagggacacgcacataggtctgtagactaagtactgagggggaagggagagagagagaggtttagagacagagtgagaagaaatgaagacagggagagccatacacgacggacacaaagacagcaccactcaggtcttgtcttcctgtatgtgtaaggacaagggagggagtgagccgggtaagacccaccaggcccggtttctagggtgagccttcagctgcccttctgcagcaaaggggcaaggaagcagggcctagaacccagaaacacgtccccgcgcctggcgcgggcgcagccctccagggtgggcagccggggctaccgggc

SEQ ID NO: 470016 - DNA, 1000 bp, Homo Sapiens; identical to SEQ ID NO: 339583

SEQ ID NO: 470017 - DNA, 1000 bp, Homo Sapiens
ttttttttttttttttttttttttttttttttttttttttttttttttttttctcctaatgtttttattgttccttagataactggatagtacaaagtttgcctttgttttttacttaaaaaaacgtactttccgcatactgttgcccgtatgactttcctgtcccatcggaaaccagagtttccccaggtgagcccttcctatctgcggttacatgatttagctaatttaacaagaagagagtaattcctttgattattatcaacatgaacttgactatgtctctataagggtgaacactgattttttttttctttttagaaacaaaaaccatccacttattaatccaaactacggcattgcatttacaacaatcatcgcataaactgaacatacgaagttaccacctcaagggaataacagaagaacgttgcacaatgtatctacggggtacgcgagttcaaacaatgtgggcacagcaacttcactctacacactctgaccatcgcttcagtatgtactagacacaggtccaggagctatgtggagcctcagcacggttaatctaagagacagcaacacagtcaagaaacggcactgcaatgggatgcgagttacactagcctacggccgggtgcagcccatggctctcaaagagcctggacgccacattcctcggagctgaccacgatctaaggaaatgttcatgccatcctaacagtgggtttttccccggtgagaactggccaacagtcattgcctcgcctctttagtatgttgtttgaccagagagggacagggcggggaggaaaaccggggcgccgtgggctgcagttccagctgcaaatacgggagtttcttccgacgtctgtggcccgccggctcgaaagggagaaacacggaggtaatgccatccctcgatgtcagaatccgcactgctgatgatttttcaagatcggtattgttagtgttattggtatctttttggcagcagtttcac

SEQ ID NO: 470018 - DNA, 1000 bp, Homo Sapiens; identical to SEQ ID NO: 159133

SEQ ID NO: 470019 - DNA, 1000 bp, Homo Sapiens; identical to SEQ ID NO: 339585

SEQ ID NO: 470020 - DNA, 1000 bp, Homo Sapiens; identical to SEQ ID NO: 339586

SEQ ID NO: 470021 - DNA, 1000 bp, Homo Sapiens; identical to SEQ ID NO: 339587

SEQ ID NO: 470022 - DNA, 1000 bp, Homo Sapiens; identical to SEQ ID NO: 246488

SEQ ID NO: 470023 - DNA, 1000 bp, Homo Sapiens; identical to SEQ ID NO: 339589

SEQ ID NO: 470024 - DNA, 1000 bp, Homo Sapiens
ttttttttttttcacagccaattttcacactgttgtttcacattctcacagccctcagcacaggtcacgtcccagcccagctctgggactttggttcagggctcagagcctctggtctgggctgatcgaaaacctcctttgaccctgtggcagtaggcggaccttggctcttctcgtccttacccagagctcagggcagtgccccgtgcagtcgccccacttccacgaaggcctccacgcagcggtcaatgtcttcctcgctatgcactgctgagatctgtacccggatccgggccttgcccttggggaccacggggtagctgaacccgatgacaaagatgcctctcttcagcatgtcatccgccatgcgagaggccagccgggcatcacccagcatcacagggcagatggggtgactggctcccgagatagtgaagccagcagcttccatcttactacggaacctctgggtcttggcagccatagactggacaatggtgttactccccatcagcagatctagggccttggaggcgcagccaacgacagcaggtggcagactgttggagaagaggtatggccgggcgcgctgccgcagcagggacaccaggggcccaggccctgtcgtgtagccccctgatgctccacccagggccttccccagggtggagttgatgatggtgacctggtccatcacacccagcagctcatctgtgccccgtcctgtgggccccaggaagccagtggcatggcattcatccatgaagaccagggcaccatatctagaggcgaggcagcagatctcctgcaggggtgcgatgtcgccatccatggaaaaggccccatcagtggccaccaggcgcagccgatgcttctgggcctcctgcagcttggcttctaggtcggccatgtccaggtggcgatagcggtacttgtgggccttgcacagccggatgccgtcgatgatggaggcatggttcagctcgtccgacaggactgc

SEQ ID NO: 470025 - DNA, 1000 bp, Homo Sapiens; identical to SEQ ID NO: 339590

SEQ ID NO: 470026 - DNA, 1000 bp, Homo Sapiens; identical to SEQ ID NO: 339591

SEQ ID NO: 470027 - DNA, 1000 bp, Homo Sapiens; identical to SEQ ID NO: 339593

SEQ ID NO: 470028 - DNA, 1000 bp, Homo Sapiens; identical to SEQ ID NO: 339594

SEQ ID NO: 470029 - DNA, 1000 bp, Homo Sapiens; identical to SEQ ID NO: 159136

SEQ ID NO: 470030 - DNA, 1000 bp, Homo Sapiens; identical to SEQ ID NO: 339596

SEQ ID NO: 470031 - DNA, 1000 bp, Homo Sapiens
cggtgcgcatgtgcgtacatgcatgccatgtgtgtgtggtgtttgcagggagaggtggtcttgaagtagagaaatgtttcatccacatttcaatcacctgagccccacagaggaggggactgaactccagacatacagggtcctcaagtctttggcaaagtaaggggtaggctcagccaaggttgagagaaaaggcccaagccatccccctgagcaccagagcctcagatcttccttctagaaaggatcctagaccatgctaatggtcagggacttcagaggtcaatttacccatccttctccttctactgccaggaatctaagaggctatggggtctggcccttctctctctgatagctgttgctttcccagaaccctgaggccccagaaaccctctactcccagcccctgctcattgcaggacccacagtgggactatggctctgcacagggccattcagttctccacagagagggactgtcctggaggggtggccgaggaggttgccccagggcttctgtccagtctggcgctgggcccacactagggcagagctccactgaaagtcatgatgggcaggcagagaagggagcagagatcaggtgcggcctgggccggcaggtcaggaggcgtctggggtggtgaggagaggtcgctcttctctggcttgtagcacggtgagacctcacatctgactacactctgcaggatctttctctcatcctggtccaggcacacagcaaaggggcagctgttggagccgatgatctgcaccttgtccactttgatctgcgatgtgctaatctggttaaagcccttcttggatttggagttctgccttttcaccacttctgtcaggtttagcgtcagggcctccatgctggaatccagctcctcctgcttccggcaggccttgttgaggttcacggaggtacagaccttctccaggttgctccagcgacttcgtccactgatggcccccttgctgtaaataatct

SEQ ID NO: 470032 - DNA, 1000 bp, Homo Sapiens; identical to SEQ ID NO: 159139

SEQ ID NO: 470033 - DNA, 1000 bp, Homo Sapiens; identical to SEQ ID NO: 159140

SEQ ID NO: 470034 - DNA, 1000 bp, Homo Sapiens
gcctgaggcatagagaggtttattaatttgtcaatcaaaaagttccaagtttcaaagctgggatgaaaagccaggtcttctgacttgcactctgtcacactggatttttcctctgatccagctgcagcctcccataagaagttcactcttaatttcatgtcccatgctttgtcttggtccctgtgaggaaaggggtcagctaaaggtaactgttctataaggatgggtaggtatcctggcaagatatttcctctgaaatagtaaacgtgaccttagaagttactgtctagggcactctcagctgaataaagtctcccaaggaaacactgaggtagagcagtctgcaagtgcaaaagcacaccttctgcagattccctacaaagtggggtcccctgaaaggggcaatgttaaaaggtaaagaaagcaggaatcaggagggcaaacaggagtagtgtcaaaactgccatggcaggttggaagacagttcaacagatcaaagaatacgtttcccagcgaccagggtgcacagaaggaccttttgctccagtccaggagatgtgttgtcatctgcttggccaagaatgacttcgaggtcttgaatgtgtcccatgcaaggccccaagggcactcatttcaacagcagtggcagcagccccagctcattcaatctttccttggccactgcctcccagcccttgttggcctgtgggttacggggagagggatgcaggagcccttccacctggacctctggcatcaggcctgccagagcccgtcgtgcccgctgctctgccagtcgcccaactcccaccaccagccgcacccccagcagctgcacctgccggcagagggctgcatcacagatcccaagaagctgttctcgctgcttggcaggcagctcagcaggagtaaggttgcgcccgctgggagccaggaaaagcagagggcatagattgtggacaaaacagtgatggaagaagacctcaggctgtccacagag

SEQ ID NO: 470035 - DNA, 1000 bp, Homo Sapiens; identical to SEQ ID NO: 159141

SEQ ID NO: 470036 - DNA, 1000 bp, Homo Sapiens; identical to SEQ ID NO: 339599

SEQ ID NO: 470037 - DNA, 1000 bp, Homo Sapiens
tttggtgttaaatacatttattgtaaactttagacacaaaaataggttctctaggccattcacatgcacattaaaaccaacaggtgcaaactacaacaatgcatataattatacaaatgatgccactctgtgatgtttacaggattgctgtccatgcaaggtgatcataggcattatttatgaagccttaagatccagaagtgttgttactaccaaacctctgattaacactgtgaagtaagtgttttggaaggcagttccatgagttggctaacatttctttaaagcaaatgactgcttctaagcttagccgtacaagagattttggttgaactgaaaatattagtatttcattactgtgtgcagctctgtgatggacaagcaagttgttggcacatccaccaaaaacaattacttctccttcatcgctggcacaagctgtgtgccataaccttggtttttcggtatatggatgattaaattgtatccattcatttttactgatgcagtaagtccaggcatcacttagtggctgtttatcagtggtaaatcctccaaagagaaaaagatgatctgaagaaactggtgttagtgagtgccaagatcgaccaactgggcatatgccttgtggaattaattcattccactcccatgtatccagattaagatagtgaagatcattcattctagcatctcgatatctgcctccaaacacgaagcctctatttccgacagttgcacaggcatgggcagcacgaggtgaaggtgctttaccagtagttataggctggctccaggtaaatgtttcagtatctaaaatatgtacatgatcattccatcctcttggatgacttgaattccaaaaagatgtttcatcgaattcaaaagttcccaatactttatcttcaggcaaatatccataccctccaaaaaatattaacttgtttttatatacccagacaccaagtttgtcctttgatgatggaggaattccttggca

SEQ ID NO: 470038 - DNA, 722 bp, Homo Sapiens
ttttttttttttttttttcctttttaaatgcttttaatgctcttcagatggtgagaggttgttgcaatggtcataggctgtgctgatggccgggaacaccccacaccccacacctgccccccataccccttcctccaggagatacttgagagggaccatccccggctgaagccccgtctcgtgtggaagaatgtcatctccagtgtctgctgcctcctccccgcaaagtctcctcaagcacaggacaaggggtgcttccaccatctcctaggagctgatgacatgtccagaccaggtctcatgcttggtgcctggtgccaggtgagtgatgacgacctccacggcctgcagcttctcattcttgggtgggatggagcacattttataggtgacctcgtcgccttccactgggacatactccccttccacatcagagatgtgcaggaagatgtcggggccgccatcagctggggtaatgaagccatggcccttggaccggcagaagcatttgcagactcctttgtagacggggacctgtgaagcccgcaccgtcgccgagaaggtcctcgtccggcgagtgggcagtgggcttgggaccacgttgccccgcagaggggatggtgagcgctcacggctccgaggggtgtccagcagcccgactgaagcttgatgggtggggggctgtggtggtgggggaggctcagatgacatggctgaccctg

SEQ ID NO: 470039 - DNA, 1000 bp, Homo Sapiens
tttttttttttttttttttttttttttttttttttttttttttttttttttttttttttttttgaattttaacattggttatttatttgtgtaatggccttacatgtggatattaacagtgtaaacaataccacatataaccatcaagataccttgattataatttataggactagaatgacagattcaggtggtttattaattacatttaaaaagttttctgaaaaaacttttgcaataaaaaaaaataaattgcccatcaataagtttgatatcttttaaaatgatttttggttatctgcacatgaagcaaacaaagtgtattccacaaaattctttaggcacagtctggtaagatagctgccagaaagaacagaaagagttgtcatttatctcttgtgagtacaatttctgaaagctgaatgagggcatctctttctggggatggtcgaagtttactgatctctcttattgcttcatggcagtactgctgggcgaggtaggttgtttgttgcacaccatcactctgtagtacatactgtcgagctctgtctacatctccaggcaaactgaaccgtcgcatgatcatagcattcatttctgggaactgctgacaggcaaacaggacaggaccagtggctaacccgagcttcagatcagctgatgttggtttgcccatctggtcagaacacgaggtgaagtccaatacatcatctattagctgaaaagctattcctacattttttccgtactgataggcgatctcatgcaccactgggtcgggacatcctagaacagagactgctttacaactgttggctatcaggctggcggtcttcttgaatgtcttctcaaggtagtgtgcaaatctttcattctcattttcttttgacccgagctgaagaaattcaccacgcaccaaatcttcaataacttgggttaaaatagatataacagttgtatttccaattcgtgccagagctatagatgctgcagaaag

SEQ ID NO: 470040 - DNA, 1000 bp, Homo Sapiens; identical to SEQ ID NO: 339600

SEQ ID NO: 470041 - DNA, 1000 bp, Homo Sapiens; identical to SEQ ID NO: 339601

SEQ ID NO: 470042 - DNA, 1000 bp, Homo Sapiens; identical to SEQ ID NO: 159142

SEQ ID NO: 470043 - DNA, 1000 bp, Homo Sapiens; identical to SEQ ID NO: 159143

SEQ ID NO: 470044 - DNA, 1000 bp, Homo Sapiens; identical to SEQ ID NO: 246615

SEQ ID NO: 470045 - DNA, 1000 bp, Homo Sapiens; identical to SEQ ID NO: 339604

SEQ ID NO: 470046 - DNA, 1000 bp, Homo Sapiens
tggcttaaaagacagaagtttattttcttacaatttttgaggccagagtctaagattgaggtgtcagcagggttggtttcctctgaggcccccttagtttgtcgatggctattccccctcccactcctgggccttcatgtggtctttcctgcgtgtcctaacctccccttcttataaggacaccaattatattgcatcggggcccatatcagtgagctcattttaatttaagtgcctttctaaagaccccatctccaaatacagtgatattctgtggtaccaagggttaagacttcaacatagaaattttagggagacacactcagctcctaacagcaggagtggtggcagtgaggtagagggagcatgggcatactcgtctctggcaactttttttttttttggatatggtctctctctgtcacccagactggagtgcagtggcgtgatctcagctcactgcagcctcgaccttctgggcttaagcaatgctgtcacctcagcccctggagtagctgggatgccaggtgcctacccctacacctggctaattttttgtattttttgtacagactgcgttttgccatgttgcccaggctggtctccaactcctgagttcaagcaattcccctgcctcggactgccaaagcgcagggattataggcgtgagccaccactcccagtctctgggtgggttctcttgaactggacaccttcctgttagggaagcaaggaggaggcaggcccactgcaggcctgcgcggacggttcaggaggaccttctgagattctgcccactcagcaccccactgggtgccccccctcagagttacaggcacacgggctaaaggaaatgagatgggggtagccctaaaagaagccaagcatcaggtaaaccagaagtttaataaaaatgagcaaaattacaacatggcgggccagcaatgggctgcttcagaaggtctgaggtgttggtcagcctgacgtcctggcttccatg

SEQ ID NO: 470047 - DNA, 1000 bp, Homo Sapiens; identical to SEQ ID NO: 339606

SEQ ID NO: 470048 - DNA, 1000 bp, Homo Sapiens; identical to SEQ ID NO: 159145

SEQ ID NO: 470049 - DNA, 1000 bp, Homo Sapiens; identical to SEQ ID NO: 339608

SEQ ID NO: 470050 - DNA, 1000 bp, Homo Sapiens; identical to SEQ ID NO: 159146

SEQ ID NO: 470051 - DNA, 1000 bp, Homo Sapiens; identical to SEQ ID NO: 339610

SEQ ID NO: 470052 - DNA, 1000 bp, Homo Sapiens; identical to SEQ ID NO: 339611

SEQ ID NO: 470053 - DNA, 1000 bp, Homo Sapiens; identical to SEQ ID NO: 339612

SEQ ID NO: 470054 - DNA, 1000 bp, Homo Sapiens
ttttttttttccaaatcaccaatacatttatttgcgggagatgaggtcaaatcttaccatgaactttaaaactgggtaggactagagacactgatctgcccaacctctgggtattcacaactgcacaggtaaccagatcctgtacgcgaggcatcaccattaaacagatgagcattagatgaggaggacacattctgagtagttgcatgatttcccattcagaggcaggtgctgccctcatatcagaaaagtagtgttgagaaaaacacaggcagagctgggccatttgcctcctagcataggcctagacatgatggtggccacgtgccaggggaccacaccctatgtacaaagcaggagaatgatgctcccagctgagctgcaggatgggcgctgggctgactggaggggtagacggggtggggtctgaccccattagcctttccccatccaacctgggcccccataagccattctctggccctctgcacaagacagactcagcaaatctgcgaggtatggggattctgccaactccccacctcgcctcaccttccctaggtctgccgggtgacccaatccactgggtgcagccccacccccgctcaaccccacatctggacagacacatggcaaatatggaactgaagcccggctgggctggagcacatctggttgttgttgggttggagtcgtcttgcaggtgtcccaaggtggtcaggcctcacccacggtggccaggttgagaccgtgttttttagatgattcaggttactccagggcaaagcatgatcctgatgacacccggcggaaaagcaggctggagcctcggaagagctggccctgcacactcaggtacttccagcagtgaatccaggatttgaacactggggagtaaggggggagcccagcttgcagcccgcagttgttcacagccatgaggtcgccaactagcaggaaggggtaggtcagcatgctcactgcaatccccatcacgaac

SEQ ID NO: 470055 - DNA, 1000 bp, Homo Sapiens; identical to SEQ ID NO: 339613

SEQ ID NO: 470056 - DNA, 1000 bp, Homo Sapiens
tttttttttttttaaattttaaactcccttttattgaaatataagtttgtttagtatatttacaccacactttatgcacatatatacagagaaggtaaattctgtaaaataaaattttttcttaataaaaaatgaaaatcaaaacaaaataaagtgcataaaactgatttttttttccttctggtgaacatcatcgttgtcaaaattttggtcggttgcgagagggaggaagaaattcattatttgacttagtgcatacagctgaccctgaatttgtagccttcaggccaaaatgacaagaggtcaggaatgagtcaggcaaattgtcaaggtctgcagggctccccagagtctggaggtcctgctctctttgtcctatcgcgagccgtccccctgcttggaacagtgatctcaccatcgcggcgctggaacaaagggagaacacaggaaggggctccaccagccaatgtcacagccctgctccggggccaccagcgctctgtttggtagaaaattgcagaattagctcaacggctcaaacgcaagttttcctttttcggaaagggaatgaggggggcccaagaatggggtgcatctcccacagggacggccactcgggggccaaaccccagtagccagtttcttcggatccaatccccgtgctggcacagtaaagaatccttttataagctgggtggagagaatgttacacttctcgcctcggtgagttcgtcctcccagaactttgaaaggaaacagcgtgggattgaaagaaaggggcaggtgggtgaaaagctgaagtttttagacacctttgcgggtgggcgttggccggctggtccctgacagtggcagaggcgaccgcccttccccccatcatccataccccagccccagatctctctcttttcctcccggtgacactaagtcccagaccggcggccgtacttggccttacagtgcaaaatgtgcttggcgaggaagtcgaggcggcgctgta

SEQ ID NO: 470057 - DNA, 1000 bp, Homo Sapiens; identical to SEQ ID NO: 339615

SEQ ID NO: 470058 - DNA, 1000 bp, Homo Sapiens
gaatttccttggaggtgaggctccaggtagggacagggcctggtctgctgaaggccacaggaagcaaatggcccccagtccacctttctgtccctgccatgaagggccattacactggggtggggaggtcctcaggagggtgtcacacatagccttaggcaatagcaagtctttcctattcagctctgtccagcctccaattgaggagggataatgggggtgagacagggttgggggtgaagtggccaccaaacccggcaaaagtgagcagctccatcttgtctgaagttaacatcatcccctcaggtataaagcctcctcctcacatcgactttggtaaaccagtcagtgacaggccttggccaagctgagacttgggcaaaaacctgaacgagtgccaccggaaagccatcatcctagctctgtccttccaatgctgagagtcacatgttcccccatgggcatccctctcctgagtcggctatgtgtgtgaagccaggccaggccgtgtgcctcagtttcctcatcttccaagtcgggataccagccacagagccatctcacagggcttcaggagaaacttcccagtactcaggacaggagctggcagtgagcatgtgttggctctcattaggaccccacctgtcagcgtctacaaacatgatgttcagtggacccaaaccttttctctttcccagaggtggcggctgacagagcccagaccctgatccccagtcccttgtggtctcttgtctgctaggctggcccctaggaagtcttggatgaacagaggcagtgggttgaggggagaataccctcagcgggcatctctccagcggccagtttgtgtacagctgtcataagtttctctgggccacccccaacccatgcctgcatccctctcaccttagcatccactgtcatatcacatgaagccgcaccacagtgcagtgctgtgactgtcggcctcctactggctctgaatagtctcggccccact

SEQ ID NO: 470059 - DNA, 1000 bp, Homo Sapiens; identical to SEQ ID NO: 339616

SEQ ID NO: 470060 - DNA, 1000 bp, Homo Sapiens
tttttttttttttttttttttttttttttttttttttttttttttttttttttttttttttttgccgggaacatgtctttattaaagatgcaagcaagcacagaaggatcatgtgtagtgctcagtaacatccatacagtactaaaaatagaaaaatataaatgaaatttcacagaaagcagcctccctcacagaaacacaggcaaggtgctgccgagcccaccatgcgatgccacgtgccacctgcctggccacgcttctccccattacaaacaaaaacacaagcttctctctacacccgtttcaaatacagcaccaagaacggagaccccttccacagcagcgaccctcctgaccaccactttgggtgctttccagccacataaatgacagacaaccccggtccccacggggttggctggctactggcccccgactctccatcgcttcagcgaatgtgggtgagaaaattaggcagtgaagcaataaagacctcacctttactccctcagatacacggagggatgaggtggacagacacgcaggcggccgtgccaacctgatccgagtgaaacagggctacactcgcaaaatggtcctcccacggctgagcgcctcaggtgcacagaacaaactgaatgataaagacccggggattttagaaatttactattaagcatctgcttgccagcattagtaggctatcacttcaggaaacaaagtaaggctgtggaattcagctcaaattccgagcgcaactcggtcctttggtggccgactctccacccactgcatgcaaatgctcctgactgcattagactcccacctgccagcctcaccaggcagacttccctcagcacatgctccgcgggctcctctgcattgggcctttggagccgcccgctggaagtctctggcagaaggacgtccattctgaagacctagtgaacaatttctgctcatttcaggaaggttctgaagaagtgaactccgtcagaat

SEQ ID NO: 470061 - DNA, 1000 bp, Homo Sapiens
acttttcataatcactatacacatttatttaggaacagtgagattcctttgaatctcaacagtttcctagacatgtagtctttttttttttaagttaccatttctggaatggcttcatgttacatctctacaaactggcccacaaaaaagcagactctagagataatgttcccaaagaagtcaacaaagattcccagcccaggccaggcgcggtggctcacacctgtaatcccagcacttcgggacgctgaggtgggtggatcaggaggtcaggagttcaagaccagcctgaccaacatggtgaaaccccatctctactaaaaatacaaaaattagctgggctaatttttggtggtgggcgcctgtaatccgctacttgagaggctgaggcaggagaatcgcttgaacccaagtggcagagcatgcagtgagccaagatcatgccactgcactccagcctgggctggagcaagactgtctcaaaaaaaaaaaaaaaaaagaaaaagaaaaaaaaatcccagcccatgtgggaactctggaaggtagcacagtatttcacactttggtatttcccccccttttttttaaagaagataaaatattacagagacattttcaaaaatcacacctgagttaaacattttgctggaaaattccacattaaggagttaagaacataatgcaaaaatgggaaagggctatatacaggtactttgccaccatcattgttgtgtgtttgctcttgtgttcttccttttctgctgccaggagaaaggagaggggacaggataaagagaaacccagggcgccagggaaagaacaagcactcctgagccctaggcagacgtggacagacagaagggcaccagcaggcgttgcaacatgctcaagggcacccaccaagggcagctcttttacaccttctgcaaaaaggaggggacctggagggcgcaataatgaatggatttgattgtagaaaagggggcgaggttaaaaagaa

SEQ ID NO: 470062 - DNA, 1000 bp, Homo Sapiens
ttttttttttttttttttccagaaaacacaactttattcactaggactgaaaacaaaggcttgtgcaatcaaaaggccaagttgagtgcaaggtggagcgtgctcggaaatcacagacctcacctgtggccaggccgggctggcagttgttgtttctggtgttttctgtgatttcccacattttatcacaaggccacaggcatcctccaaggtcagtgaggaagaccctattgctgtttgagccagagcctcctagagggtgggccgggagcaggcagctcccaggacacacagatgcacgatgtgattagcagtgaagccttctgtcccaggcgtgggcaggcgtcctcccttagctgcctgagcatgtgcggctgaagacatggcttttctagggttaggcactgtgcgtggtgccagccccagccctccctcacctggacgtgcccaggagggggcagcagagcaccgtggcaaagtctgtccacttgccgctccccgtcccgtgcagaagactgcttttccgtggcggccagtgtgcggccacgggctctcagaagcctgcttgttgggactgttgctgggaggaggaagggacaaggcttgacctggggctcctgaaaacagacactcgggcgttggccactgggcaacaaagtcagaagggcctggagaccctctgtccagccttctagggactgggcggcttcctccagaggactgagctcagccaggttcaagggcggcagcaggaggcccctcgaccctccctcttaacgtaatcatgcagccggaagcgcggctcgctgggagccttcatggagcgctgcttcaactcctttgctatggctgtgaaggccaagtccacgttgaggcccgtcttggcgctggtctccatgaagggcagtccatactccttggccagcttctccccgtcctccctcttcaccacacgctcatgggcagagtccaccttgttccccagcagcatgagcgccac

SEQ ID NO: 470063 - DNA, 1000 bp, Homo Sapiens; identical to SEQ ID NO: 339618

SEQ ID NO: 470064 - DNA, 1000 bp, Homo Sapiens
gtattggtagaattttatgcaataaatgaatgggctattactggatacatactcagagaaatataaatctttctaccataaagacacatgcacacgaatgttcattgcagcactattcacaatagcaaaaacatggaatcaatctaaatgtgagtcaacaatagattggatagagaaaatgtgatacatagataccatggaatactaagcagccttaaaaaagaaaattatgtcttttgtgggaacatcggtagaactggaaaccattatccttagcaaacatgggaacagaaaaccaaatactgcatgtcctcacttataagtgggagctaaatgatgagaattcataaacacaaagaagggaataacagacactggagtctacttgagggcggaaggtaggaggagggagaggagccgaaaaaaacaatattaggcactgggcttaatacctgggtgatgaaataatctgtacaacaaacctccacgacatgagtttacctatataaaaagcctttaacatgtacccccgaaagctaaaataaaagttaagaaataatggatgggcttgagacaggaaagtgtggagatgaatgttcgcttagaataaattgactattggactcgggtcctagctgagcaatagatacaaaatctggtgagatccattcagtcaattgaaaataaggcagagcaaaggaagccccagggatgggtggacttggttacagcctgtttggagctgatggctggcatgcccttccctaagaaggtgcagtggaggcctgtagccagaaaggccacaccggtattctgagcaggaataagtttcatgacttgaagaagcttcttactcattatacaggggagtaaagagacgatatatgcttgggcaggagataagaacggtatgaaaccaagaagagaagacagacttgtcagaagctagaaagaagaggacctgctacagagcccggattcaggagatttttggaaggca

SEQ ID NO: 470065 - DNA, 1000 bp, Homo Sapiens
tttttttttttttttttttttttttttttttttttttttttttttttttttttttaacttaggcacttgcaggcttaaataggggttacaaattccccggtgctcttcaggtccccaggcacttttcaaagggtccccgagcacttggctcctgcactctggaaacagcttgcggcccggcctgggctgctccggtgcagcgcgccccgcacctggcctcgccggctcatctccggagaaactccttctgccctgtcgtggtccacagggttgacttttcggtattcgaaacgccagcagctctgggagcccagcggagagtcggagtcactctggggccagtgacgcctcccgctgacaagaatcccaaagttgcctcagcttcctcctctccttttcttcccgcgcccaaccctgacatcaccacccctccatcccccaggtatcttcctaaagccgtgtcgggactgcaacccgcccttcgatccagctggggccgggccccacttagccagtcaaggggcgagccagcgatgcgaacaccggtctggggggcacgactcccgcctacgttccccgcaggcgcgcaggggacccaaccccacacattttattctcgaactacgaggaaaaatactctattttttaaaaaaataacttgcttcctatacaaatcgctatttaaaaatatacaaataaggcccaagcataaaatctaactctggggctggcggtggagggaaggtgagggagggggctctggcacacgtccctcgtgtgtgcttgcgcgacggctgatgagggcgcgccagggaccctggcgcccaaggagatggggctgcagggaggcggacggagagcgttccaggcgttcggctccggccctgctccaatcgcagagcgcgctccaaagtcgagggtagccccaggtgccgccctgcggcctcaccagttccaggagaccagggcgggggatgctaagtgctggtaggcggggaag

SEQ ID NO: 470066 - DNA, 1000 bp, Homo Sapiens
tatcttataatggaccacatcactgaagcatttttcatatgtcctgctggtttgtcaattgaaatattcagccaaagggaaaatgaaaaacactggacttagtcttaagcaaacttttcattctcatttttgtatttgtttttgaaacagatctgctaaaggccagttacttaacaaatggatggcacacactcggagtcatcagatataaaataaaatcccaacatattaaaaaagtaaagaatacatttgacagaaattacctttgtttacaaaaattcattacatacaatctgcatatttttactggactaagaactgtcctctccgtttacaaaaaccaaagagaaacctgatggataagtaatatttcccccctaacctcctgtaagttcaccatgtatagtcccaagtttttaaagctcaagctcatctcaggatcctggttctccacttacactacactctattcaccgctgttaccaagctaaagcaaacaaaagcaaattaagtcagcagttttcaccaggaagttgaaggaatcatcaatgccaagagcaaggtgactgatgacgaagatgtggagagagagtgaagggtcgactgtgcacttgtgatttttccacctgaatatgatggtaccctaatttgagaactagctgttccatctcctccttcactatatgctcgaacttcaataatatagactccagcatctgggagtggtactactgcttgaagtttctgtgtttcaataacttggctgttgctgtgaccctcttgcctataaaaaaccttgtaacccacaacttcagattcgttggctaatggtatgacgggttcccagcccagagaaacctgagagccttgctgctcccacctgaggttgctaggtgcttgactaggaggggatttcttggtggttgcactcacttcactgctaggtggcccatatccagctccattgtaagccctcactgtgaagtgatataacgtattt

SEQ ID NO: 470067 - DNA, 1000 bp, Homo Sapiens; identical to SEQ ID NO: 339619

SEQ ID NO: 470068 - DNA, 1000 bp, Homo Sapiens
tttttttttttttttcgagcactgttttttatttcaccatggacccatcggcgtggggcgcccgccccgggtgtccttcctcccccgggcagccagatgctggaacgggaggcacatgttccggccccggcccctgggaaggaaagaaaggaccttcccgtttcacttgtctcggctgaacatgtagcggaggaggtcgaccacccggtgactgtagccatattcgttgtcgtaccatgaaatgagcttcacgaaattgtcattgagcgcaatgccggccttagcatcgaagatggacgagtgggtatcaccgaggaagtccgtagagacgacctcatcctcggtgtaggcaaggatgccagccatgggccccttggctgctgcttttacagcctccttgatggctgagtagggggcaggctgggcgaggcggcaggtcaggtccacgacagacacatccggggttggtacccggaacgccatccctgtcagcttccctttgagctctgggatgactttggtcacagctttcgcagccccagtggaggctgggatgatgttctggtgggcaccccgcccatctcgccaggccttccttgatggcccgtccactgtcttctgggtggccgtgtaggaatggactgtggtcatcaacccttccacgatcccaaatcgctcgtggatgactttggcgaggggagccaaacagttggtggtgcaggacgcgttgctcacaatgttcatggagccagggttatagtcattttcattgacacccatgacgaacattggtgcatccggtgagggcgcggagatgaccacacgttgagcacctgcagagatgtggtccgaagctgcctgtatggagaggtacacgcctgtggactccaccacgtaggggctcccgacagccctccaggggatctgtttgggctctttgcactggtagacagagatctcatggttgtccacgaccagttgtccattcctgaattccaca

SEQ ID NO: 470069 - DNA, 1000 bp, Homo Sapiens
tttttttttttttttttttctggatttcagtgccagcacttctacttgcattaactttattacacaaataagacatttacaaagcacgacatgaaaggtatgtaacaaaacagacattggttttacaaaaaaagtgcttacaattttttttccgtgtgtgtgttttcccctttttttgtatttaaataaatagtcttgatggcctgtacgttcccaggctgctcttaacagggtagtggagacatgtttgaactgtaacatgctacggccacataatccacgcaaggaatagaccctgaggagaggctcaaggcagagtgtgttgggtgaccctgggtagggcttggttggccacttaccacatggttgccactggggccttgatgatcaggagcaaaaatcaaaggaaagatttgagctccaaggccaggaattgggccctggttgctcctgttaatgtcagcgcctagcacagggctgggcacaagttaccactgactgagtgctgagctgagctgtactcaccacgttctgagtggtgcctgctctttgccctcagtcagctgtcactgtctttggaagggagaggaagcaggttcccttcttaggctgcacctgtgcctaccctgcctgtagatcccagagcaagaatgacctataggctttcatgttaagtgccaacgtcaagcatttgaactctgaaaccttatccagactcagtgaaatagagctgccattgattagcaatgtctgccatgggtaaaaacagagacaatggctgcgtatgtaccatgaacttgctttccctgtcttagagtctccttccaaaagcaacataacaggttaaccacagcaggaaggcggacttgggctaaaacatgctgattagcaacctctagtggaaaatgcatcaggacaccaggtaattctagaattacaggataagcttgggacaaatgggcatcccctgaaaacataaatcatggtcgtgtgtagcctg

SEQ ID NO: 470070 - DNA, 1000 bp, Homo Sapiens; identical to SEQ ID NO: 159150

SEQ ID NO: 470071 - DNA, 1000 bp, Homo Sapiens
tttttttttttttttttttttttttttttttttttttttttttttttttttttttttttttttttttttttttttttttttttttttttttttgttcagtccacactttattaagaaaggaatacacacactttctccgagagccctcacgggggtctcaggcagaacacgctctgagagccgggcctggctccagcgtctctctgccctgtggttgtggagaactggcgcccagcagggtggtgggagctgtcccgcttttcccttaaggcacggagagctggaggtggagccacagccgggcctaggggttgagccaggggtgctggaggcagtcagcggcactggcccgcttttcggggatgtactccatcatgggcagcagaaaggcgctgaactgtgtggcctgctctaggggccactcgtacttttccatgagtacctcgtacaggccccagtgcttgagattgtggatgtgccgcagctctcctctccggttgaagaactcccgggaatagcggcctgagagggcgaaggctggggggatgtcccccagaagctccactatgtgagcgatgtggtcctcatcacgactgtagtcttctccagaatgcggctcgaacaggtagtcaccagtggccagctcgaaggccatgcaggctgtgctccagatgtctgccggggggccgtattcggcgccgatcagcacctcgacggcccggtactgccgagtctggatgtcttccgtgaagtgcttgtgcacccagcaggcgttgcccaggtctgcgatcttgatcttgatcttatctgcattttggggctccagggggttcaccaggaggttcgaggcaccgaatggtgtgctaggcgacaggaggcccccggtctctcgctgattggacgagccggagaggatggagcaggaggcaggagagaagagggagccggagaagcctgaggtctgtgagcccgcgctgaggctacggccgccccccggggc

SEQ ID NO: 470072 - DNA, 1000 bp, Homo Sapiens; identical to SEQ ID NO: 159151

SEQ ID NO: 470073 - DNA, 1000 bp, Homo Sapiens; identical to SEQ ID NO: 159152

SEQ ID NO: 470074 - DNA, 1000 bp, Homo Sapiens
ttttttttttttttgttagggaaagtatctttactcatgcaatgctttcatgctgagatttcagcacatatatactgctgaaaagataagtatctttataagtgagtggctgaagacataagagaggcatctctccatggtatgagactgctcagtttaggaggtgatgcagctcagggtacaaggcagtgtacagggtagagtgcagcccaagccgagggctcagtctcattatttccaatcccagtcaacatgctgagaccaagaagagtcaaaaaggcgtccttcactagccactctacgtgtgcacgctctgtctctgtccatcgtccccatcgcctcccatgtcatgcggcgcaccatacccctacagaagactctgtgtgattctcatggcggaaggacaagagggctggcattctgggctggccctgggcactcagcagtgcgtgctttttctttggggaaaggcaggaccaccagcttctcctccataggctccaggaagaggaaggaaatatccagggtttctccctggggattcgtggttaggtccagatgcacaggaaaggcctcctgagggcccttttcctgggaatttttatcatccaagtcaggaagatattggacagatcctcttggcccagctttggagggggagtctgttgggggggtgtttttctgctgggattcttccaccttgggaaggtttgtaggtttctggttaacagcagagttttcacttccagtggctggagcctgtgattcaaagaagtcacaagtcacagagacaaacttttcccagtgtgttcgagtcagagaacctttgcaaagaccaacaggcacagagtcggaggactgaagtgaacagctgctggcctgggatttagtacatggtgattctttaattaagtattccacaaagtaagaagggccgaccacccactggctagaagccctggtgactttgaagagagaatactgcttggatgtgttctca

SEQ ID NO: 470075 - DNA, 1000 bp, Homo Sapiens; identical to SEQ ID NO: 339624

SEQ ID NO: 470076 - DNA, 1000 bp, Homo Sapiens
tttttttttttttttttagctttagaggttttggctttaattatataatacaatgtctaggaattgtgttgttatgatgaatgtcaaaatgcctgcaaagtttgaacatttgctatttaccccaacaatcagaaagctgtccatagtatttttttgttaacaagtaaaagatcttcaagttcatccagtgatgtcatttaacatatatttcccattttatgaaataagattatttagtaattccagtgtagaaatttaggatgttcactacctcacttttacatattcattattttaaagccataatgtgaacaatacatccataaagagacatttaaagaccatctgatattcatgaaatactaagaaatatgctgttttatgctccacatactacactcagttgggagaatgaagatgtgcaattgttgaagtctttgtgtagactcatgtactgcaatctaagcagttttgggattcccacctcttatagtaataatgggatacagagatcagttcatttgtgaccagtggtttacatgaaaaagaagatagggatataatctctgcccatcaaatatgggttttctcttgtaaagctaagtattatattcaatagctttaactgatagagaacggagtaatttatgtacttggataatatctttaaatagcaaagttgttcaatatgttcttaaatatttacttatctttctctgggctatgcagtttaccttccatttttaaaaaattagtggtgcaaaaaacttctaatgttagtgatacataaaatctttaacttttttgtatgtattgcaataacattattttatatttgacaattcaaacatgtttatattggcccagttgtatttggttgtgttaattggctattttggacactcaaatgtgtcagaacactgtgcagttgttataggtgatgtgaaatattctagtagatgaagcaatatatcagcaaaaattaattaagatgagcagt

SEQ ID NO: 470077 - DNA, 891 bp, Homo Sapiens; identical to SEQ ID NO: 339625

SEQ ID NO: 470078 - DNA, 1000 bp, Homo Sapiens; identical to SEQ ID NO: 339626

SEQ ID NO: 470079 - DNA, 1000 bp, Homo Sapiens; identical to SEQ ID NO: 339628

SEQ ID NO: 470080 - DNA, 1000 bp, Homo Sapiens; identical to SEQ ID NO: 159154

SEQ ID NO: 470081 - DNA, 1000 bp, Homo Sapiens
ttttttttttttttttttcagaacaactttttatttgaacttatgtttagtaacagtatgtctcatattaagacaacttttggatctttttttccaaatgatctctagaacattacaaattttattttctcccctaggaatgcccagaaagaggatcgtgttccagtgcttgaggagtacagagagtacaagaaaattaaagccaagcttaggcttcttgaagttcttataagcaaacaagattcttcaaaatccatataagatacgttccttgaaaattcatatcataaagtcagttgtattccttgaagctatcatcgtgtgtacttggctggtacttaaattcgttttgtcaggcactcagagagaatctcattttgtacttggttgtggtgccatctcgaaattcttcttgagtgacaggctggtagtcatcttgaatttccatagaataatactttttctcaagcctctctttccattttttcatctgctctgcgttttgaatctcattttcgtcaaagccttctcttctggcttgttcagccaaatctccgctgcctttggttttcttgtcttcatctttttgagctttcttcagtctgaatttctcgagaacatttttgtaactctgtttaatcattttgccaagttcaaaatctggccttctgcctattgaatagtcagctttcacttcagaataggtatcattaataattgccaagaacatattcagcaggacaaagaacacaaaaaagatgaaagtgatgaagtaaatgggtcccaagataggattggcttgctgaataccagcaaaattaaaatctccaagaacaattcgaaattgtgcaaatatggaattctgaaaagtggaaaagtcatcaacttgtgatccaaaaacaagaaatcctaactgggcataagcaaagaatattataaaaaacatgatggcaaatcctactatgtctttaacacaacgggacaaggttgatgacagctg

SEQ ID NO: 470082 - DNA, 1000 bp, Homo Sapiens; identical to SEQ ID NO: 339629

SEQ ID NO: 470083 - DNA, 1000 bp, Homo Sapiens; identical to SEQ ID NO: 339630

SEQ ID NO: 470084 - DNA, 1000 bp, Homo Sapiens; identical to SEQ ID NO: 339631

SEQ ID NO: 470085 - DNA, 1000 bp, Homo Sapiens; identical to SEQ ID NO: 339633

SEQ ID NO: 470086 - DNA, 1000 bp, Homo Sapiens; identical to SEQ ID NO: 339634

SEQ ID NO: 470087 - DNA, 1000 bp, Homo Sapiens; identical to SEQ ID NO: 339635

SEQ ID NO: 470088 - DNA, 1000 bp, Homo Sapiens; identical to SEQ ID NO: 159155

SEQ ID NO: 470089 - DNA, 1000 bp, Homo Sapiens; identical to SEQ ID NO: 159156

SEQ ID NO: 470090 - DNA, 1000 bp, Homo Sapiens; identical to SEQ ID NO: 159157

SEQ ID NO: 470091 - DNA, 1000 bp, Homo Sapiens
ttttttttcactatacaaagtaattaaatctttattgaggcatttatgtgccagaaactgatcacacacagacataaggcacggtccctgccctcgaggagctcacagtctagtaaggaagacatatggggaaccgattccccaaagatgcggggagtaggggaggcagtgcttagagtggggagccattgtcccacccaccccacgctccaaagtccaggctggctaggagaaagtgagtaggaagcttagcatcctctctctcaccttccccgtgacagctgacttctctcactctgtcctaacatcacaagaggacaagcggagagacaaggatgagaaggatacaggagctgtcctcaaaaagctagaacacccctgccagaatatatacaacggtattttatttcccaaagccgcaaaccagcgcagcagaagctggggatactggggaatgttggaaaaacaggggctgggccagcccagtccagtggtgggaacaggaagtgatgagaagaggggtacccagggccagagaagtaggtgagagggaaatttccaggtggagaagctcacagtaggacaccagcagccacggccaacagaagggctgccaatccagctgtgggagccacacagcctttattatggggctgctggggccccccttttgcaggatactgccctgaattgctgcggtcctggtggccagcggcgcctccagtcaacctgggctcctcatcccgggaggcctcgtgttctactccctgtctcggagtctgactggttggcgctggcatgggtttggtggtggatgtgggtctcactggggccgaggtagaagtggtgacagatgtggttgaggccacagtcgtgggctctggagggggcagccggacaaggggtgggattcgaggggagaagtaggtcttgttgcggaggtcagagttacagcgggacccctggcaacaggagccactgagcgtgaaccctgggcctg

SEQ ID NO: 470092 - DNA, 1000 bp, Homo Sapiens; identical to SEQ ID NO: 159159

SEQ ID NO: 470093 - DNA, 1000 bp, Homo Sapiens; identical to SEQ ID NO: 159160

SEQ ID NO: 470094 - DNA, 1000 bp, Homo Sapiens
tttttttttttttttccaaaaaagtcaattatatatattttaagtgcaaaagcaaactaaaggaagaacattttgttaattaggaagtgacatgtttgtagatgtgatagaacatagacacctaggtgatttagtatttattcaatatacaaagaactactaatgtaccatgaaatgtaatacatattacgtttgattttttaaggaggaattttcattttaactcaatttgagtattaatagctaagccattcaacataagtaaactaagagtacttcatagtatatagctaacatactttcctgcaactgtgtttattgcattatccttttttatttcaggatttccaggtcccagatgaagagataattctacttactggatataggatgcattagatcttcttaccaggttttaaaatgttccttaaaatgctgtagagcttttgccactacgtagccaatgaagttagaactctcagcactttcttcaagagggatcttgagtgtgaaattagaggaaggcagaatgcttaagtctgtcatcattgtttcatcttgtttggaaatatttccttcatgaatccttggaactacctgtattgaattaaagatgatctctgtttctggggcctggtttgccagttcagacacccagccaaattgccctctcatcttctccaccagataggcggtgtcctccaagtgcttccgggtcatctggagaatctggccatactgctgattggatacattgaccaacctgatcgcctcgtctaattctgtgtgcagagcaggtacatcaggacagtcttcagataggtgagcctgacatttttggcatttttcatgaaatttgaaacatcttgacaaattctggtcaagttccccacacagtcctctgtcctgcccaggtaacatctttgaaatcaggcctccgtggtcaggagctttgtcttgttttggtaaatcttctattgccttcagcatcttagtaatt

SEQ ID NO: 470095 - DNA, 1000 bp, Homo Sapiens
ttttttttttttttgataggaacaacattaagaaaaacaaattgatctgacagagaaaacataaaactctcttaaggaagagtttactatagtagggacacattccctaggggaagggaagggaagcgtctgctgaaaaggattttcttccctgggctagaattacatccttgaggccttcctacatgttccaaggaggccaaatctcttgtggtcctaaactattcctcattccactcctaatcccaacagccatcctgggataggaacactagcctctggagagcagtgaggcctaccaaacctacaccagtcagcccatatgacataattacaggtaacagaatcttggccaagccaatgaaaaattaggcacagtacctatttcagaagaatggatgcaattctatgcttgactggctatgaaagttctaaggagaggaatagggaaacagtcaagctaagccagcagctttgcagagaggaatcccactggagccagcacagtattggcacctattagcacatgctgctgagctcacttggggaaggccaccagtgactggagactcagctacttccaggcgttaaaagctgatagaggaagcccagtagtcaggggaagaaaggcaatggggcaacgtcccccatggtacatttctacctccacttttctccttgtgatgccactttcatttaggggctggaatgggatttgagggccctctcttctctctaggctttctgaagtacttcgcaaagggccaggagcccagaagtgaaggggctgtaatagacagataacaacctggtattcaggaacagcccgtctccaaacaggaatttgttgacctgaacttcaaaattaactcttcgcttatttagcagtctaatccacaaaacagaaacataccagagagggagagatttgcagactatgttcagagagtgaagggacacgaatggtttctatttgaacactaaacatttttcaaaacac

SEQ ID NO: 470096 - DNA, 1000 bp, Homo Sapiens; identical to SEQ ID NO: 159161

SEQ ID NO: 470097 - DNA, 1000 bp, Homo Sapiens
ggccgcgctttcaacaagattcaacatcttttatttacatgtttatgacatacattaatggtcatacacaatttttaaactaaatctagtaacaacagaggatggaacataaaaagacacaattccaaattttagtcaggttgaaatgtttttccactaactgaaagataagataaatgagcagccattataaagttatgggctgtatgtcaattcacgtcttaaaattgaaagtcagccacacagctgttaaaacaatgggaaatttgcaaatgcaaatatataatgcatgcacagctatcacatttattctttatccttaaagccatttttaaagtaaactgggagaggcaacttagtaatatatgtacatcaaggcacattcttttcttgtgctttaggaatgatttacatgtgatctgcttatatcttaattttatactttataacagcttctaatacctaaaagcttaatttttaacaattattctttgagtggtagtttcccagagagaaatgtggcatctctcatggttattttcaaagtcagaaaattggatagcttgaggaggtgggatttaaaaatcaaacatatgaattaatataacttagttttcataacctttaaaaataatttatcttcaacaatttagtggaacggtaatcaatttcttcaagtatgatactatgagggctgcactgaataattttcaacattctgaaattacctgacaattacatggtatccacagagctgctgtgaatgtctatattgctatctgatttctcaactgcagtttttcaaccaaattaaacaattaaacatgatacaaaagctgaaaacataccaaatctagtttgtttgttcattaacttgttcattctttgcaaataatgagaatttttttttccattaattgtcctatgttatcaaggagaattttcctgtcaacagtgtttaataactgtgttcttttctcatggtcaatttacttgccct

SEQ ID NO: 470098 - DNA, 1000 bp, Homo Sapiens; identical to SEQ ID NO: 339645

SEQ ID NO: 470099 - DNA, 1000 bp, Homo Sapiens; identical to SEQ ID NO: 339646

SEQ ID NO: 470100 - DNA, 1000 bp, Homo Sapiens; identical to SEQ ID NO: 159162

SEQ ID NO: 470101 - DNA, 1000 bp, Homo Sapiens; identical to SEQ ID NO: 339648

SEQ ID NO: 470102 - DNA, 1000 bp, Homo Sapiens
tcacaggtcagtggccggaccccagtcatagccgtcttcatcggaggactccgcatcatgtactcgcataaactttttcttcagggcttcccgttcataggttcgcatgctgtcctgtcgccactgtccctgggggtggcggctgtccacctgggccccctgatgagccgagattctcccacgatccctcgggctctgggactcatctgcctgcacgggctccgaggaccgggccagggctggagccgggggctcatcatccacatccgtgtagggccccccctcgccgtctgtgtagccctcgccatccgtgtacgcgccgccctcgccgtccgtctcgtagtcgctgttaacgcggctgtcgcagctgaggtcagcggagctgtcggccaggccgtggtgagggaggtctaggttgtcctccaaggagccatccagctgatcttccgccgtccagatgggccgcgtctgctgctctcgaatgatggccttgagctcctggtaccaggtgtcactcgtgccattcagagggatggtggctgtgaagaggtggctgctgtgttttcgcagcttctgggcttgtgcgtagaggcgacgggtgctgcggcgggaggcaggcgccagccactggcgcagtgccttgagggccggccggctctcggggatgaagaagaccacaatggggtagtactgcacatagttgaggcgctcgatggcggagggggtcacatccaggagcgcatgcttgtctttttctgcaatcacccgcacggtgtctagtttgatgatcttggaggggctgtcggtcctggacacagtctctgcgatttcaaactggtcaggcatctcagcagtcaacttctgcatagcaatgtcggccacgggtcccaggatcactaccgggcgcttgaaactggcttctcgcaacaccactcgttcgtagggcgggtagcggccctgtcgggtcagagctgagaggtcctcacggctccgctgagtg

SEQ ID NO: 470103 - DNA, 1000 bp, Homo Sapiens; identical to SEQ ID NO: 339649

SEQ ID NO: 470104 - DNA, 1000 bp, Homo Sapiens
cacatttagctgtttttaatgcttaaaagctctgtacaaaaaaaaaaaaaaaaatcacaaatgaatcctcacaacacccctgtgaggtaggtaggcaagtattattctcccattttacagatggggaaactgaggcagagaggtgatgtgatcagccagtggtcccaacacagctgaaagtcagagccaaccatgagaacacaaaggatccctccccattcagtcccatctctgactccgcatctagaccttgtctgcaaagaaattaaaacgtcttaattcatgcaaaaataaaaacaataaacctgaaaaggtagtgaacagacacacagtagttctgcaaaagaattcagccaagggggtcaaatattttccaatactggataaatgggaacaacttcggcctcctccccttttcaaatatcatgaccaatgacacatccttttttttttttcctgcagaagtacacgagcctaaccaaagacaggctttgctggtcccagtgagccaagcaaggtggacagcctcctcactgttcagctcctgggtttcagcaagcaccagtccccagctggaagagctgcaaggctcaacgcaaacatggcacttctctgccacctgttcccagcagccttcccgctgtgtggaaacagtggatcccagcagcctctaactcagcagggtctggccttttctgctcccaccggaaggcaggctcaaagatgctcagcaaggatggcctggaacccaggtgatcccctcccaccaccctcagtgcacccttgcacacctcactgtccatgaggaccaccccagcaaccaccctcagctagcactccttggggctcctgctgcagcaggtgggggcaccaggccatcctgggctgccgggacagagagagatgccgggggacctgcagctccaggccttggcttcctctgtgcctcctgcccaggttcccagacaagtggagcaggcctcttcctctgtgctgcgtt

SEQ ID NO: 470105 - DNA, 1000 bp, Homo Sapiens
tttttttttttttttttttttttttttttttttttaaagagacttagcacatttattcactcacagaggtgaatgaagggctcagggtttgaactcgatgacactgatggcgatccgggctgcccgctgtaaggcttcggccacttgaggcttttcgtaagtctccacctccatggcacggaaagtgggcacgtgcgtctgcagggccttgcggccctcgggggcctctgccagcatggtaagggccttggtggcattcaggcgcgctatggtcatgggggagtgcagcagctccaggagcaggccgatggcttgtgcctccagggccgcatacttcccttcagtgatcactgtggcgaacatcagggcaccggcagcgttagacttcacatgctccactgggtctttcagcagatggaccaggatggggatgacgtcaaaatgacacacctgtttcttgccctctcgagatatgctgacattaaggagcgcacgggcggccttgctgcggatgttctggttggcgctgaggagcttctgcttcaggacaagcaccacattgctgcccagggcctcggtggcatcctcctgcaggcagaggaccagtgtgtccaggatgaactcctggaactcctcctcctccacctccacctgcagcttccataccagtgaggaaatcagacctttgctgatgatctcttgggcccctctaggcacctggaccagctgcatgtatgccttgtacaggttcccccggcagactgggctggggtcattcagcaggaaggacagggcaaggacgatgtcgtgctctagaaaggcgtatctgcccacgctatggcttgccgtgatgtggagcacctcggtggtctttatgcgcaccatactgttgctatccttcagcaaagctttcaggttctccatacagcctatgttcatggccttgtagatacactcggggtcatgcatgaggtcacacaaggccatgagggctttctgc

SEQ ID NO: 470106 - DNA, 1000 bp, Homo Sapiens; identical to SEQ ID NO: 339651

SEQ ID NO: 470107 - DNA, 1000 bp, Homo Sapiens; identical to SEQ ID NO: 159164

SEQ ID NO: 470108 - DNA, 1000 bp, Homo Sapiens; identical to SEQ ID NO: 339653

SEQ ID NO: 470109 - DNA, 1000 bp, Homo Sapiens
ttttttttttttttttttttaggaatttgtctgtcttttagttaaaaaaataaaagggagggcacagtgtggattcaggtttgagatactttgactctaaagcctgtgtgcttttcactctgcacataattcatagtgttatcatagctcatcacgttgagggctgttaattctacaagaatcagcctctgacttctcccttgcctggaggggctgtgatccctcaatcagggtgagtctctgcagtttctcatctgtggatcttgatctccgagtactcggtgtcagtggcctcctgtccccgcgagtcccaaggcttcaccatctggaagctgagggatgcatactggagctctccttcccccactgaggagcgggcagaagctgggggaggctggtctgggggactgtcttctgcccaaggttcagtcaggggcccctgagaggctgaacccctgacagcgtttgcatcctctatgcccgtatctcccacgcccgctgctggccttgccgatttcttcctgcaggacctcactacaacgaagatgacgcagaaggacaggaagaccagggctgtggctccagctcccccgaccaccccctgagtcactcctgatgtggctttgctctgcagggagacgttcaggtagacctgctgagagccgagagggttctgagctctgcaggtgaattcagctgcatccctcaggtgcacccaaggcagctccagcacccccgggtttgagggctgtgaggggcacagggtcaggcctctccagctcaggctcagcctggcagggggattgctgtcaactgcatcaactgcacagaccaggcgcagagactggccctctgggagtgacagagatgagccatttcccaagactgtggatactgtgccgtctccttggaagacagtcatggtcaagttctgaggcgggtaggacacgttgagatggacggtcttgttcgtggtcacgctggccccagggaaggtcac

SEQ ID NO: 470110 - DNA, 1000 bp, Homo Sapiens
ttttttttttttttttttttttttttcaatggaaagagtgtaattgactcacagttccacatggcgggggaggcctcaggaaacttacaatcatggcggaaggggaaccaggcacatcttacatggtggcaggcaagagagaagagcaggggaaaccaccacttacaaaaccatcagatctcgtgataactcactcactatcagaacagcatgggggaaccacccccatgatcctatcacctcccaccaggtccctcccccaacacatggggattataattctgattacaattctagataagatttgggtggggacacagccaaaccatatcaaacaaacaacctgcaataaaaaaaaacgttttaaattgggggtaaacaaaataagtacagacccgccatacaggttgggcagggggtcccggccttcatctcctcagtgcacctgtcttgttcctgagactctaggccattgctgctccctcttttgtaaagtcaatgccctcaaggaatttatttcctgaaaacttatggctaaggggtgcccagcctgctgattgcttgactcagtgctagatgagagaagagacctcagaatcggacaggctttaaattccagccctgtcctgagtagccgagtggccttgagagagacccagtgagatttccacacccggatacatcgtggaaccatcaaggcacaatgattagcacacccatctgtgcaaatatttatctgtttttgtgagaccatttaaaatcttcttttagctccttgaaaatattcaatgcaagctgggtgcggtggctcatgcccctaatcctaacactttgggaggctgaggcgggcggatcacgaggtcaggagttcgagaccagctggccgacacggtgaaacccgtctctactaaaaatacaaaaattagcctggcctggtggcgcgcgcctgcaatcccggctacttgggaggctgaggcaggagaattgcttgaacctggga

SEQ ID NO: 470111 - DNA, 1000 bp, Homo Sapiens; identical to SEQ ID NO: 339654

SEQ ID NO: 470112 - DNA, 1000 bp, Homo Sapiens
ttttttttttttttttttttttttcaaatattcagggaactttatttttaaagaataaatcaagtaagacacagctttcgtttacctaaacatgcataatccaacctgaatataaactgcacttaattggtgaattacacatgaaatacaaagggaatgcaattttttacatatgtaaaatgattgctagctatagcaatttaacagtcaaatttatcagaacattgtacattaaaaaacacaaacaacaacttaaagccaaatatctatagtaaaccaaggaaaattctgatatggaatggtttgactaaaagcaaagaataaggcacctgctatgaatttagcacaaccataaaacagaattagttaaccaagacacttgtttcaaaaagggaaacaagtacagagactgattaactgggtgagaaaggcaagtaacaatttagttaaaaacctgctggcccaaggtcagttgattcattccttattccagaatagttaagttcctgaaagtccttaaccactctgctcccttactgttctccatgtttgagggtatcagaagccccctgtgaggttcacgctgtgtatagactaggtagcagatttcccttctgttcctcttaaaacagcttattttaaaagaaatatcctgaggcaattaacaaagcaaacacaagcagctttctttccaacgcattaatacatagacactgctcaggttttttttcaccaagttatggctaagtatacaaatagccaatacttgcagttttcaacagtactagaaaacccaaaacctgccctatgaccctcacccttaccattagtaaaacgtaaatttgatcaatcataacctataaagtcatataacaaagggaagactaaagactgatcattatcagtaaatccattcaattccagatgccactttaggctgatgtgtctagtaccctaatgattgaaaaatcattaatctagaaaaagcatttgcaaacta

SEQ ID NO: 470113 - DNA, 1000 bp, Homo Sapiens; identical to SEQ ID NO: 339655

SEQ ID NO: 470114 - DNA, 926 bp, Homo Sapiens; identical to SEQ ID NO: 159165

SEQ ID NO: 470115 - DNA, 1000 bp, Homo Sapiens; identical to SEQ ID NO: 339658

SEQ ID NO: 470116 - DNA, 1000 bp, Homo Sapiens; identical to SEQ ID NO: 339659

SEQ ID NO: 470117 - DNA, 1000 bp, Homo Sapiens; identical to SEQ ID NO: 339660

SEQ ID NO: 470118 - DNA, 1000 bp, Homo Sapiens
tttttttttttttttgacgtgaattagtctacgtgtgtgcaggacaaaatggactgtatctttttacatttaacttttatatgacatgagatgtcttacaaatgaccaaaggttttttttttgtttttgttttcgactaatgatatggaatgttccttgtgtttatatgtgtgtcaggtaactttatacagaaatgtttaccacaaatatgtgttaatgtttggtgtagcttggactactgcaaggtcttttcaggactttcagtagaagcctgtgatgactgctagaaatccaccacagatcacaaattatgaccctgctttgtatggggtttataggtaaacagttaagtcagcataaatcacggaggacagtctgagagtgatcagaaatacttcagttctcacactgcataccttcctaacagattgtcaaaaggtaattcttctcctcatcctcctttttcatctctcctttttcttctctctttttttcttttctctttaagcatcattaattctgtcctaatacaagtttggtcaaaacgaaaccattgttatctctgaaaaagaaatcagcagtggaaagaacatacttgtgggcacttcagatgttcactaaaagccttaaagcagcattggtctttcttcatccctgtaaaatgggttatcaccaggagggatcatttttaaatcaacagaagagacaagaaaatgccaatgcctttttttttttcttttttcactttctcacagccacagggtcgtttccccggcagtcttgcaaaagcttatcaatttctctcacaacttcctctgcatccacagactctctgcccagatccctgttggggtggtcaagctgctcaagaacagcacccatctcactggaatcccggctggctctggaatgcacatctgcaaagacccttgccatctgatcggaagccatgaagggagggtctcttggttgcttactaggtgacagatattgactgtca

SEQ ID NO: 470119 - DNA, 1000 bp, Homo Sapiens; identical to SEQ ID NO: 339661

SEQ ID NO: 470120 - DNA, 1000 bp, Homo Sapiens; identical to SEQ ID NO: 339662

SEQ ID NO: 470121 - DNA, 1000 bp, Homo Sapiens; identical to SEQ ID NO: 159167

SEQ ID NO: 470122 - DNA, 1000 bp, Homo Sapiens; identical to SEQ ID NO: 339663

SEQ ID NO: 470123 - DNA, 1000 bp, Homo Sapiens; identical to SEQ ID NO: 339664

SEQ ID NO: 470124 - DNA, 1000 bp, Homo Sapiens
tttttttttttttttcttttttttttttttctttatatgtattatatttttcattaataaataggttttcttcattaaacacagaacatataacagattgaaacactccccccctccccccaattccaaagacaagagtctataaaacaaatgccagctgtactaccctaagggcagaaaaagtctggtgacccccacccagccctgcccctgcagcaccaccacccccacactctgcaagagaagggggtctggggcttctcccttggaccctggggacttaggtgagaagcatgtgaatgtatgatgtcacctctccatgaggcatgggctatgcaaagatgaggtttccttctcattggctctgaccagcccctgcacttccgattgcagttacgaagcacctgggctaagcccccaagggagctgccgctccacttccccactctccgttgctgcctccttagaggggaagggaagggctcagggacccctcccatcccctgacctgcatggaaacgctgtgtggaagaggcatgaagctgaaggtgaggctgctgtaggcccccaagcccatgaggccagcatgccccccgtcccccacagctttccttcctctggagcggggggggcactggggtagtcgccccctccaaaatctagtgcctggcttggggtatgatggttctctctcagcgtcaggtcctcatgccgggcctggctccttcctcgccccattcctgtctccttccaagccctcaccgtggccatctgaaaaactcatgtccagtgtcctaaattgtctcatcctccctctccccgtgcctctgcaccccaagggaggaagtagggggttgtctcccccctccaatttccacttcacataatggaacagcttttggccttttccttcttgaaggtagaagagatgagttcagagcgactggggaggtggagcagtcgtttggagaggcttcggacagggctcttctggggcagt

SEQ ID NO: 470125 - DNA, 1000 bp, Homo Sapiens; identical to SEQ ID NO: 339666

SEQ ID NO: 470126 - DNA, 1000 bp, Homo Sapiens
ttttttttttttttttttcaaacgcatgatgagctttgttttgtgagtaaaacataatacgcaaaagaagtatgcttgtaggggggtcttgggtcgtcatttcttttctgtttctggtttgtttttggagagagtctggctttgtcgcccaggctggagtgcagtggcgcgatcacggatggctgcagctcctggggcttcgcttcctgattcggttgtcctatttcagttcactcctcaggcgcggaggaaatggtggaaggcccagctctgggtgatcctgggcgctgcccccgttacccgttaccaggaagaaggtgagcctggcaggtcacagcacgagcgtgcacaggcccagcagggccatcagcagcagcgggagctggggcacgggcgtggtgccagaggcatacagacaggtggtgtaagcgtcaatgtccacctggcgcatggcacacacgtgctgcatgctgcaggcctcgtcgcagaccccagcagagtagctgactgagttatagacgtagtagcgctgcagtgtgctctggtcgccagcgatgcggtccagcactgtgtgcatggagtgggcgctggcgtccggcaccccataggcctcggtcagctggtactcgagctcccagcgcggcgtcccctgagcattcgcctggctcaggttcatgaagtaggtcaccatgtccttcaggctcagtgtggctcggtcatattcgaacacccggatggctggattgttggccccattgaccactccaggtaatgtggttttccatggggtgactccaggtgtgatgaacatggcgcttatggggacacctgcatcatcatagagcatccgaaagctgtcggtgtggtggtgcccgaagaactgccctgctatgacgcgatgatgcttccggaccaccttcaggtatttttcattgaagccctcccggaaccatgccttgttttgcgtcttctcaaagaaccccgggggcacgtggccgac

SEQ ID NO: 470127 - DNA, 1000 bp, Homo Sapiens; identical to SEQ ID NO: 339668

SEQ ID NO: 470128 - DNA, 1000 bp, Homo Sapiens; identical to SEQ ID NO: 339669

SEQ ID NO: 470129 - DNA, 1000 bp, Homo Sapiens
tttttttttttttttgcaaccctgaaacaaatacacagactttatttatgcacaaatacactttccagcaaagacagaagtgatttaaaatcacacaacttcctggggcagctagtgtccgtgtacttcggacaggaaggtggaaagtggtgtaaggggctgggtcacaggattaaggcacaagaagctcaccaacaaggagctaggtaggaaggaaagcgaggaagagagggcttaaaagaggaagagaagggtaggagactttgagggagaagcaggaggcagctcagggaaggggagctggcctcagatcatgtgcaggggtgaccatgccagatgtccccaggcctccattggttcagctgggcctgctccagaggaagaagttgcaccgggaggaggggtcagtgggaggaccccggggcctggcacacatgtagaagcggcggcccaagttgggtcctggcttcttcacagtacgcatcacacatggctccctgtggcccccacagaggggtgtgcgcaagggccccgccagcacagacttccagaatgaggtccgtaactccttctcatctttggcttctgaagtcttggcctgccccttcaccactttggccactgccttctcttctggagtcttcggggtcatgagggcgctcatcagtggtaggctaggcagctctatgtcaggagaggcttggggacagctaggggagggctgaaagtagctcttcaggtttttctggcctctgctagagccaacctgactgggctgaggcctggttgagcgcacttgggctttgttttggcatgtctgtacccgggtttgattgttgtgctgcagcgtcgactgctccaacacaggactttgttcgagaggaactaggaagcgaaggatcttgagctgggtgcctgcaaactcagggaggaagcgggtgcacagaggtgggcactgttttgcaggcacagaggacacactcaagactgcacccacagg

SEQ ID NO: 470130 - DNA, 1000 bp, Homo Sapiens
tttaagtttgggatggtttatatttcagcaaaagctaacacatacaacatgagagagtgatgtcaagatggctgatcttgaggaaaagagcttagcacagcccagacttacttagactgttggtaagaatatgcaggtgcatgttcgttggatgtgtccactgctatctgttgctgctgaccactggtgtcctgggatgaaggtgccactgtctggggagaggtatcagcaacaacaccttcaatagaaacagctgtcggaggcacaggcgtgtactgaggaatgtaggtcccttgcataggagcagcagcagtcatatacgttcctgttgtgcccaacgaaaggtgattcatctgctgtgtcagtgggcccatcatgttggctggctgcattgacatgggatggtccatggttggtgtaatcacagcacctgttggttgcataacgtatggcggatgaggcatccatgaagtactctggacctggtatgtggagacaggggaagcagcaatgaatggcgtgatagatgtctgtggaatcatgcggttggttgcaatactgtacggtgaagaataaaatccattctgtatggcagctgtggggtcataggtcaaagccatgccagcctctccttccctgggccaaggcctcccattctgggtatatttgctttgattctgtcgcttcttttgtcctccatcagcgaatttgcacagcaaaggctcactgggggctgggatgcctggtggtgttttcagatattttccattaaaatgttgaattaccacttcacatttttcagtagactccattctggcaaagccaacacctctgctgactccattagcgtctcttagtattcttgtggaaatgacatgtccaaagggtttcagcatattctcaagctcctgctcatccatagaaatggggagatttgagatgtataggtttgttgggtcttgctcttgttgcttagccatctgtgcctgcacgccatttg

SEQ ID NO: 470131 - DNA, 1000 bp, Homo Sapiens; identical to SEQ ID NO: 339670

SEQ ID NO: 470132 - DNA, 1000 bp, Homo Sapiens
gaaaagagagtcagccgagttttatgagttctatataattttgaataatagtcttttgtcagatacatgttttacaagtattttctccaagtctgtggcttgtcttctccttctcttgatctctggggtatctacatttttctcatcacaacaactttattcatgtcagtaaattcatctttacaagtttctctggctgcatatctagagccttttgagccgtgtcagattcccacagtcagctcttttctcgataactctttatattcagtttgaatttcattccaggattatcagtttttgttcctttgctgcactttcatctttgttggggagttccctcttttgattcatttttgtaaaatgtcaaagggatttatcactgggccacaagcaggcaatagcaatacaactacacactttgctatctatgcaggaataacagatgtgcagtgacctctggcagtctttgatagaagtgactggtcattggtcatgatgtacataggttatttacacagcgatatgtgaactggagagctactagcaaagtttgtgttttatgcaattacaggtaattgtggtagctgaagtccaaaacattttgggggaggggaagaatggtgttgctaaaccattatgactgcaattcgtgcatgttagaacctgtgcaaagcaaggtctgcctgtattacatactatttttctgtaattgtaaatgatgagaagctattctgaaagaaaaagatactgaagaaagatttgtttttattttcctttttaaaaatcagaatatggctaaagtgaaaatcttagtggagctggggagggagcatgtggattatctggcaggctgatgtagctgtcttatctgatgagagagatgcccccgagaaaaacaaacttgaaggcaacatggatcagctagagtttggtttggggccttcgttttatccagttagcgacggcaggaatggcttggactttcttccgtaaagtc

SEQ ID NO: 470133 - DNA, 1000 bp, Homo Sapiens; identical to SEQ ID NO: 339672

SEQ ID NO: 470134 - DNA, 1000 bp, Homo Sapiens; identical to SEQ ID NO: 339674

SEQ ID NO: 470135 - DNA, 1000 bp, Homo Sapiens; identical to SEQ ID NO: 159170

SEQ ID NO: 470136 - DNA, 1000 bp, Homo Sapiens; identical to SEQ ID NO: 339676

SEQ ID NO: 470137 - DNA, 1000 bp, Homo Sapiens; identical to SEQ ID NO: 159171

SEQ ID NO: 470138 - DNA, 890 bp, Homo Sapiens; identical to SEQ ID NO: 339678

SEQ ID NO: 470139 - DNA, 1000 bp, Homo Sapiens
tttttttttttttttttttttttttttttttttttttttttttttttttttttttttttttttttttttttattgttttctttttttaatgaaactagatcactgcttacaaaaccctgcacaagccctcctgcccatccccttcacagttcccttggctcagcctctcctgtctcacaggaactgcaacaaaatgggtgtggaacagccaccaccacgtccattgaacgacaggaagggagaggccctgggctccgaccctgggccttaagagggtgacagttcttccttccacatccgttcccatggggcctggagttgcatggatgagggtggtccatgccaccatggttctcaggccaccactcagaccagagtgaaatgatgtgaatgtcccaccccacagagccccctccccccatagattccccccaccccccccccaaaccctaattctacccctctactgagatgaggcccagcttccatcagaagggccagggcctacaggctgtagaacttgaggcttctgtccatgcctgttgaagcgatgaacttggcgtgatgcccgaaggccacccctgtggtcaggccgctatgctctgtaaagtgaagaatctccgtccattgtttgcagatgtagatctggacatccgtgcccccaagagccaggtaggtaccactctggtcaaagatcagtgactttacctcaaagttgttatccagctgcaaagtcttaaagttcttaagcttgcgcagatcccagagcttgacagaggagtcatcagccgctgtagccaggtagtaaccattctcagagaaggcgatgctagtgatggggcccgagtggccagggaagttggccacattagtacgttccttcaagtcccagatcttgatctgagagtccatggttcctgttccaaagatgagtccgtcagggtggaactgtgcacaggtgagagagcagccggaggtctcatctgtcaccttggtgagc

SEQ ID NO: 470140 - DNA, 1000 bp, Homo Sapiens; identical to SEQ ID NO: 339679

SEQ ID NO: 470141 - DNA, 1000 bp, Homo Sapiens; identical to SEQ ID NO: 159172

SEQ ID NO: 470142 - DNA, 1000 bp, Homo Sapiens; identical to SEQ ID NO: 159174

SEQ ID NO: 470143 - DNA, 1000 bp, Homo Sapiens; identical to SEQ ID NO: 339685

SEQ ID NO: 470144 - DNA, 1000 bp, Homo Sapiens
agaggttacaacatgaatctttaatcataagggattgttccatcaggctaatttataaaaaatagctctactgttattataaaactgaaagatactttgttacaaagtgaaatacataaaagtacaacatatgtattatacattcagaatcccaccactagagataagtagttatatgtcctctcccacatctttttttctctgttgctctaaacatacacacagaaaaacatactaacaaaatggggtcatgctataattgttgttctaaaactctcctggttcactaaatacttcatgagcaacctgcattgtcattatctgtgtgcctgaagatttctagtggctttccattgcatacatatgcctgaacttacctaaaaaatttcctaccaatggaaactggaatattaacatttgctattttaaaaatgttttaaatttaaaaactccgccttctgcatgcgtttttgcccaagtgggcaactatctcccaagtatcaattactacatatttactgccacttcaaaggttatagaaattgaattgatacgttaatgaattcttttgaaaacaatgcacggattttctctctcaccaataagtacataagacttattacgtccatttttgcactgctataaagaactacctgagactaggtaatttgcaaaggaaagaggtttaactcacacacagttccacatggctggggaggcctccgaaaacttagtcatggcagaacgcaaaagagaaataaggaccttcttcacaaggggacaggagagagacagcgaggaagggctacaccttaaaaccatcagctctcatgagaactcactatcatgagaacagcaagggagaaatctgccctcgtgatccagtcatctcccaccaaggccctcctctgacacatggggattaaaattgagatgggatttgggtggggaacagagccaaaccatatcagactgtttctacaaccccccccccgccccc

SEQ ID NO: 470145 - DNA, 1000 bp, Homo Sapiens; identical to SEQ ID NO: 159176

SEQ ID NO: 470146 - DNA, 1000 bp, Homo Sapiens; identical to SEQ ID NO: 339690

SEQ ID NO: 470147 - DNA, 1000 bp, Homo Sapiens; identical to SEQ ID NO: 339691

SEQ ID NO: 470148 - DNA, 1000 bp, Homo Sapiens; identical to SEQ ID NO: 246490

SEQ ID NO: 470149 - DNA, 1000 bp, Homo Sapiens; identical to SEQ ID NO: 159177

SEQ ID NO: 470150 - DNA, 1000 bp, Homo Sapiens
ttttgttttttatatatgtgtatatatatatgtatatatatatatatgtgctgtatatatcttaaagttctgtttcctgggtgctaagacaagatatgttcagttcaaccaaccaacagcaactaaaaagtttaagtggtccctggaacggacctgactatgtacagcgttcccgccgaggcggaagcttgaaccagtccagcgcagggcggggcgggatgcggctctgtgcgcggaaggctggggacgcgctcctccggcgggcctagccctggcgcgccccagcgcactccgctggggcggaagaaacgccgggaggctctggccggcaggcgtggagcaaaatcgagggcagctgaaggggcagcagtctgcgcgggaggaactcttagtggttttgatttggagtagtgtgcgggtgctccaatgggcagaaacacgccagttagtgactccagtgtccagaaagaataaattaaagtgttgggctcaaacagcggatcagagcgcagagcctccgaaggctgcaagtgcttaatagctgtccagaaagactggaaggggaggcttaagagtttagtaggggctgaaggggggaaataatacatctctcctgtatagaatgtgtaggccaagccgaagcaccggtccccccatccaaggggcagggtgggtttgcacatccccccaagcaagtggcacaaaaatgggggcggcagtgcaggcaatggacatctttttggggggtgaaaattcagttttggagaagacgaggcaaaggcgggcggtgcagcagcagcaacaggatcgggaccacggagggcgcaggtagttgcgtttcttctcctctttcattcctgggctcacaagacctggaaccgccatgaggcttggtccttatagtccagacagtcgggggagttgaagttgagtttccaggcggaggaagcagcagcggcgccaggctccttgtaatccaagcagtcggcagagttgaagg

SEQ ID NO: 470151 - DNA, 1000 bp, Homo Sapiens; identical to SEQ ID NO: 159178

SEQ ID NO: 470152 - DNA, 1000 bp, Homo Sapiens
tgttattttcacagtatttaatgggtttactatataaaaacatcagttacacttcaggcttcataatatttttcaaatttccacttttgatatggcttcactgggtcacaggcagctactttcaggatcttttgagaaaaatttccttccaagcataataattgctgattgttttcaaaaacaatgtgattcaccagttctggatgaaagactgatgttgatttatgcagccattttagccctttgtttctgttatcacaagggtgcagccttacggctcctttatcagggatgggggctatacaccattctccacatttaataagtcttaaccaggtgtaattaaattgttgaagctctttgctcccatcgcagtcttccagaatgactgtagtgttttcaatggaaatgcatttacccaaagccacattaataagcacaccactagctctcacaatgggagcccttaagtcaggaaagacattctccaagtaccatttgaaacttttgcacttcagtttctttcgcagctccctttgctgggtgaggttgccaacatctagcccttggtcgatgaggtggtctccgtggccatagaacagctccttatactcatccagccagacctcggcaacccgcaccaagttccgctccactgtcttcatccggtctttggggaaggaatatggattgtcatttctgaatatatggcccactcgggagcagggaatgatctcaatttcaccaccacacatccacaccttgaatgagagctccatattttccccaccccaaacatcaaggccagggtcgtatgttccaagttcaaaaaagtaacttttgtcaatagaaaacaatccaccagccatgacagggcaccttattgtatcagtttctttaattctgttttttgcaatgacatctggaggaattgttctccaaccaaagttcatgggccacacaaagatgcctctttgaaagttatccactgtcatgtaac

SEQ ID NO: 470153 - DNA, 1000 bp, Homo Sapiens
ccatctgctgcaagtgtttattctatttagaagtctacaaatttgagcttttaagaaagattcacaaaatattcattcaaaaccacatttttggcttatcaaatttcaaatatattttactgtgctgaacaatatattctaatgctgtctaaaacacagctaaattatttttctttatttgtttatacacattcggtaatttctgaaaagcaagatttaaaaatatttattaacaaaactacccaattacaatgactgttctcccatacacgcaactattttctgtagctgtatcttcttacctcattccactttaactctgtataccgtattgatttgtgatgagatgatttattatgagaactcttagggagttctcatcttccatttctcatcaattcaaacagcaacacctttcacaagataacattaattcccttggcagggcagaagcttaagtttgttaaaagcactcactgaaaaacatttttaaatttataggtcatataaaataatttacaaagagacagatgacttcaaatattatttggcagtcaccttactatgtagaaacataaatgaagcaatctgtcacacgagacaccagtcacttttggtcttttgaaggaagtgtgtgtggtgagtgttgtttctgcaggcccatccagcatccgctgattctggcagccctgagcccatgtgtcacatggagacctctcctcctcccccacatgaagcctcctggttcaggagcaggaggagccgaggtctccaggccctcagtgttgaaatcaaaggttccaagaaaataaagcaaggatatacacagagacgccaaaggagggtgtgacaggaaggaacgtgaaacagaaatcacaggaaagctcctacatcagaactcagaatttctcaaaagaaatattaaaaatcagaaacatataccatatgaaaaagtagcaaaacaatctgcaaaactatctggacttcactgccgcctgag

SEQ ID NO: 470154 - DNA, 1000 bp, Homo Sapiens; identical to SEQ ID NO: 339694

SEQ ID NO: 470155 - DNA, 1000 bp, Homo Sapiens; identical to SEQ ID NO: 246491

SEQ ID NO: 470156 - DNA, 1000 bp, Homo Sapiens
cgggttttaatttttattttacatatttatacataaaactttcaaggaaccctctgaatccaacagaatgttaatagcacatctaaaaaggaacttcaggtagtcaacattcacaaaatgttgaaaactgagtaaaatatacatattacggagagctacaacttcactacgaggcaggcatgtattttttgacttgtatagcaccgtcatttacagttcttctttaaaactacagtgaagaatgaaaagtagtcaatgggaaaatactgttccaacttaaaatctctaaacaaataaaaataaagttaaaactactctcttttattaaccatgatttgtggtggtgtcagtactgtacattttttgtaacaatattttattaaaatgcctgatattaagtggcacaagtaaaaaattaaaataaattaagaagcaaaggccaatcactggacattaagcttcagacattatcaatgactaacactgatatttgtttctgcgccacctttagcaacagcatttttacaaccacagaagcaaaataaattctagcttgttctctggttgaatggcttcttttcactttgcaggcattttctctgccatgtgcttctgctgactttcagcatgtctggtcaagtcttcaatgtccaccagcatggcatcctgctctgtgtgcagctcatctcggatgagaagcagctggaccaactcttcattcaagctttctatctgggaatggagatcattgactatcacttgtagctgcccaatagtcatgtctctcaggtcggtgggttttaaacttcttttcatcaagcattcacttatatgaggcatgtgtggcagaagatcagcgacgggagactttttcctgttctgtttctccacttctacttgcattttggccattggtttggccatggcaagggccattttggcttcagcttgcaatttcttttgccttgtaaggaagtccatgtcatccaaggattcagac

SEQ ID NO: 470157 - DNA, 1000 bp, Homo Sapiens; identical to SEQ ID NO: 159181

SEQ ID NO: 470158 - DNA, 1000 bp, Homo Sapiens; identical to SEQ ID NO: 159182

SEQ ID NO: 470159 - DNA, 1000 bp, Homo Sapiens; identical to SEQ ID NO: 339698

SEQ ID NO: 470160 - DNA, 1000 bp, Homo Sapiens; identical to SEQ ID NO: 159184

SEQ ID NO: 470161 - DNA, 1000 bp, Homo Sapiens; identical to SEQ ID NO: 159185

SEQ ID NO: 470162 - DNA, 1000 bp, Homo Sapiens; identical to SEQ ID NO: 339699

SEQ ID NO: 470163 - DNA, 1000 bp, Homo Sapiens
tttttttttttttttttttttccataaaaagcactttgtttaattttatcaaatcgatctgtacaaaagttagcgttgcttggtcagaaaggagtgaaggcagcaggggagtgagggtgcgtcctccgaacgcggtgccaagggagacgctgcatgaaacgggtctgcgacggctcccggcccccacccccacccccagagaaatagaagcagaggcattatcttttttttctacaaaaaagtaggaaaagtagaaaaagtacaaagaagcaacttctcggctgtgtttaagtttacaaagtttaaaggcacaagtttccgtgaagtaggcgctattgtatgctctatgctcagcacacaggggaagcagtgcaggtgaatcaggtatgactcgtctagaactgaggccctaacgacgtttagtggagaaggtttagtttcacagcttggtaggtggcactggtgcctgcgagccaagatcacttctgaagccaccactttccaggaattcctgtgtcctgtgtcctaccacatggcacagtcatgggcaaggacccaggaattcctgtgtcctatgtgtcctaccacgtggcacagtcggggacagggacggagtcctgcttcccaaaccccaaactggtactgggtgctggggcaccccaacctgatcagagatgtcacaaggcaggtcccttctcctccctcgggttttcggttgccaagctcgaggcatgaggggcccagtcctcccagggaccttgggacctccgggccctccagggcggcctcccataagccgagcaacgagcaacgtgatgccggccaacagctgcaactccacctcctgcctgccctcaagggaagcttcccagcttccgttttgtcttaaattctactctttgcccgaattacctcattaattaaagataaaataacacagaacataaatacatctttaacagctttcagaagaaacacatttaagcttcaaaaataaaaa

SEQ ID NO: 470164 - DNA, 1000 bp, Homo Sapiens; identical to SEQ ID NO: 246492

SEQ ID NO: 470165 - DNA, 1000 bp, Homo Sapiens; identical to SEQ ID NO: 339701

SEQ ID NO: 470166 - DNA, 1000 bp, Homo Sapiens
tttttttttttctgaaaaagaaacagtgttgagacttcttccagttttccaaggagcccctccagtcctaagatgcccaggggtgggtgtgaggtggagccccacgcagagtacggtcatgtgcttcttccaagccccagggctgcgtggggaaccaaagtctctgcacagagaatcccaaccttcctgttccctcacttttcctcttcttttcatggtagcttaatttggttcttcaaagctggagcttggcaaccaaatgcccttggtggtgaccagcagggagcccctcgctacgtggagggttccacctcttgcttctgtttggaaatgagctgcgcttcctttagagacaggtatacctcttcctgaggatcatagtagtagaactttcggatataagagatcagaggtttaggcagtgggagatctgggatgtgatctatcctgacgagctgtcgtatccggaatctgcaaaggtgctggagggatttgacattgctgaatcgggacactggatagagcagctggacaggagttggtggcagtcctggaaccctggatcttaagaaatagagaaactttccattcttggagtgcataatggctctcttaataaactctacaacagattgacagcggtcctcaaacttgggatgacaccacaggctgaaggttcctctgtagtgctccattctagtgtggtgggtgataccctgtgatcggaaactgaggctcaggatgtaacgaggatcagaactgtctcgtaccaggaaagaaccatctggtttccctttcagcttcatctctgcatcttcccaattcattggcccccaataccaaccacacttctccaactctcgaaggctggctgcaaagctgctcgagtcaggccggtagaggggacactggaggtgctgtgggggttggctgtgcagggattcagctgctcggatgggagcaatccggggaaatgcatctggggcatggggtggaggag

SEQ ID NO: 470167 - DNA, 1000 bp, Homo Sapiens; identical to SEQ ID NO: 159187

SEQ ID NO: 470168 - DNA, 1000 bp, Homo Sapiens; identical to SEQ ID NO: 159188

SEQ ID NO: 470169 - DNA, 1000 bp, Homo Sapiens; identical to SEQ ID NO: 339704

SEQ ID NO: 470170 - DNA, 1000 bp, Homo Sapiens; identical to SEQ ID NO: 339705

SEQ ID NO: 470171 - DNA, 1000 bp, Homo Sapiens; identical to SEQ ID NO: 159190

SEQ ID NO: 470172 - DNA, 1000 bp, Homo Sapiens; identical to SEQ ID NO: 159191

SEQ ID NO: 470173 - DNA, 1000 bp, Homo Sapiens; identical to SEQ ID NO: 159192

SEQ ID NO: 470174 - DNA, 1000 bp, Homo Sapiens; identical to SEQ ID NO: 159193

SEQ ID NO: 470175 - DNA, 1000 bp, Homo Sapiens; identical to SEQ ID NO: 159194

SEQ ID NO: 470176 - DNA, 1000 bp, Homo Sapiens; identical to SEQ ID NO: 159195

SEQ ID NO: 470177 - DNA, 1000 bp, Homo Sapiens
ttttttttaacataatttaggaagattttattttttggatgttgtcagaaattacagcaatatattcataaatacctaattactacattcaacaaataatattacaatacaattaattcaaacaagtacacttagaacaggtttaatttcacagcatctaaactgcccccagagtgaccgaggcaccggtgttcctccctcccacctgcgtatggggtttactgttatagaattaagcacagggtacatacaaaataacaccagttagcatggtcttcctcaggtcaaggcagagttaaggagttttttaggttaagcactggatggaaaagttggggacaggctactgcaagtagtaagaaagtcaacagcttggttacttgaaagaatatagagattgctaagtggctaatatacactttaaagaggaacagaatcggtttgtgctgaccatctccatcttgtggtggatccctggcattttctacacttgtgtgaaacatgtggctcagggaaaggggtaggatctggtgtgaaattcagcttaacttttgagatttggcagtattatgagctacttgaggaaaataccattctgctacaaactgcagattccctgtgttagaatccttcactgctgaaggtgtgggctccttttgatgctctctgaatactcttaagggtgcaacctatcagaatgttagtcccaattcagtgctttattcctttaagattagaatgtagactaaaatgtggaaagtcccgtcttggtcacttatctgagacaacagattaggaacatgatattttatcatgtcagtctgactctgactatatgaagcaaaaataacttgtttcagtgaggaaccagataatttactattggaaggtatccctctgcagagggacagatggcagctcccttccaggtaatgtaggaagatggtctaaggaccgagccgagggctttcaggtgcatcctgacacacaggtggcataa

SEQ ID NO: 470178 - DNA, 1000 bp, Homo Sapiens; identical to SEQ ID NO: 159196

SEQ ID NO: 470179 - DNA, 1000 bp, Homo Sapiens
ctactcgggctcgctgctgttggtggttttctcccactccaggctctcctcgctgcgggcgggcgacggccgtgcccgcaggccctggaagcggcggcactcggggcagacgcggatgtgcgtgcagccgcgggccaccagggcggcctcctgcgccagtctctgcgcgagctggtcgggctcccctgccccgcacagcttcccgttgctgagcgtcgccgtgccccgcggtcggcgctcctcggggatggggggccggggcggcgggactgcggcgcgccgccggcgggggtggatactgtcctgacacaggataatgctgcgcagctcggtcaccatctcctggcagacggacacctcagttgcttctgagtgtctgagagtccataaaaactccaacatagccataaaaatggccacgattaagccacaaataagaaccacaaagattccaccaatattctccattcccaggcctttagctctgtgatcttcctccttggggcacttccctccttcccaccatttgcgcttcaggatctccaggcggttgttctcctgcagctggagaatggccagatcaaactcgtcccggaaaaccgagccgactggcatgccaatcccatagcccttggtgtccagcaggcccccaatctgagtgaggttgcagtttcgctgccgatagtactcgttcatggtggattccaggaggaaggcgtagttggaattcaacaccctggcgattccctcctctgtgctcttcacgaacacgctgggctgcttggaatacatgtaattccacatgcgttggtaggtctggtagcgggaattttggaagaaggtcatgctggagcctccgtgaattgtgccatattcaatggcggtctggtcagccaggtcatccactgactcaatgggcacatccatgcgctgcacggtcaggaaggctgccaggttggccgtgtaggatgagatgatgatcagcgtgaatgcccaccag

SEQ ID NO: 470180 - DNA, 1000 bp, Homo Sapiens
cctcatttcccctgaaattcacccaagccagaccatcacaccttgcaatatataatttttgcagctttttttcttaaaaaataaataaccccccaaaatggccttttaaaaaaaaacacccagcaggtaccatgctaagacaacatcacatgcttaaaagggtccttaacagtgggagggagaggagggcagggggcttgtttgtttatctgttttgtctgtttggaactgacaagggacaaggtgagaggaagagagaaaagaacctatatatatatatatatatatatatattaaattctataaataagagtcaatttgtgtgtgaggggagggtgggggcatggggtgggggcaggggtgtgagttatgttttataacctggtaatgtcctctgcccgttgctgctccggcggcgtggcgctctgggagtggtcttcagaagtacccggggtagctgccgaaagggtgctgggcgcagcgccggccgggggtgctgacctgactttggtgttggggagtcggtggtccttcttccatttcatgcgacggttttggaaccagattttgatctgcctctcagagaggcacagcgagtgggcgatctcgatccttctccttcgggtcaggtagcggttgtaatgaaactctttctctaattccaggacttgctgccgggtataggctgtcctcgagcgcttgggttcccctccgttataattggggttcaccgtgctaacgtgaatttttttcatccatgggtagactatgggttgcttgctggcggcgctggagggatggtcgggggctggctggctgcaggctggcggggctggggacggggaggcggaggcgcctgagagaggcgccggctcgcagagcgactgtgatttctcggggtggtggtggcccgcctgggccggcccgtggcctcgcgaattgccgggcccctggagactggtgcagctatactggcgctcagggtagctagggcgcggag

SEQ ID NO: 470181 - DNA, 868 bp, Homo Sapiens
ttttggctgtgtacatagggtgctttattctccacagagtgatacatgctaaggtgggttgggcttggaccgatgtccccatatgtacagaactgaataaagtgggtctctgagaagtctgatgtgccttgatgtggaaagggagacggggaagatggaaatggacattacaaccagggatgtgttcagtcctgtgctggttctggcctggaatgtaggaatataaggcagctctcactgtggtcacttccaggcaggggatgcctgccgggcttggagggctttctgtaccacatcttcccactgggcatccgatatctcccgagcccaggcaggaacccctggcgcaggcaggcttactccagccattgtccttttcaccagctctacatgttctgggtccatgggaatagagctgtggttgttcaacgctgtagctccctcctcatcttcatcttcactctctaatggtgggtctggcaaatgaagccccagggcctggattcgatcctggatgtcagcaactacatctccatcccccactggtgccagttccacctcctcttgttcaggatcttggttcaggggctggtaggagtagccagctgggcccgaccccgtttcctcctgctcttcctcaggctcctcactgctccaatccccagtgccttctgaagggccctgatgtcccagttcctcagtctgattggggaagatacgctcagggcccatggtgtctcctcctagaactactgttgccatccgggcaggggcgcctgacagatgcctttcaggccccatgggctcccctcaaatggccccagctgcagcgtcccccacccgcccccatccgaatcccggcgccggt

SEQ ID NO: 470182 - DNA, 683 bp, Homo Sapiens
aaatttgaccaaaaaaaatttattgtacaattacccaccactggatttgactcagagaggacccccagagggtgtctccatcttccctatttattttcagcccttgagggcttcattgtagatcaaagccaaggcccccaggaaggtgacatactcctggaagttcacctcctggtccttgttccggtccaagtcttccatcagccttgcaatttcagcatcctgcagcttcgagccaatggtgagctccttctggatcagctccttcagctccttcttgctcagggtgtgcttgtcaccctccctgccggagtacttgtggaagatggccacgaggaggccaatggcctgatccagggggcatgccatggctgagggctgggcttggagcggtagggaggcggccaaatgcgacgcgagcggtcgaggggatgggctgtgtcgcagtccgactggccttatagcggtcggtgccccggaggccagctcggccaagcccaccccgcccgcccaagtcccgcccgcgccccaccctgcgccgtggcttacacaacgcacattcgcggtttaccccctcgactttccacgcctcctgcccggggctgttccgggttaggacgggatgggggagcccagcagtgcccactgcacgcctggtgacgagtctcccctcatctgcgcag

SEQ ID NO: 470183 - DNA, 1000 bp, Homo Sapiens
ccttttaaatgctttaattagggataaattgtatatccgactccaagtacatctctcttttttgcattcactctgaaacatttaagtgtcactttaggtaactatcagggttaggtgtgaggaattcagggtggagcaaaaagattgagtgtggttgaggaaaactaagacttggtagtatcattggagagaagactgcatcttcgggacagaagagcaatagagtgtgacaagcccaatgataggtgcttgtaggaagggctgtgggagctgtggcaaccttgccaaaggggtcagaggacatacagtgaaagggacatctgaaccaagttcccagaagtcaaaatttaaccacatctagactcaaaattctttccaaagtagaatgttgaccaaagctgtttcccataattgctctgactagatgagtcacggaaacatgttgtctgccttctctgtcattacatcatttcactgtcttctcatggatggtgcattgtgacttcgtgcattccatggccattccatatggcaaccaaaggaagggcagggaatgaggacagagtgtctccctcagggatgtgacttttctatggcaggcccctttacagtcacattatgccccatccttcctataacatgggagagtctttctttttaggatttagtggctcaacaggtttggaaggacttgggaaggggaggcttccctgagttctgttgctgggagaagacaggcaattcagtaggtcaaatggcaaaggtaaaaccacagtggaaggcttctctgtggacagagactgaagggtgtggaggtatcgaagctgaacagcagcaggggtgcctgacagaatctcagctgccatcctcagggactcagaagcagccttttccgcttctgcagcaatcatccgcactttggcttgtctttgcgcttcagcctccacagccagtgagtgctgaagcccagctggcaacctcacatctttaatttctattc

SEQ ID NO: 470184 - DNA, 1000 bp, Homo Sapiens; identical to SEQ ID NO: 339713

SEQ ID NO: 470185 - DNA, 1000 bp, Homo Sapiens; identical to SEQ ID NO: 159197

SEQ ID NO: 470186 - DNA, 1000 bp, Homo Sapiens; identical to SEQ ID NO: 339715

SEQ ID NO: 470187 - DNA, 1000 bp, Homo Sapiens; identical to SEQ ID NO: 339716

SEQ ID NO: 470188 - DNA, 1000 bp, Homo Sapiens; identical to SEQ ID NO: 339717

SEQ ID NO: 470189 - DNA, 1000 bp, Homo Sapiens; identical to SEQ ID NO: 339718

SEQ ID NO: 470190 - DNA, 1000 bp, Homo Sapiens; identical to SEQ ID NO: 159198

SEQ ID NO: 470191 - DNA, 1000 bp, Homo Sapiens; identical to SEQ ID NO: 339720

SEQ ID NO: 470192 - DNA, 1000 bp, Homo Sapiens; identical to SEQ ID NO: 159199

SEQ ID NO: 470193 - DNA, 1000 bp, Homo Sapiens; identical to SEQ ID NO: 159200

SEQ ID NO: 470194 - DNA, 1000 bp, Homo Sapiens; identical to SEQ ID NO: 159201

SEQ ID NO: 470195 - DNA, 1000 bp, Homo Sapiens; identical to SEQ ID NO: 339725

SEQ ID NO: 470196 - DNA, 1000 bp, Homo Sapiens; identical to SEQ ID NO: 339726

SEQ ID NO: 470197 - DNA, 1000 bp, Homo Sapiens; identical to SEQ ID NO: 339727

SEQ ID NO: 470198 - DNA, 1000 bp, Homo Sapiens; identical to SEQ ID NO: 339728

SEQ ID NO: 470199 - DNA, 1000 bp, Homo Sapiens
gcgaatggtaaactttattaatggaaaatggaatgcctcgttaacagaaaccttgatttaaaaatggcagaacaagaacacattttttttttgcgaatggtaaactttattaatggaaaatggaatgcctcgttaacagaaaccttgatttaaaaatggcagaacaagaacacatttattaaaaaaaaaaaaaaaagtgagttcacattgtattgagctacaacatggtggcaggatttactttgcttttaaaaagatcccccaagttcgagggaaccctggctaccagattcaacagtgcgtctgcccacccgaaaactcacagcgagtgggacttagtagcggcgggtgaagtgggggtacggggggggatgagggtgtgggtgagggactctgctgccccggtcctggctggccactccgccaccttccagtccgccacctggcaccacgtggccctgggaatgtccaccttgtgcaaagccgcctcgccccgccactccaccgcggcttgccatgtgccccggccccgagggcccagacaggcccctctcgccaccttgccacctggcgtgctcccggctagccgcgcctgcgtccatggcaccctgccaggcgcgtgcctggtgctcctctagccgctggttgtgctctccccagtcacggccacccctggggggagggggcagcccccggccttcactcagcctcttgtcggagccgtagcccccccagccatcacgggagtcccggccgtggcgctctgggggtcctccgtggccatggcggtcatctccatagtgctgcccatcccggtggtctcccatcattggcctcgaaccctcccgcctgtcgatggcgtggtcctggtactggccccggtctcgatgatcgaagtcgtgaaagcggtggtctggccggggaaagtctgcacgatatcggtcctccattgccacacgctttccttctggccaataggcatcatctcgtcggtccaggt

SEQ ID NO: 470200 - DNA, 1000 bp, Homo Sapiens
tttttttttttttttttttttcatgtggacgttgtcatagttttaatgaaggttgacaaatgaaaggttacccccaatccacagactctctctcagatgagtaattttctatacattggtacatcaaagaattcagagcctgaattcatgttgaagcctttctgacattgatagcattcatcctagtgaataacactggattttgaaatatgatttttcatactcagtacacatgtagaaaatctatactgtgaaatctctgatgttgtacaaggcagattttcttcccaaaggcatgaacatgtccactgcattgtcagggtttgtttccattatgagttcgctgatgtacaatgagatttctctttgaggagaaggcttttctacattcactgcatacaaagggtttctctcctgtatgagttcgttgatgaacaattagacggctcttcatagtgaagcctttaccacattcattacatccataaggtttttctccagtatgaacttgcttatgtaaagcaagctctgtttccttggcaaagcctcttccacattcactacatatacaagatttctcttctgtatgaatttgctgatgtacaatgagatagcgtttcatggtgaagccttttccacattcactgcacataaagggtttctctccagtatgagttcgctggtgtacaacaagattgctcttaaaggcaaaaccttttccacattcattgcatatgtacggtttctctccagtatgagttcgctgatgtaacatcagtccgctattcacaatgaaacctttcccacattcactgcacctgtaaggtttctctccagtatgagttcgctgatgtacaatcagccgactcttcaaggggaagcctttcccacattcactgcatgtgtagggcttctctcctgtatgagttcgctgatgtatgatgagcatgcttttcacagtaaaaccttttccacattcactacatagatatgacttctc

SEQ ID NO: 470201 - DNA, 1000 bp, Homo Sapiens; identical to SEQ ID NO: 159202

SEQ ID NO: 470202 - DNA, 1000 bp, Homo Sapiens
tttttttttttttttttcatgcacactgaccatttcctcctttacacgggtgcaattccatacacaaggacctgcacagactcattacaaataagatggtcataccggcaacttgtgggatacagtttcaaaacatagagaggcaggagaacacaaaggcaattttacacacagaggcacgtaattctccctgagcagctatgccagagtcacacaggcacaaagcagttatacaccaacccgcctgccaccccgaacattttctgtctatctctgtttcttgtctctctctctgtctctctatgcctctctgcctctctctgtctctgttgtctctctctctctctctcatacacacacacacacacacacacacacactaggaaaacatcccatttgtgaacctgtcttacacaacactctaccacatggtagaatcatcaacaaaactcgcatttaatgatggtgttgacctgaggaatcttcaggcagaagcttgtggtcagaggggaccaccagcaaagaactgacccaggtcttggaccaagagtctcccagagagagtcaacctcccagtagaagggaggccaacccctccactgcttcatgaaagaagactaaaaattctcctgggggaaagaaacacggtacaaaatacattcagagccccctgggtgggcctggggcagcccaaatcctacagatgagggaattggggaagtgtgccacaggtctaatccctgtgcccttgctttgcatggccaggttccaaggggcggaatgtattaatcatattcctcttacaaaaatatatctctttacacgcaccttctccatggtctctttgctacttgggaatgagcatttacctgcactccaaggcttcagagggactgcctagggaggctactccaatagaatagcaaagaggctatgacctatggctttttcatctacataatgatggatggtgcaggtttggactgggtgggaagctact

SEQ ID NO: 470203 - DNA, 1000 bp, Homo Sapiens; identical to SEQ ID NO: 339730

SEQ ID NO: 470204 - DNA, 1000 bp, Homo Sapiens; identical to SEQ ID NO: 159203

SEQ ID NO: 470205 - DNA, 1000 bp, Homo Sapiens; identical to SEQ ID NO: 339732

SEQ ID NO: 470206 - DNA, 1000 bp, Homo Sapiens; identical to SEQ ID NO: 339733

SEQ ID NO: 470207 - DNA, 1000 bp, Homo Sapiens; identical to SEQ ID NO: 339735

SEQ ID NO: 470208 - DNA, 1000 bp, Homo Sapiens; identical to SEQ ID NO: 159204

SEQ ID NO: 470209 - DNA, 1000 bp, Homo Sapiens; identical to SEQ ID NO: 339737

SEQ ID NO: 470210 - DNA, 1000 bp, Homo Sapiens; identical to SEQ ID NO: 159205

SEQ ID NO: 470211 - DNA, 1000 bp, Homo Sapiens; identical to SEQ ID NO: 339739

SEQ ID NO: 470212 - DNA, 1000 bp, Homo Sapiens; identical to SEQ ID NO: 159207

SEQ ID NO: 470213 - DNA, 1000 bp, Homo Sapiens; identical to SEQ ID NO: 339742

SEQ ID NO: 470214 - DNA, 1000 bp, Homo Sapiens; identical to SEQ ID NO: 339743

SEQ ID NO: 470215 - DNA, 1000 bp, Homo Sapiens; identical to SEQ ID NO: 339744

SEQ ID NO: 470216 - DNA, 1000 bp, Homo Sapiens; identical to SEQ ID NO: 339745

SEQ ID NO: 470217 - DNA, 1000 bp, Homo Sapiens; identical to SEQ ID NO: 339746

SEQ ID NO: 470218 - DNA, 1000 bp, Homo Sapiens
ttttttttttttttttttttttttttttttgtaaatcatcatggtttatttaacaaggttatactacattagagttttatatatatacatgtatatgtgatatgaagagactgatgtacaatcaataagtcttaaatctctcttccatggatttcccccatctccccacttagcagtaaaaggcatttttaggtttatataaacacattctttacaactgccttcttaacagaaaattactgtagtatataaatagcactgagcatttagtaaataagttacaggccaataagttcaattgtgcagttgtgaaatctaatgtcaaagagtttttgaaaccttaagactgggtgatctgcaatgtttccaacatgtcttcgacagccttaagagaatatttggtttccttcttacttcgacctgcaaactgataagctctgtttatttgactagctgcccaactagcatatttcatgttgtcctttttcgtttttgcacttgcttttggattagaagcaatatgacttgccgacatataaagtccaaacaaagctctcatatttctgttgttcagtttcaatgcctgtgcaaaatactttcttgaaagttcgaggttttcaagtccaccttgggtatacttaacttcagcatactgctgacagtataagtggttgtgtggattagtcatcattagttcctctaaacaaaaggctgcttttgcatagtcatgttcattgatgtaaagttctgcaagttcatgccaggcttcttggtctccaacaaattgttccagatactcattcagctcccgaatggcctccacatttttcccctgggcttttcgaatggcaatcttacgctttcttgcagcagtgttagttggatcttcttgtaaaatcctatcatatagctgtatagcatcatcatatctttccatggcttcaaatctcatgcctgttaatcgcttgactctgtgactgccagggaactgtcttctcag

SEQ ID NO: 470219 - DNA, 1000 bp, Homo Sapiens; identical to SEQ ID NO: 246493

SEQ ID NO: 470220 - DNA, 1000 bp, Homo Sapiens; identical to SEQ ID NO: 159208

SEQ ID NO: 470221 - DNA, 1000 bp, Homo Sapiens
ttttttttttttttttgtaagttgcagccccaagaaaataatttaagtattcagctaatctgtgtccatgcaaaaaaagtttctttaatttcattcagtacagtgtagccacagaattttgtttttcagagtccaacacatcttagcattagtaattgacgtgcccatggagctacaaagtctgccactcttcctgctggactgactgctctgattcccgcccagaggagggctgatgattgttcctgaccacttctttggtctcctgcttttcacctgatgcttcctaggattacactcctcacctgtaacaccgcttcatggctgtatagctccatttctgtggcatatcagggctttggggttagataaatgaagaaaaaggaatgataaaaatataaaggtgccattgaaaagggcttctgttgcatgaaactgactgattctttgagattaatccatggcttcagattggaccagaactcgagtgtcattgaattccaaatctgatagttcttcacagctctgctctttcacctgagggccttctttagggcacaatgtgtgcaacttcctctgagaacacaggattgctttgtatccctagaaacaggctcagaagacacaacattaagcatgcagtgttaccagggtttgcaacctgtgatttttttttttttttttgtaacgctggttgctgtgacaacaatttttttacagctgctatgaacgagagtaagaaggtccagttgaactttccagagatgattgggaagctcttcttgtcagaggggccaaggttggatctactagggaggaaggtgggaaaagtttgaaccatccgatcaccatattggatagctctagttcatctaaaagtatctgggccactcccataaaagatttgtgatccatgcggccataatctccccagacgatgatctgtaaaacttttccttgtggactctcttcgaaagataatagctgctggtaaaggggt

SEQ ID NO: 470222 - DNA, 1000 bp, Homo Sapiens; identical to SEQ ID NO: 159209

SEQ ID NO: 470223 - DNA, 1000 bp, Homo Sapiens; identical to SEQ ID NO: 339749

SEQ ID NO: 470224 - DNA, 1000 bp, Homo Sapiens; identical to SEQ ID NO: 159210

SEQ ID NO: 470225 - DNA, 1000 bp, Homo Sapiens; identical to SEQ ID NO: 339751

SEQ ID NO: 470226 - DNA, 1000 bp, Homo Sapiens; identical to SEQ ID NO: 159211

SEQ ID NO: 470227 - DNA, 1000 bp, Homo Sapiens; identical to SEQ ID NO: 339753

SEQ ID NO: 470228 - DNA, 1000 bp, Homo Sapiens; identical to SEQ ID NO: 339754

SEQ ID NO: 470229 - DNA, 1000 bp, Homo Sapiens
tgttttttttttttttttttgcaaagtaactgtgttttttatttctatgaacaataaaatactttcataatttcacatcccattgcttttaagagcacatatattacaaataaaggaactccacaaactttaaagattagtatttatcaacgcttttgtacacatacacaaatattttaatataatggtatctgaaatgttattcatatatttttagtactgtcatagtattaactaaaaaggatcttttaaatttggtaaaaaccgtatattttacaatcttttatttacatctgaaatatgcttaaatgttacaaaaacattcactttaacctttaaaatatgtgtactaggactggggtactgaccatacaataactgacagcaaacttagggtttgcatttgagctacacattcactggaatttcatggcaaatattcaacttggcttgatcaacactgctcaaagaaaaaaaaattatacaaaatgtgcaaattcagaggttggcaaaattctgaagctagcgaggtaaacaaaaatattaacaccatgaaaacttcaaataaattaaacctatctttctcttccccgagattggctgcaaattcagaaagttctcttagaggtgggtctgatgctgcagagccctcagacttcagcactagatgagatggagaccgtgggtagggccggagttgctttgctaattactcgagtgcaggtttggtccactccgcgctttgacaggtcgtccctgcccgtaatctgctcattcatgactgtggagagttcgctgagcatgtccttgtagtgggacctcagttcttcctggtactccagctggtcctctttgatgaggcgctcattcacgtcaagggcctgcccacatgcatctgcaaattgcctgaagatctccttcaaaagctttactcggttgtcagggtacttctttgcattggtttcttcaagaaaagctcgtgcataggccattggcccag

SEQ ID NO: 470230 - DNA, 1000 bp, Homo Sapiens; identical to SEQ ID NO: 339755

SEQ ID NO: 470231 - DNA, 1000 bp, Homo Sapiens
gacggatgcatgtctgtttattggcacagggtcctataagggccaagaccacaccctcccaccctcttttctgtaaaaataaactctgttcttccttttccctgctctatctgctttcctgctttgtccagggagaatcaatcatttgctaaggcttgtgccctaagacacaggaaccagtacccgctacacatatgcacttcccctctcagcccagggaaacagtgggcagcaggaggctttcagaggcccttgggcttccactaggagctgtcagtgaaggtcagcagcagcactgggagcagtggcacaaggagcacagggtgaggtgggggtagcccgtgagggtgagccagacagagctgagtccacccctaagtgcgcactgagtgagcctggggagaagtccaggaggtacaccacccaggcctgtgggtcacagtggggcaggcacggcaggccccatggccgccaggctgagtgagcctggggacagaagaggcagactccttcctatgggaactggcctccccacccagacctcttccaggcagggtgacacggaaagatgtcacagtgaatggtgggggctctgctggaggcaggggcacccccaaagcagaggcacaatgtggtgattgaggagggtctgtactcatgtcacctgtgggggggagggactagacccagcccagcttgcatttgcttcctcccaacccaagagcaaacagctttgtcaggagagctgccccaggtctggtgacagctgggcatttctcccctgatccaggtctaccacacctcacacagctgccctgggttcatgggggagccgacagggcagccgaagtgccgcaggaagtcacgggagttggagagagtgcccagcacgcggaagcgggcagggctgtgggggtcggtcaccagcccctcgtgagagctctctggtgtgcggaccgagcaccacacctgggcaaatcccacgaagaagagctggtgg

SEQ ID NO: 470232 - DNA, 1000 bp, Homo Sapiens
tttttttttttttttgccgccataaataggaccactttattaacgtagatgagcactgacgctgactgcaggggcgggggccgaggtccatccccaaacgtcccgtgggcaagcgcctctgcccggggtagaaagtgcggcgggaagagagctccatgggaggggctccataagagggagcacgcctgggcctccttggctgcctgagcccctctcaccccatggcctctgagggaggaaggccccccaccacgttgggctcgcctgcaagtttccttcagaaggccctgccacccagagagggcgtgggctacgggcccggagcaagacacctccaccgctggctgtgggccctgggcccctcggctgggggctgctggggggctggggagtgggagccacaaacacaggatccacgcaggaacacggacaggttcccacggcaggggtggctctgtctgggggaggccactgggtgccggaggctctgccccaggagcacaaaggtccatgggccgtgggaagtcccctctcgacagccgaggctcagtgccacgtctcttaggccagcgtgccccgcaggaggggggtctgtggaggccccagaagctgcagcagccccaggaggggcgcttggtcttcatctggaaggggctgcagctgccgggcctaggagtgggggggcctgcaggagcggcagcacgccttgctgtagtaccagtgcccgcagaggttcactttgatggccagggcacagttggtgcctggctggtcctggcagctgtcatctgggggctccgtggggcagggctgcagatcacaggcctgtctgccaacgggcttcaccaacggatcgcaaccacggacgatgtcggtcccctggtagcacttgacgtctcgcatcctcacgcccaccccgcaggtcttggtgcactctgaccaggggctggtgtaccacttgaagcagggcctctcgaaacacgtgctctcctcgggaggc

SEQ ID NO: 470233 - DNA, 1000 bp, Homo Sapiens; identical to SEQ ID NO: 339756

SEQ ID NO: 470234 - DNA, 1000 bp, Homo Sapiens
ttttttttttttgcagtaaaaactgaccaccactgcccagtggaggggacaggttgagaggtaaggctgggggctctggtcctctggggctttcagagaggtaaagtgctgcaaaagcttcagctggacaggacacaggggaggtgaggggcaattcccagcttccatttagatgggctgggctacaggcaggaggaaggcagggcaggactttcaaaacaggaatcagatctaagtgatttggagcagcagacaagctgtcctccccctgggctctcacaccaagggcctgaaccatgttaaagcttcaaggctccctttgtagcaacattcaatgtccggctggagaaaatgtttggattcagttcctctaaaagcttatccactgtgacacattccaattccatgctcaccctacaaggactagcctggcttttgcggtccagagcactcaatctctacaatctcagcaagggcctggagaaggaattcctctcataaaggtagggggagggttaggcaactcgcagcatcgtgatatccagaaacaaagtacctgagaaggtaccgatggcttcccttcctggtcgggaccatggagacggggagagtgagggggtaggggggcatcacggacaaagcgtgggagcctgacgatgcagcaggtaggggcaggtcctccagcagcctggcagtcctggagagagaccctctcctgaagccatgggctctggaaggccttacctccaccaccctctagtcacaagtaggagaggagctgattcacctctgggaatccgatttcttccccactttaccctccaaagcagaatctcaatactttcctgaaacctcacactctcccgggccctggctggcattctcctcggcagtgcacattcactgggcatcccctacccgggcagcagccagacacggcccctccagccacgccgccgcctccatctcctcgccctcggcacctacacggcgatctcat

SEQ ID NO: 470235 - DNA, 1000 bp, Homo Sapiens; identical to SEQ ID NO: 339757

SEQ ID NO: 470236 - DNA, 1000 bp, Homo Sapiens
tttttttttttttttgttttgaaaatttctttttttggggggcagcagttttcctttttttaaacttaaataaattgttacaaaatagactttagaaaataagttacaaattgtagcaaaaggctcccttccacaggcaactttcccaccggtggggctctgcatccgcctctccctggtgttgcaatctggctgctgagggtggcgctgagaagagcacggtgatgaggctgggggaaggaggtccttcaaggacagggacgcgaggaacaccccaccccctccttgggaaagaagccagatctgggtcctcttcacaaggggagaggagaagatatggggatgcccgaactactcctgagaaaatgtggagatcaagcccctccctgcacgcgctccctcccccagattctgatctttggagacttgaagttcagagggagaagctgaggtctgcaggccactggggtgaaggatccaggagtggggtcgtgggggtgggtggagggggcaatggcaagtcccctctgcccgtcactggtgccactggggctccggagccggccaccgtccactcctcctggtgctgctgctggtgctgcacgaagctgattcggcggcggaagtggcggggacaatgggggcaggtgaaaggcccctcccggggtgcatggacccgcccgtggccctccagccgggcagctgtccgaaaggccttgccacagatgctgcagcagtggcgcttggggtccgtgtgggtcctgctgtggttcttaagagacagcaggttagggagaagtttgggacagagggagcacgggtacaaccctgtggtgtgggccttctggtggttcagcaggctgccagcatggcggtaggagcgcccgcactgggtgcagcggaagggccgctccttgtcctcagccgccatggacgtcaccgcttgtcctcccctggctctctccacactctctcctgggcctctgggggtttctgatgg

SEQ ID NO: 470237 - DNA, 1000 bp, Homo Sapiens; identical to SEQ ID NO: 159213

SEQ ID NO: 470238 - DNA, 1000 bp, Homo Sapiens; identical to SEQ ID NO: 339759

SEQ ID NO: 470239 - DNA, 1000 bp, Homo Sapiens; identical to SEQ ID NO: 339760

SEQ ID NO: 470240 - DNA, 1000 bp, Homo Sapiens; identical to SEQ ID NO: 159214

SEQ ID NO: 470241 - DNA, 1000 bp, Homo Sapiens; identical to SEQ ID NO: 159215

SEQ ID NO: 470242 - DNA, 1000 bp, Homo Sapiens
ttataactgagagaccttgcggggcaggggcctgggccgcgggccggggtcagtcctccgggccccattctccaggtggctggatcgcgctgccagaggcttggggggcagcgcgggcggctccgacgtgacggggatggagaggctgtgaggtagcgggacggggcgccgcagagtccgctcgtagacgctgtacgggggcggagtcttgctctccttgcgcactggctcctccccgccgtagctcggcacgggcaccggcactggcaccggcaggggggccgactgttcattcacctgattttcaaagcctgaggtttccgacgtgctgcaccggctgagagaagaaatcccactgctgtagctgcccgacaagacaggggagttggagatgagtcctggcgagtggtactccactggagagggggtgaaagactgcacagagcccttcaatggagatcgcccggcaggcgagggggatactgatgtcgtgtgtcttgctggtgaagcagtctgtgtgggtcttggagggacagggggagagataagtttcccactatccgacatgttcttggcttccttcccactgtccaggctccagctgctaggggtggggttcacagctttttcaggtgcagagagatttgggtcactgcgtggcaaggccccgtctccaatatgattaaacagcatcctctgcgaaggctccacaggtgttggatagatggcactgcatggtctctctcttggtgacaggcaagagttttctcgggaatgtttgtgtttgtcagacaacaaaggagaagctctggcactcgatggagcagaacttgtcacattaggtgaagccgagtgagtagaactcaagcttgaggtagatggacttggctgcatgttaaagacttcatcagagctttctgattgccctgtaatattgcttacttcagcagaagcttgtgaggacagtgaggaggaagaatatcggttgacagctgggtaa

SEQ ID NO: 470243 - DNA, 1000 bp, Homo Sapiens; identical to SEQ ID NO: 339762

SEQ ID NO: 470244 - DNA, 1000 bp, Homo Sapiens; identical to SEQ ID NO: 159216

SEQ ID NO: 470245 - DNA, 1000 bp, Homo Sapiens; identical to SEQ ID NO: 339764

SEQ ID NO: 470246 - DNA, 1000 bp, Homo Sapiens; identical to SEQ ID NO: 339765

SEQ ID NO: 470247 - DNA, 1000 bp, Homo Sapiens; identical to SEQ ID NO: 339766

SEQ ID NO: 470248 - DNA, 1000 bp, Homo Sapiens
agtatttaaagagatttattaaatcatcttatcacaaagatggaaacatatacaaactagaaacatgcaaccatcatcttccacagtcaagtcacaatgtcaaatatttttcttgcctctgcagatgaaaagttcagatcttatacccaactacttactcaccccgaatatttaagtcagtcttcctgaaagtactcagggtagcaagtaacaaaatgcaaacgattatataaagaaagtgcagttaaaaaggaaactatgtggcaagtaccctctttcccttcccaccccccaattaaaggcaaacaatggcactttgctcttgcttaacctagattgtcttcaaaaactattaaaatgtaaaagacttaacaaaaaaacaaaaagacgtttaacagatgtcaaaaagctccttagtgtttgaaaataaatgcttaaacaaaagacaacatattttatatcaaacaagtttgaagagccctgaattgcagcattctgtaacataaacaaacaaaaagctggtataggatttattgtcaaaggcagaatttcttcaggcaggtaagtaaggaggtggtggttctttttcaggcattttcacggccatttcataggttggcaaaacgtactgaggaggtgcttcaaaggcagggtacacagcaatctccggcacgtttcggttgttgatgtatttatagcagttccaaacacagttaattagataagccttaaaaatgatgaataaggcaaagaacacaagaacaatgaacaggaggcagctggagtccaaggccaggaggtcatctttgtagggaaaatcaggtagttgatccagatattctttgattcttggcaaataggtgagagaactaatagcaaccaggcaactgaggacgaagtcaaaaagtcggtaacagaagaatggaatcagccaacccacttgataagaaattgctccataaaccagcattgaactgattataaacataagaacagagac

SEQ ID NO: 470249 - DNA, 1000 bp, Homo Sapiens; identical to SEQ ID NO: 339767

SEQ ID NO: 470250 - DNA, 1000 bp, Homo Sapiens; identical to SEQ ID NO: 339768

SEQ ID NO: 470251 - DNA, 1000 bp, Homo Sapiens; identical to SEQ ID NO: 159217

SEQ ID NO: 470252 - DNA, 1000 bp, Homo Sapiens
aatgtttcacagctttttttttttattagcaataccaagataagttattgaagcatttttagtattattttacattccattcataaatgacctaacttgtaactcagcatacagcacacttaaagatatagtttgacacttattcagaaagctacaattattataacttacatgccttcattaccaggaacaccttaatatatcttctaattacttcaacaatactctgttccaaagcacacgatcaccccgtacaagtttacatattttgcttcaatcaccatttttaagttgtagatgtcaaggtgctattcactgaaattttactgtcatctgctcctggttaataggacgacctgacacaatattaaactagcaatatttctgcttaaatactatggagaaagagaattactgcacttttctgtattcttctaaagtgttacaaaatacaggacaatcagacacaagcagtaatacccacgagaccactgcaggacccacctctacatgctcaggtgagctggtggaacagccccccacccccagccaggttgtccacaggtgaagggatctgtcatccagcagcagttgtcactcaggatttatgactttgagggagttttctctcctgctcaagttactaagcctttgcaatccatgactaatactggaacatatggggtaatatttttagcctctgattctctgctatatatactgtagattggtgcaccgtgtgtatacacatacctatgccaatagtaattattcaacacacatatgtgtatacattcttctcttgactttacacgattaacaagctgcagataaccaccgaggaccacgaacagacaagggcaagtccagatagaccgactaggacagggagtgtcacttaccacacaagtctggcctcttgatacatccagaatttgctgtgctacttgcaagtccgttaaaggctgctaagccatcagaactgtaggccctgaggacc

SEQ ID NO: 470253 - DNA, 1000 bp, Homo Sapiens; identical to SEQ ID NO: 159218

SEQ ID NO: 470254 - DNA, 1000 bp, Homo Sapiens; identical to SEQ ID NO: 339772

SEQ ID NO: 470255 - DNA, 1000 bp, Homo Sapiens; identical to SEQ ID NO: 339773

SEQ ID NO: 470256 - DNA, 1000 bp, Homo Sapiens; identical to SEQ ID NO: 339774

SEQ ID NO: 470257 - DNA, 1000 bp, Homo Sapiens; identical to SEQ ID NO: 159219

SEQ ID NO: 470258 - DNA, 1000 bp, Homo Sapiens; identical to SEQ ID NO: 339776

SEQ ID NO: 470259 - DNA, 1000 bp, Homo Sapiens; identical to SEQ ID NO: 339778

SEQ ID NO: 470260 - DNA, 1000 bp, Homo Sapiens
atgagcaaaaaattaatttattacagatatattctctagtaattcataatagcttcttgaattttaaatgtctttttgctatttccaatgcttaaaaatcataattttaaaacataagtactgttttatatacattgtgatttcttttcttttctctctcttttttgttttgtgttttacttctaaatatgaatgatatggtttccaagtagctacttggaaagaaaggggataggattcattgttttgctctaacatggtagaatttaaaatttcacatcatatacctggagttttaactatatgaaaaatagccaaatgtcatcactttcttggatatttcttttacgtgtatatatatgtataatataaacagaatacatctgattagtacatttcaacatttcatcagtgtgacttttatctcctattttatataaaataacaaaatatacagagagaagaaaggagacatctgttcatcatacacacaaagtaaataaaagttcatgtatggctttgcaaaggtagattatgacgtgacttccatatttatttgtttaaaagcctcttgagagaacgtgtcagtgtgcttacgagagcggccatggtggttgagtgtcgcgccgagagtccaacattagggtccccagggttctttccagtggctgcttcggcagctttcagtagacaaatgtaatttatgaccacttcatcgatcttccctacaatttcctgccgctgtgtttctgagttcacgactttaactaatcgcatgcaagcttctgttaggcaacagagcacttgaaagctggaagtcatagctaggagcatctcctccgggcttttctcagccatcgccattttcctacaggcacttcccaactgtctggactcaatggataacagttgcttgtactgagaaagtgtaaggtcgtacgcttcagggcgtgactcctccctcttctccttggttgccctgacgagacagagcagctca

SEQ ID NO: 470261 - DNA, 1000 bp, Homo Sapiens; identical to SEQ ID NO: 339779

SEQ ID NO: 470262 - DNA, 1000 bp, Homo Sapiens; identical to SEQ ID NO: 339780

SEQ ID NO: 470263 - DNA, 1000 bp, Homo Sapiens; identical to SEQ ID NO: 246494

SEQ ID NO: 470264 - DNA, 1000 bp, Homo Sapiens; identical to SEQ ID NO: 159220

SEQ ID NO: 470265 - DNA, 1000 bp, Homo Sapiens; identical to SEQ ID NO: 339784

SEQ ID NO: 470266 - DNA, 1000 bp, Homo Sapiens; identical to SEQ ID NO: 159222

SEQ ID NO: 470267 - DNA, 1000 bp, Homo Sapiens; identical to SEQ ID NO: 339787

SEQ ID NO: 470268 - DNA, 1000 bp, Homo Sapiens; identical to SEQ ID NO: 339788

SEQ ID NO: 470269 - DNA, 1000 bp, Homo Sapiens; identical to SEQ ID NO: 339789

SEQ ID NO: 470270 - DNA, 1000 bp, Homo Sapiens; identical to SEQ ID NO: 159224

SEQ ID NO: 470271 - DNA, 1000 bp, Homo Sapiens; identical to SEQ ID NO: 339792

SEQ ID NO: 470272 - DNA, 1000 bp, Homo Sapiens; identical to SEQ ID NO: 339793

SEQ ID NO: 470273 - DNA, 1000 bp, Homo Sapiens; identical to SEQ ID NO: 339794

SEQ ID NO: 470274 - DNA, 1000 bp, Homo Sapiens; identical to SEQ ID NO: 159225

SEQ ID NO: 470275 - DNA, 1000 bp, Homo Sapiens; identical to SEQ ID NO: 339796

SEQ ID NO: 470276 - DNA, 1000 bp, Homo Sapiens; identical to SEQ ID NO: 339797

SEQ ID NO: 470277 - DNA, 1000 bp, Homo Sapiens; identical to SEQ ID NO: 159226

SEQ ID NO: 470278 - DNA, 1000 bp, Homo Sapiens; identical to SEQ ID NO: 335802

SEQ ID NO: 470279 - DNA, 1000 bp, Homo Sapiens; identical to SEQ ID NO: 339800

SEQ ID NO: 470280 - DNA, 1000 bp, Homo Sapiens; identical to SEQ ID NO: 159227

SEQ ID NO: 470281 - DNA, 1000 bp, Homo Sapiens
ttttttttttttttttcctcaggccatggtggtttattgatgcacgtcgcaagcacagcacaggcaggcggaccccagccccggggggacatgagggccaggggagggcagtgggccacccccacagcaatgctgtcagcacagggtgaaggaaagtgcctgggccatgttctctccttctccacacctctccccaagcctccaggcctcctgactcatcccagagagacagctggccacacaactgcccctggctacagataggtgaccgttgtccacctgtccctcaccgaggtatggccttgccggcccgctgctgcttccgtccttcatcacgaaaatccagctgctcatccatcatctctgtcacctctgagaaagtcactgtgaggctgcactctcctctgcctgatgtcacctccatcatcccccaaacagccgcctgctgctgtcagcccctcccacaggctctctgtttgctttgttgattgtagggagtccaccctcgtgacctgtgtgacagtaggaatgaggcaaaaacacaaggaggcccgggaaggacttcaccaagaactccccggggaggggctccccgccagcagggtggcaggagagcagacagagccagtggggaggggagaggcggagcagcagagggtccacagtccaggtcacgcatgggcacagtacagtcatggcaccatggcagagcgagtgagcaaagtgcacagctgggcggggtgccggggcccgcgggacagcttacaggtctcacgttccatgccaggccccagcagagcatgaggcggcccactcccagctgaggaaggggcacctctgggtctcaggggtctcctccccctcctcaaccccagtggctgctgtctcagacccctgcactctaagcaaggagaaggtatgctggggtatggaaggaaggaacatccgacagcctgacgcccccagtgccaagagaagaaagagagttcctttctagaga

SEQ ID NO: 470282 - DNA, 1000 bp, Homo Sapiens; identical to SEQ ID NO: 159228

SEQ ID NO: 470283 - DNA, 1000 bp, Homo Sapiens; identical to SEQ ID NO: 339803

SEQ ID NO: 470284 - DNA, 1000 bp, Homo Sapiens; identical to SEQ ID NO: 159229

SEQ ID NO: 470285 - DNA, 1000 bp, Homo Sapiens
ctccaagccctttaatattcacttaaacagttgaggcacaagcaataataaaactgcattttttacgttacaaaaagattttgtatgttatctgcatgatataccaattttctcaatctcttctgcaataacatctcattaacactctggtccacatgttgatttaataaagtcagaatggcaggtgggaggatggtaaaataaacttaccaaggggcaaaaggaaccaaacatttactgagtgccgactatgcaagctctactaggttttacacactttacataaacgtgaacctaagttctagttatcagttaacaggccagcattgctacagccagtaagtctatgttttcaatgttctttcgcttttaagtacaaattgtggaacaaaactatatctttgcccaaagaagcacatcaactgttgcactaatacattattttccatttccaaagttttttagtaagtgtgcaacattagcacatggaaacgctcaagctgtgtattagttcactgaaatctggggtttttttgttctcacctgctgagcaccatttggccagcatcactacaacaagctgattacatcaccttgtaaaacttaagatggggatgaaaagtgtttggcaattacatttctgggagaaaaaactgctgattttttctttaactcgacacagctagctttaaaaagtggtacctcattttaaagcaccaaagttgtcatttaaataagaaaacgtacttgggttaatgaactgtaaaatgaagataccaacgccttttcaagcattacagcaaagccagtatgttcagagccaagtgacacccagctcatactgcactccagttcccaaggaaacggcgtttctaccctccccaaacttaagctgcccctcactcctccagccagccctcctttttctgagcccattctttccttgctgagctatctgccccttgctccctttcccacccctgttctccctctaactgcc

SEQ ID NO: 470286 - DNA, 1000 bp, Homo Sapiens; identical to SEQ ID NO: 339805

SEQ ID NO: 470287 - DNA, 1000 bp, Homo Sapiens; identical to SEQ ID NO: 159231

SEQ ID NO: 470288 - DNA, 1000 bp, Homo Sapiens; identical to SEQ ID NO: 159232

SEQ ID NO: 470289 - DNA, 1000 bp, Homo Sapiens; identical to SEQ ID NO: 161134

SEQ ID NO: 470290 - DNA, 1000 bp, Homo Sapiens; identical to SEQ ID NO: 339808

SEQ ID NO: 470291 - DNA, 1000 bp, Homo Sapiens; identical to SEQ ID NO: 159234

SEQ ID NO: 470292 - DNA, 1000 bp, Homo Sapiens; identical to SEQ ID NO: 339811

SEQ ID NO: 470293 - DNA, 1000 bp, Homo Sapiens; identical to SEQ ID NO: 339812

SEQ ID NO: 470294 - DNA, 1000 bp, Homo Sapiens
tttttttttttttttttttttataatcaaactcttgggttttatttctgtaaaagctccagctctaccttcccctgaccccaagtctagggctaccggaaggtagagaagctctgggtggcagtgcaggaggcatagggcacaccccgggagcgaatctgtagggtatggaaggtgaggggtgggttggggcctgaggagcctgggttcagggactcagtgtgaggctccatgacagtcacagggactgcataggacagcacctggggccggtcgtcatggcgtctcagcgtgcccttgcccaggaggtgtaggatgcaggagaggacgtcagtgctgctgcatgcagaccccttaccaaggctgctgaccaaacccctgggaggacacgggcccttctgccaagcctccagcaccagacagacaagctggtcaatgtgcagcccctcatctccatgggccttgaggattcggacgatgaggcagttcagaagattccgtctcttctccaagttctggccgtcttcaccctcagcttgcaggtacgtctgaggtgggatgagccgcacaatgtcccatctcgacctgggttccttgctgccatctcgaatcttgaggacccctcctggtatatccttttgctcgtgaaggtccagggggcctcttgaagaggtgaggggcccaatcgcctgattgagcatgtctgcggagagccctgagaacgccagcagactctccacagagaccgccttcaggtcgttgagatacagcagtagccacatctgcacggtggacacatgcagggtctggttcccaaactgcagctcagcccagcccagccacgtccactgcagtcgcctctgtgagcctcgctcaagggcagggtggctctgactcttgttgtagaagttggagtatctgttcaaagtgcccctcaggtaggagggcaggcaggttctggggttcagtgtgtggcagattgaggcaacaggccaggagtg

SEQ ID NO: 470295 - DNA, 1000 bp, Homo Sapiens; identical to SEQ ID NO: 339813

SEQ ID NO: 470296 - DNA, 1000 bp, Homo Sapiens; identical to SEQ ID NO: 339815

SEQ ID NO: 470297 - DNA, 1000 bp, Homo Sapiens; identical to SEQ ID NO: 339816

SEQ ID NO: 470298 - DNA, 1000 bp, Homo Sapiens; identical to SEQ ID NO: 339817

SEQ ID NO: 470299 - DNA, 1000 bp, Homo Sapiens; identical to SEQ ID NO: 339818

SEQ ID NO: 470300 - DNA, 1000 bp, Homo Sapiens
tttttttttttttttttttgacttttcaaatgaaacattttattgtaaatagctcttcataggtattcctcgtgcttcactccccacccacccttgttttttttgtttgtttgttttgatcttttaaaatgatgtttattatcaggactagtgtttccatggggtgtggtgttacattaaaatgacccccctgcacagcaggggttgaatatttcattgtaactttggttccatgcccaagacacatctttgcttgatctgcagaaactagttccattgctgaactttttctttacacaatatatgtttatagttcttctcttctgatttgacatatacatgtttcattaaatgcagcatatattgtagattttcaacagggttgtgtaggaactgtcaagtaagaaaccttgaataatggctttaaaatacacagttgtagtcctggctacagggtagttcttagcttttgatctccctctcactggtgtaaacaattttgccatctttgaaggtttagaagcacttgtcttcctgggatcttatccatgttttcggttactcttttcttctaagtcttttatttgtcttttctggatgtctgttttatcttctaagtcacgaattctctgatgggcttgctgtaagagctccattctctcctgaagaatctgacagtcatactctctgctcttcctcagcatttgccgccgtaacttttctactgccgtcctcagctcctcttgctgtttttcacttaataattcaccaaacttgataacagtttcttgctgtagagcattgtacaaagtagcttctagttcctggattctcatatatgcttggtcaagagcttgttttctgtagtctagttcttcctccagatagccttttattttgcagaactgttccatgtcactttccaattccatcattttctggtgtagggcagcctcagctccttcaatctgctggatccacttctctgccagggacagca

SEQ ID NO: 470301 - DNA, 1000 bp, Homo Sapiens; identical to SEQ ID NO: 339819

SEQ ID NO: 470302 - DNA, 1000 bp, Homo Sapiens; identical to SEQ ID NO: 339820

SEQ ID NO: 470303 - DNA, 1000 bp, Homo Sapiens; identical to SEQ ID NO: 339821

SEQ ID NO: 470304 - DNA, 1000 bp, Homo Sapiens; identical to SEQ ID NO: 339822

SEQ ID NO: 470305 - DNA, 1000 bp, Homo Sapiens; identical to SEQ ID NO: 339823

SEQ ID NO: 470306 - DNA, 1000 bp, Homo Sapiens; identical to SEQ ID NO: 339824

SEQ ID NO: 470307 - DNA, 1000 bp, Homo Sapiens; identical to SEQ ID NO: 159236

SEQ ID NO: 470308 - DNA, 1000 bp, Homo Sapiens; identical to SEQ ID NO: 339826

SEQ ID NO: 470309 - DNA, 1000 bp, Homo Sapiens; identical to SEQ ID NO: 246495

SEQ ID NO: 470310 - DNA, 1000 bp, Homo Sapiens; identical to SEQ ID NO: 339828

SEQ ID NO: 470311 - DNA, 1000 bp, Homo Sapiens; identical to SEQ ID NO: 339829

SEQ ID NO: 470312 - DNA, 1000 bp, Homo Sapiens; identical to SEQ ID NO: 339830

SEQ ID NO: 470313 - DNA, 1000 bp, Homo Sapiens; identical to SEQ ID NO: 159237

SEQ ID NO: 470314 - DNA, 1000 bp, Homo Sapiens; identical to SEQ ID NO: 159238

SEQ ID NO: 470315 - DNA, 1000 bp, Homo Sapiens; identical to SEQ ID NO: 339833

SEQ ID NO: 470316 - DNA, 1000 bp, Homo Sapiens; identical to SEQ ID NO: 339834

SEQ ID NO: 470317 - DNA, 1000 bp, Homo Sapiens; identical to SEQ ID NO: 159239

SEQ ID NO: 470318 - DNA, 1000 bp, Homo Sapiens; identical to SEQ ID NO: 339836

SEQ ID NO: 470319 - DNA, 1000 bp, Homo Sapiens; identical to SEQ ID NO: 339837

SEQ ID NO: 470320 - DNA, 1000 bp, Homo Sapiens; identical to SEQ ID NO: 159240

SEQ ID NO: 470321 - DNA, 1000 bp, Homo Sapiens; identical to SEQ ID NO: 159241

SEQ ID NO: 470322 - DNA, 1000 bp, Homo Sapiens; identical to SEQ ID NO: 159242

SEQ ID NO: 470323 - DNA, 1000 bp, Homo Sapiens; identical to SEQ ID NO: 339840

SEQ ID NO: 470324 - DNA, 1000 bp, Homo Sapiens
aagattatacgaagtgatttattgatactggttaacatccattatatacaggtagaaactttcaaaattgtacaaagaaccattaagcatattgataaagacagttttacagacaaaacaactggaaaatagttttaacatacacaatatataattatgaaaaaaatgtagaacacatattgttctaccagataaatcccaaggttattaaaagtctgctatgcagaccttaagttgaaaaatgttcaatggagttacatggttttagaaaattaagtataatgtaaaaattaagcttttttttctcattgcaattgggagaggaactgagacaactttttaccccaaatctatacagtttgaaaaataatttatatgtctagcataaagaaaattgagaatgtttatggttctgtaaactttgccttttatgaaatgcaaaccacatcagttttaaaaattagaaactgtgcaatcagaaacagattgttccctttatggtacaattgtaccttaattggctttatacctgagcaccaaagctgaagttctaaatgccatctcttcctggaaagttattctgaaaatgagcaagaaatcaaaactagcctattatcatctagaaaattaggcaccaagaaggagattatctccttggaaatgcaacatcaatgacagagaagtttcaattaattaagcagctgacagatctccttgtgaacacaacaaaggaaatccacataagaagagcctccgtaaagtcctttgtcttctaccaggaactgtcggaaaaccatttctggttgttctcgctgctttacaattgtgagcttcattgaatatggcctcttttgttggataatacccattatcattctgagttgttgagagtatgggtttcccacttcaggcagcaatgtcatatctgtgttgatatgtgcaaaagatggcacattaaatattccttggatcagttctggtgggctgcttactcccaacc

SEQ ID NO: 470325 - DNA, 1000 bp, Homo Sapiens
aattccattttttttattattcaacattttatacataataaatacaaactttttacagccactgtaaagaaagcacatctgcacagaggctccctccgagccctgacctgtgcactgtggtgctggattccatatcctggatggaggggttattttttaaaaaggaggcatgttttcacaactttgttttttaaaataaaattagcagctcttccaaaaaatattttaaaatacaacaaaagatttcaaataaccctttgaggttgtggaaaacccaaattcaaggacaatttggctagctaaagacagaatacaagactgggtggcaagaactgctctatttaataagcatttgaagatttttaatatgttagcaaactttaaaatcttaaaaaaaccacccttttaatttcttttttaaacttaagaataagtttgataaacacaaaagacctcaaatagatcaacaggttaagaagtgtaaaaaacaacaacgaaaaaaaaccccaaatcatggagaagattcattaatgggtattgtcactgaagtgatcaaagaactaaaaatttcttcagttatcaccttacttttggtcaaaaatcccatggggacatttggcgagcatttcaagttttttaagattcttaggagggatggagttttcaaagcataatacaacttgtagattaaattctgcaaatttgatttcttaaccaaggaaaaaaaaaaaaaaaacaaaccacaaccggcgaacatcccttagtccctaggtattgtgctccctaccttctacaggagcggacagcggacagtcagcacctgacgtgggggcacctgctgctgcaggcttgctggcctgcagagaaggccactcctggctttccctgtgacacacagaagacacttgtcttttcctggtcaatctgtacttgtgcagggtgcgcaatccttcagtcctttctcatagaaagctggtttcctccacgagccaccaggttc

SEQ ID NO: 470326 - DNA, 1000 bp, Homo Sapiens; identical to SEQ ID NO: 337466

SEQ ID NO: 470327 - DNA, 1000 bp, Homo Sapiens; identical to SEQ ID NO: 159243

SEQ ID NO: 470328 - DNA, 1000 bp, Homo Sapiens; identical to SEQ ID NO: 339843

SEQ ID NO: 470329 - DNA, 1000 bp, Homo Sapiens; identical to SEQ ID NO: 159244

SEQ ID NO: 470330 - DNA, 1000 bp, Homo Sapiens; identical to SEQ ID NO: 339844

SEQ ID NO: 470331 - DNA, 1000 bp, Homo Sapiens; identical to SEQ ID NO: 339845

SEQ ID NO: 470332 - DNA, 1000 bp, Homo Sapiens; identical to SEQ ID NO: 339846

SEQ ID NO: 470333 - DNA, 1000 bp, Homo Sapiens
aaaattgcaaataagaagtttaatttcagaaactgagttcaccatttataaatacactaaaacatagtcaatgcaaatttagattaagcgtatgtacagtatttcaacaaaacaacttttctaaaaggtcgtaggcaaatgagtgattagtctcactcagaatatttaattggcttaaaatgagaaaatgaatctttttttctctgaagacataacttttaaaatcatctgacaactgacacttcactctgatgtccttgggatttgaaaatatcccagtgatggccgcatcttccctatcataaaaaaatctaaacactaaggctattcttacaactggaatataacaagcttcttccctgttaataagccatctcttctaaaaaaattttacacaaatttgatcaaacaagggggtcagtgcacacattttgaaagacagcttcagagcgtggagatgctgaagcggaggcgtgggggtttcagcagggaccacctgccatcagcgtgtcattgaacgcactggcgaagtgatgagcacagttacaaagggatcacatttcagaggagctgatgataaacagctggggtatctctgagttaactgaccatgtaaagcctgaatgcagaaacctgaaatgggaaagttctcaaaataagctccatgaaacatctaagtttcgtttccaaatgccacgtctctgtcgtagtaaacagttaccttccagaatattatctgtactccgcgggacactttagaacctgcggttaaaaactgctcagtcaggatggcttgccctccacctcctatttacagatttcatttgatagccacaaaagctattctgttgcaattaaagcaatgcttcactaaaatacagtacctgatttgtggtttgtacataattgagtaaaaagcctacagaataaaatggtttacatcttctttgtcattctagtaaaacaaattactaacccaaaactttaaaaaactttacgg

SEQ ID NO: 470334 - DNA, 1000 bp, Homo Sapiens; identical to SEQ ID NO: 339847

SEQ ID NO: 470335 - DNA, 1000 bp, Homo Sapiens; identical to SEQ ID NO: 339848

SEQ ID NO: 470336 - DNA, 1000 bp, Homo Sapiens; identical to SEQ ID NO: 339849

SEQ ID NO: 470337 - DNA, 1000 bp, Homo Sapiens; identical to SEQ ID NO: 339850

SEQ ID NO: 470338 - DNA, 1000 bp, Homo Sapiens; identical to SEQ ID NO: 339851

SEQ ID NO: 470339 - DNA, 1000 bp, Homo Sapiens; identical to SEQ ID NO: 159246

SEQ ID NO: 470340 - DNA, 1000 bp, Homo Sapiens; identical to SEQ ID NO: 339853

SEQ ID NO: 470341 - DNA, 1000 bp, Homo Sapiens; identical to SEQ ID NO: 159247

SEQ ID NO: 470342 - DNA, 1000 bp, Homo Sapiens; identical to SEQ ID NO: 159248

SEQ ID NO: 470343 - DNA, 1000 bp, Homo Sapiens; identical to SEQ ID NO: 339855

SEQ ID NO: 470344 - DNA, 1000 bp, Homo Sapiens
ttttttttttttttttggataggaaatacttttattgcaaaaagtactgaaggtaccctaaaaccttaagcaggattctggacatggaagcctacagaatagacaaaaataaatatgtcaacctgcccgaccctctggggtgaactggatgtggacactggagggagggcgtcctttattacatacgcgtctctgaagtcatataaatatagaataccttatagtagatcagcattaaataccagtcactgtgtttatataacttaatttgtgctgtagacaaagttctgtacatgtaacatgtggccatgcccaggcatcccagcatctatcctgaagtcagtgtaaagacatccttaagtggtggagacatgacagcccagaacccacagcagagggaaactgtggagaggagggggcctgaccctggatcccccagctggtgtccacaggctagagggacccattgctgcagaggctggtgcctggttttccccatacttggtcttctaaacccaaagacagggtcctgatggtggagacctgggtaggtccggaggacagacacaggagagggcacaatcccaagcgcagctctcctgcactggctcgcaccacagccctcatctgagtggccgacacaagcctggagtacggcagctgccaaccacagcaaagccgcaaaaaagactgagaaaacaggaacccagagttccacaggggcaaggcctcgcagaccagccaagcccgagatgccctgtgctggcagtcatcacagtctggacagcatgtccttccgtgggtgcccagctcagtgcctggaacggtcagggattgagggcgtagccaaccttgtatggccaaacccagcccttacgcccctgctgacaagggagacaagctgccccgctgaactccaacaacctctgggtgggctcagcagcccctaggaagttaagcgagagctacagggcaggggggctccctgagggagtttgca

SEQ ID NO: 470345 - DNA, 1000 bp, Homo Sapiens; identical to SEQ ID NO: 339856

SEQ ID NO: 470346 - DNA, 1000 bp, Homo Sapiens; identical to SEQ ID NO: 339857

SEQ ID NO: 470347 - DNA, 1000 bp, Homo Sapiens; identical to SEQ ID NO: 339858

SEQ ID NO: 470348 - DNA, 1000 bp, Homo Sapiens; identical to SEQ ID NO: 339859

SEQ ID NO: 470349 - DNA, 1000 bp, Homo Sapiens; identical to SEQ ID NO: 339860

SEQ ID NO: 470350 - DNA, 1000 bp, Homo Sapiens; identical to SEQ ID NO: 339861

SEQ ID NO: 470351 - DNA, 1000 bp, Homo Sapiens; identical to SEQ ID NO: 159249

SEQ ID NO: 470352 - DNA, 1000 bp, Homo Sapiens; identical to SEQ ID NO: 159250

SEQ ID NO: 470353 - DNA, 1000 bp, Homo Sapiens; identical to SEQ ID NO: 159251

SEQ ID NO: 470354 - DNA, 1000 bp, Homo Sapiens; identical to SEQ ID NO: 339864

SEQ ID NO: 470355 - DNA, 1000 bp, Homo Sapiens; identical to SEQ ID NO: 339865

SEQ ID NO: 470356 - DNA, 1000 bp, Homo Sapiens; identical to SEQ ID NO: 159252

SEQ ID NO: 470357 - DNA, 1000 bp, Homo Sapiens; identical to SEQ ID NO: 339866

SEQ ID NO: 470358 - DNA, 1000 bp, Homo Sapiens; identical to SEQ ID NO: 339867

SEQ ID NO: 470359 - DNA, 1000 bp, Homo Sapiens; identical to SEQ ID NO: 159253

SEQ ID NO: 470360 - DNA, 1000 bp, Homo Sapiens; identical to SEQ ID NO: 339870

SEQ ID NO: 470361 - DNA, 1000 bp, Homo Sapiens; identical to SEQ ID NO: 159254

SEQ ID NO: 470362 - DNA, 1000 bp, Homo Sapiens; identical to SEQ ID NO: 339872

SEQ ID NO: 470363 - DNA, 1000 bp, Homo Sapiens; identical to SEQ ID NO: 339873

SEQ ID NO: 470364 - DNA, 1000 bp, Homo Sapiens; identical to SEQ ID NO: 339874

SEQ ID NO: 470365 - DNA, 1000 bp, Homo Sapiens
accatttaaaaaaacaatttatataaatagattcgtatacaaagaagaaacacatatacagagtaccccaattaccagtatggtggaccctaccccttcttttctgcattgggaaacagaacagagaacagaaaaaatcattccatcttgctcttaactctttccacctatgtgctcagtttttcaagtagaatttctattcctttgctggtgcttttggttttttccagtgtaggaatcaagcttttcagtgcagctttgactttgtttgcaacttccaggtcacaactctggaggaggctagaaagaataatggcacctcgatttacactagcccaggacttcaggttcttcataccaacatgctctacaagtgtttttgcaaaacaaccttctctcccattttctttcatctttttatcttgctctattaaccacttcagaactagatgtcctgcaggatgttctgcaatgtgaagctctccgtccttgccaccaggatgcagtcctgttgctgccaagctggcgatggcattcatggtaggctgaacgtctccagtggcagatcccagaatgtcagacaccaacacacacgcagacttatctagcaccacttcttgggcgtgttcttgcaggtagcttaacaaagctggagaaatggattctaggagctcccgtctgcggacctctgtatctttcttactgtgtgcatttccatctcctttttgcagaacttcaatgatttctcgtactgtatgtgcaggatctctggggcttagtaagtacaataggaccttccttccatatttgtcatttactatgctaggcaatgaactgataatttctgatatgattatctgcttcacaagcttagtatcatcaatacaatcaaatgccgccagtaaaaccaaatgggagtattggccattagccaccttttcaacataagtcttcattgttttcacaatcactttcctgtccttgggcgtgccatgccaca

SEQ ID NO: 470366 - DNA, 1000 bp, Homo Sapiens; identical to SEQ ID NO: 339876

SEQ ID NO: 470367 - DNA, 1000 bp, Homo Sapiens
ttttttttttttttttttttttttttttttttttttttttttttttttttttttcaaattttatattaattttatttaagtatacacgtcatataaaagtttcatctcataattttaaagacacataattacttatatatataatgcttcaaactactttattaattatcattaatccttttggtccctgaatctgcctttgcttcctcttctaaggcttgatgcagaatataactgcccatggagggcaggggacaagaaattaagggtcccagggagacccagtttcagttatccttgatgatgctgagaggcattcagcaccacgaacatgttgttcaaacataaatgagaaaataaagtatctgaacaatcttcatgaggtttttccacacaaagtgtatttcacatttctatagatttaactactaacaagctacatccaaggaacttaactactactgaatcctcggaggtatcatcaatatccagcttccaatttccactctctaaaatatttctccattgtgctcctagatttccaggtgcccacatttacagtaggtatgattttctggggcttcagccactggacaaagcgcttcatttctaggtagctgctgtgttcactgtaaggaattccatatattgaaatgtttcctttggtctggggaataacatctgctattctagtgaacttgttagagtgtgtccatcctgtaggtcgaaatgccaaaatctgattgtatttcccaccacacttcttcaaatgactctgtaagcccttaaaattaatttgcatcattgggagaaggtgaaccaatgaactgcacatgtcggtagtgatgagtgaattaatttctggtatattgaggcactgtagagttttatatttttcctgggacatgcccacttttgaacctaaaacatcagcaatggctaggaagactttctcttttccaatagagtaagtgccacagacaacaagagcatgtgggtt

SEQ ID NO: 470368 - DNA, 1000 bp, Homo Sapiens; identical to SEQ ID NO: 335728

SEQ ID NO: 470369 - DNA, 1000 bp, Homo Sapiens
atgaagtaggatatttgtatatttgctttttttcaatcattcagttttatgaacatggggtcaaagcgtatttcaaaataaagaccatttataaaactggaccactttaatgtttacaatttaataaatctcttcattgcagacatgtatggctgtttggtagtattcagaaacatcacagtaatggcagtttcttcaattggtgtgtagtcctcaataattatatatgaaattgctgtcaaaccagtaagactgcatttatacatccatcattttcaggattgttggtaacctgggcatattttccccaaataactttgcctccttgcgtcacaaggcccaattcgctcacatttacttcaatgacagtacctttggtaataacacccaaagttgtatacagtggggatgagggattcttctttacaccaagtattggtaggcaaaaggtggctttcagttcaggatgtgttacatgggctttcttgaaacgcaagcccattggcctgatgaatctttcatatttaggtggttttcttgtaaagccatctccaacaaagcacactttagtaaccattctcttccatgccttcttctttctctttcctgttcgaataacttttaatacttctgtttctccctgggcacgtactttaggcagagggacttcccattttcccgccttctcttttcttttctgtttaatcatattggaaagtactttagctcgagattgtccctctctgtccagcagataggcaggtactgctccctgtggtgtcttttcatcattcttttgtttggtgtttctcttttcatgcatcttgatagtctttttcatttgtattttctcagcatgacgctgtttatggtaaagcttagccttcagaccaatcattttctttgccttctttgaacgttcatgagcctctcgactttccttctttctctttttctcatggtaatccaaacggtatccatagcgtttacggtgtaattc

SEQ ID NO: 470370 - DNA, 1000 bp, Homo Sapiens; identical to SEQ ID NO: 246497

SEQ ID NO: 470371 - DNA, 1000 bp, Homo Sapiens; identical to SEQ ID NO: 159256

SEQ ID NO: 470372 - DNA, 1000 bp, Homo Sapiens
ttttttttttttcaaatacataaagatgtatttatacaagtgcagactaaatattttccatacaagtatgtaaatgaaaagatatacagtaagtgcacactcgatatgactatgcaggcaacagttagtttcagatactcttgtatagttcatgcacaaaccttcccaaagtacgagttcagtcagtcttgggggatatggagggatgattaaaaaaggattgagttccttgcaaaaatatcagtatggactggatgagggtgagcgtggtcagttatatatattacttactgtaatttgtgattgtcgaggaagaggtgtggctgttggtgtgatagtaatactgctggtgactttattggttgttttgtttagtgccccgttaattaagccttgagttcggttatcctgcagtggtgctgaagggctggctacagcttgcatgtaaggacttcctaagtgaatgtggattttattatcctcagtagttatcacacttgagctattgctgtttgaacgctgaaactgccatgatgactgccggtctggggagactctgaatatcgcatgcttggcactgatttctgttggttctggggagcgtccctgctcaggagagctagctgaaccagtcacagccaaaacctgaatagggacattgtcctttctggagttagagaaccacaagactctggggtctgtgctctggcaaaggttgccatggtaattggggacatgccttgttctaaattcatgaggtcttcggtagaggttttggactttactggtgttatggaggcgttttggaggatggttatcctttgctttggcgtgccacagttcggtatcactgcagtactcgtgtaagagtgaggactctctgtggttggacttgtgatttcaagagtggctgtgttttgtacatggtctggagtaacctttatatgaagtggctgcccaggtgtgtggcttaggactagatctccaggttgcacaaagt

SEQ ID NO: 470373 - DNA, 1000 bp, Homo Sapiens; identical to SEQ ID NO: 339879

SEQ ID NO: 470374 - DNA, 1000 bp, Homo Sapiens; identical to SEQ ID NO: 339880

SEQ ID NO: 470375 - DNA, 1000 bp, Homo Sapiens; identical to SEQ ID NO: 246498

SEQ ID NO: 470376 - DNA, 1000 bp, Homo Sapiens; identical to SEQ ID NO: 159257

SEQ ID NO: 470377 - DNA, 1000 bp, Homo Sapiens; identical to SEQ ID NO: 339884

SEQ ID NO: 470378 - DNA, 1000 bp, Homo Sapiens; identical to SEQ ID NO: 339885

SEQ ID NO: 470379 - DNA, 1000 bp, Homo Sapiens; identical to SEQ ID NO: 159258

SEQ ID NO: 470380 - DNA, 1000 bp, Homo Sapiens
gcgtgggcggtcgttggtatacatcatacatttattagtgaatatccctctgaaatcagcaacaatattaaaaaaaataatgattgcactacttggtcaagcagaactagcaactttcattttaaaaaaagtacaaatctgttaaaaatttcaatcagtatacacatatatataatacaacatactagttatgttaaatgctacaaaccaatgtgaatcccatggaatggaaaaaaccacacatttaagctttaagaaccatttttttctctatatattagcattttctcaaatacatacatgggaaaaatgaggtaactgtaaaatgtgcaaggaacagggcccccaaaattacatatatttctacatatatatgtaattttatatatatataaaacctttctaacacagaacacaggcgctgggcccagccagggctgggggaaggtgcccactgtcatgcctaggccagaagttggtaaataagagagtaaacaatggcaagcccccaccacaggaaatcattggtaacatggcatctatagcaaggtcggcagatcacaaacatcctaagtaattgttgtataaatcttgttttttaatgatgatctttttaaatgctgtgtttcccccccaatagctgcttgttggaatcactgctgcagccgacacacaatctgtgagcctgtttccgcctgccccaggaactgtaaggggtttgaaaacgttttgttggggtcgggaagggaggggttggagagggtggttctgtgtaaaacacgtgggttttcaacactgctataaatatagaaacgtcacctggagttatatacagtaagactttgggttctccatgggggtgggaccaggctgacgggccccacggcaggctggggcgggaggtgggagccagggccactgcgaggagaacgagggtggttggagcatccctgaggcagcaggcgccaggggctgcctgctaggatgtgccggccccaca

SEQ ID NO: 470381 - DNA, 1000 bp, Homo Sapiens; identical to SEQ ID NO: 345249

SEQ ID NO: 470382 - DNA, 1000 bp, Homo Sapiens; identical to SEQ ID NO: 339887

SEQ ID NO: 470383 - DNA, 1000 bp, Homo Sapiens; identical to SEQ ID NO: 159259

SEQ ID NO: 470384 - DNA, 1000 bp, Homo Sapiens; identical to SEQ ID NO: 159260

SEQ ID NO: 470385 - DNA, 1000 bp, Homo Sapiens; identical to SEQ ID NO: 159261

SEQ ID NO: 470386 - DNA, 1000 bp, Homo Sapiens; identical to SEQ ID NO: 339892

SEQ ID NO: 470387 - DNA, 1000 bp, Homo Sapiens; identical to SEQ ID NO: 339893

SEQ ID NO: 470388 - DNA, 1000 bp, Homo Sapiens; identical to SEQ ID NO: 339894

SEQ ID NO: 470389 - DNA, 1000 bp, Homo Sapiens; identical to SEQ ID NO: 339895

SEQ ID NO: 470390 - DNA, 1000 bp, Homo Sapiens
ttttcacacatcttatctaaatacataacacagaagcctgtgtgacttgggcaacgtggtccaggagggcctgagactaacacatccacctcggcaaaaggacatcaaatatctcttacagtcggaaaaaaacagccttttgtgtatttccttagtttacgaaatatactcgaaatgctattattagctgaatttgtggtttccttttgagtttctgagttattcttatttatttttcccattttgtttttgcaccaaggagaccggagtcaaataatactcagcgactgatttcctctctttggactgaaaaattaaacagatactaaatgatgacagtgaatttagagagggctccaagggcttgaaagaacatgtctgggataatatggtgcttctaagagtattgcaatcacatcgtggcaatcaccggcgcgtgccgcgtgactacctcctcggctaatatgctttcttctcggcgatgactaatcacgttctattaaacagcagtaatgcgggaagaactcggctgtacaagtgtaatgaagccagtattctccctggacagattagctacaactgatttgacacacaccatcataggggcttcaaacctgacaaactctgtgcttgcttctgatttatgccgtcgagctcctcagagaagagatggaatccaagtgttccgtttggtagaggggaaatgtactatgtgctcaactgccagttaaggaaagttgccccttctccttgttcctcgcctcccctccccctcgcgtccccatcccttgtgccaccaggacaagggtcctgcgccatgtgctatcatcaaagggccgaggcccgtcgctctctcctgtgtgtggtttaggggagtttatgaaaaggagccacttctgcagtctcccggccgcctcttcgccccttgagggatgtccaggttttgtgattttgtttggggtgagagtgggtgggcgggagggaggtggccaccaggaag

SEQ ID NO: 470391 - DNA, 1000 bp, Homo Sapiens; identical to SEQ ID NO: 159262

SEQ ID NO: 470392 - DNA, 1000 bp, Homo Sapiens
acaaaaatgcattcaagtccatcaacaaaacagtggtattttggactcaatgaaaatatttcctatatgaacataaaacactaacattcagaatcatttatcatttatgaaagagtaccatatgtacaatcccaacaatcctagacacagtagaacactcaaaatatttaagcttcacaagtaccatgcagcgcaaactataaaacagaaaaaaaatcaaactagtggctagcatcggcttgacctgcctcattcccctcgaataactgaagatcctgtacaacaatggagactctcggaacatttatccacagtgcaattacagaaagcagttcgtgatttctctagaaataataaatatggctcactggtgaccattcccctcacgtgtcctctgtggtgcccacacgtgcgccgggatgtgcaggcgtggacgcagagacgcccctgtggaaagcacacatgcggtgcacacagctccacacgcgcgcgcacatggaggctgtgcccctgcctcccccgacggccagcgcatgagcactgcctgggaggccgcggccgcgggtgcacggggcactgagggacgccggctcctggacacggcctcgctctgcacctgggctcccgagggccccgccttgaacgcagctaagagccgtctccctcttcacctctggattcttcctcccaatctcatgtcagcaaatggcgagtggatgtcgctgctcgggctgagggcgcaggggcgccgctccaggggagcagcctcggacccgagcgtgcgcgttggcagccacctagtccttttctccgtcttcgctgcttccgccctgctcgatgtccgagtcggtcaggtgtgtgagggaaaagctggcaatgttggcgggagagatggagaaccgggagtaaggcgccgagtgcggccagctctgctccgtgctccgggccggtggcggcggagaaaagtacttggatgtttggagagaaggcttggagctga

SEQ ID NO: 470393 - DNA, 1000 bp, Homo Sapiens; identical to SEQ ID NO: 159263

SEQ ID NO: 470394 - DNA, 1000 bp, Homo Sapiens; identical to SEQ ID NO: 339897

SEQ ID NO: 470395 - DNA, 1000 bp, Homo Sapiens; identical to SEQ ID NO: 339898

SEQ ID NO: 470396 - DNA, 1000 bp, Homo Sapiens; identical to SEQ ID NO: 339899

SEQ ID NO: 470397 - DNA, 1000 bp, Homo Sapiens; identical to SEQ ID NO: 339900

SEQ ID NO: 470398 - DNA, 1000 bp, Homo Sapiens; identical to SEQ ID NO: 339901

SEQ ID NO: 470399 - DNA, 1000 bp, Homo Sapiens
tttttttttttttttttttttttttttttttttttttttttttttttttttttttttttttatgtttttcaaaaactttttattaggaaagctataccagaggcataatcactatacaatgattaaacattacctttacaatttataatcactgaaattacagaataaatatatgcacatttcttttgaatctttgtgtgtgagagagaaaacattaaaagtgcttcctacaaagctgttagtgatatatacccagttgctttttttaatattatatatatatataagaaagtgcagatgttctccaaaaaatcttggcatcaggatgaagtgtcacaaagagggtgctcatccctaggcgtgtgtcttcggctgttaaaccaccaggcctctacttcagtagaatccagcctagaatgtgacttttcccagggtggtaggagagatgctgtgagctgtacactagcagtgaagggtggtagaactatggagaggagaaaaatggatcaaacccgaactaagcagattgagttgaatggaaatggtatggagtgtgtgtgtgtgtgtgtgtgtgtgtgtgtgtgtgtgtgtgtacctgcaccagcaggaagaaactgcaggtttagggaccatggtctgcagatggatatgtgtatgagagacaagatagtgagtgagaacattcgagcaagacccgccccctccctccccatcttgcagtttccaggcatgcagcaaactgcattgttaatacatgtacagaatctgtgccatgatgataagaaagaaagccacaaatgacaaatgtcaacttgtttccccccctttaaatcaaaactacaactataaaaaaaatagttactgaaaataaaaagacacattgaattttacttaattaggatccatacaatgatccccagtatatcttatacatggcacagtcaaagtctcaagtttcagtataaaaaaataatgataacatttgctggcaaaagtctgc

SEQ ID NO: 470400 - DNA, 1000 bp, Homo Sapiens; identical to SEQ ID NO: 339902

SEQ ID NO: 470401 - DNA, 1000 bp, Homo Sapiens; identical to SEQ ID NO: 339903

SEQ ID NO: 470402 - DNA, 1000 bp, Homo Sapiens; identical to SEQ ID NO: 159264

SEQ ID NO: 470403 - DNA, 1000 bp, Homo Sapiens; identical to SEQ ID NO: 339905

SEQ ID NO: 470404 - DNA, 1000 bp, Homo Sapiens; identical to SEQ ID NO: 159266

SEQ ID NO: 470405 - DNA, 1000 bp, Homo Sapiens; identical to SEQ ID NO: 339906

SEQ ID NO: 470406 - DNA, 1000 bp, Homo Sapiens; identical to SEQ ID NO: 159267

SEQ ID NO: 470407 - DNA, 1000 bp, Homo Sapiens; identical to SEQ ID NO: 339908

SEQ ID NO: 470408 - DNA, 1000 bp, Homo Sapiens
ttttttttttttttttttcaataacaaaaggcttaacattttatttaaaaaaattagaatatcattatttcattattgtaatgggacgaatcctccctcctttctgccctggttggagagaaaggagtgcagcccacttgccctcactaccttcagcctcctcagcagcttctggcgcctccacattcagaggtttcagcttccccgccattttccaacgcggggcctgcgcgcgagcctcgcttgatgactggttaaaaaagaaaccacgtgagggtgaaaggcttttcagcacgcatgcgtgcaacccgcggttacgccagcggttaaatcaggagtcagctctgggcaggcgcagaacacactgcggccctgattgccagcacacatgctacaaccttgaggctgtaactccacaaacaagggcagaactagggtaatggccagttggggagtgagggtagtgtgcacacacacaaaaccctagggaggtctctcctgctttaggctgcttgtcttgtgcaggttgtcaaagtctgggacagacgtgcatgtgctatgtggtggtacacaatagttcgagtctgttttcgtttacaaatcctcatcaaagagttcatgagagagggttacttatctctgtttcacagatgagtaaaacgaggcttagaggctaagtgcatctcctatgtaaaaatgctggatttcagccactgtgtgcagtcaggtgctgtgtcctgggttccacaggtggacactgaaggccaccttctcattaatgttagcagcagccagcattgagggcgggtcatttctggcagggtaaagatgaaaaaagtacaagaagggcaaaggaatatccttgtgggtcttacttttaggccttttatgtagtttttttctttaaaataccctcaggccagtcccaagcatagcctggccctgaagtgccaattccagcacccccgtgggccaccctagacaccttggccagatctgg

SEQ ID NO: 470409 - DNA, 1000 bp, Homo Sapiens; identical to SEQ ID NO: 159269

SEQ ID NO: 470410 - DNA, 1000 bp, Homo Sapiens; identical to SEQ ID NO: 339910

SEQ ID NO: 470411 - DNA, 1000 bp, Homo Sapiens; identical to SEQ ID NO: 159270

SEQ ID NO: 470412 - DNA, 1000 bp, Homo Sapiens; identical to SEQ ID NO: 335809

SEQ ID NO: 470413 - DNA, 1000 bp, Homo Sapiens; identical to SEQ ID NO: 339913

SEQ ID NO: 470414 - DNA, 1000 bp, Homo Sapiens; identical to SEQ ID NO: 339914

SEQ ID NO: 470415 - DNA, 1000 bp, Homo Sapiens; identical to SEQ ID NO: 339915

SEQ ID NO: 470416 - DNA, 1000 bp, Homo Sapiens; identical to SEQ ID NO: 345589

SEQ ID NO: 470417 - DNA, 1000 bp, Homo Sapiens; identical to SEQ ID NO: 339916

SEQ ID NO: 470418 - DNA, 1000 bp, Homo Sapiens; identical to SEQ ID NO: 159271

SEQ ID NO: 470419 - DNA, 1000 bp, Homo Sapiens; identical to SEQ ID NO: 159272

SEQ ID NO: 470420 - DNA, 1000 bp, Homo Sapiens; identical to SEQ ID NO: 339920

SEQ ID NO: 470421 - DNA, 1000 bp, Homo Sapiens; identical to SEQ ID NO: 339922

SEQ ID NO: 470422 - DNA, 1000 bp, Homo Sapiens; identical to SEQ ID NO: 339923

SEQ ID NO: 470423 - DNA, 1000 bp, Homo Sapiens; identical to SEQ ID NO: 159273

SEQ ID NO: 470424 - DNA, 1000 bp, Homo Sapiens; identical to SEQ ID NO: 339925

SEQ ID NO: 470425 - DNA, 1000 bp, Homo Sapiens
tttttttttttttttgaaacaaggaaactaaaatgtattgaatgtctgctctgtgtcaggtaatttgccaggcattttcatgtatgcctttatttaaccctcaaaatcaacttgcaggttaggttaaacaattgcccaagttcaaaagctggagctggcacctgtgcctgactccaaagcccgtgtgcttcccattaaggcacactccctgcccagagccagcgcagctcagctgctctcgggtcggcgtggaggagggacaggatacagaagggatatgcaaggctaactccaaaactaaactccaagactaaactaaagcgtgtgtttgtaaagagggtaaaaatgaaatttggaagcaaacttgcctaatttccaggtactcctcctcgtggaataaaaattggtctgttatgcggcttgacagcggcaggcaatttggtagggattacagcagggagttactgaagggtcctgagtgtaatctgcgctggagatgttgtcgttggcaatgtcttggaggacgtctgcaagaacctttctgacctcgggcagcacagcctggtactccgcaccacctctttctaggggcacagcttctgcggtatcgtcttccaggttgaaaatcagaggaaacttatgctgcagctcaggccccgtgctcccatcacacgccctggctccaccggtaatgtagaaggccttgtaacgctccaggcggacagtctgcagggctccaaactctccagctgccccgctgttggggtggaacagcaccctgtgcccaggctgtgaccggccaaagagcacctcggagacgtccacaccatcaaagcgccgtccttgaggtaagctggcctgggccagggctaccacagttggaaaaatgtccagcacgcttaacaaggcagtgctggtgacattaactggaactctgccaggccagtaagccagtgctgggacccggtgccctccttcccaggtcgtctgcttggctgga

SEQ ID NO: 470426 - DNA, 1000 bp, Homo Sapiens; identical to SEQ ID NO: 339926

SEQ ID NO: 470427 - DNA, 1000 bp, Homo Sapiens; identical to SEQ ID NO: 159274

SEQ ID NO: 470428 - DNA, 1000 bp, Homo Sapiens; identical to SEQ ID NO: 339929

SEQ ID NO: 470429 - DNA, 1000 bp, Homo Sapiens
ttttttttttttttttcttttttaaatgtcaagaggtctttattgaaataatagcacagttacacttctaataccctttccacttgtatacaacagatgaaaaatgcttgctacatacagtgcacagacagttcaataatgagaactaatacaactgcatttgaaataaataaaatagcctatttaaataatttaaagtaaaattactgtacaatatgaaaataaagatacataaatgttagaatctacaaagctgtagaaataaaatcattattctgcattacacaaaacagtgcaagaaaaaaatccaaataagcttttggagtgcaaagtttaaatcttccattttaaattatcatgcagacatagcatttcaagccatgctatggtctatgtcaaggattttaatttttaaggagaaaaatgccagtaaatttactgtaccatcaagtgttgcgtcacataactgctgctgctctgcttctacagttcagtttggaagggaggtatcctgttgcattcaaaaaactgaagttaacaagtttctgaagcaaacacatttaccttttagcctgaaacaaaattatatgacaaaataatcatatccctgggtttaagaaaaaagggcctataccatgtagtaaactaagaagcagtttttcattcatctttaaactccataatgatccttaagtgaaagcaaccatgtaacttttgagtgacatatattatggaattctgacctctagaagacaagtgataatacaatatgggatcgtgagaagagcaaaagtaattctgaacacctgggaagtttaatctgggaggaacttggttgcattacatttaataatatagttgaagtataattccatttcaatgtgcatataaaactgttatttaggcaaagaccaaggaatgcattgaatactaaaccgtaaacacattgtccatcctgacttggagtgcacaccaacaactgaagagctcttctgcagac

SEQ ID NO: 470430 - DNA, 1000 bp, Homo Sapiens; identical to SEQ ID NO: 159275

SEQ ID NO: 470431 - DNA, 1000 bp, Homo Sapiens; identical to SEQ ID NO: 246501

SEQ ID NO: 470432 - DNA, 1000 bp, Homo Sapiens
cacgcagcacggacgcactttatttatatgtgtacatatgtatacggaggctgtacagcgcggggccgatgacccccttggctatggtcccgggggtgcgggactggacactccttttttggtcaggcctgctgggggcacagcttcagcagggcaccgggaggtcagccccacttgaggcttggtgcccgagcccaagagggatgcgggtgggactggggtcactgcactgctgggtgcactgcacttcgctggggctagggagggtgtctggggctccggggagagctttggggaggcgggcttggagcgaggaccgctcagcgtggtgcgctcctccaccacctccaacacccagcgctcccggccccggggggcctcgggcacggaaggcgccaggggtgcgggttcctgcaaccccttggagtccgcgcccagaggctgaggcaccacagccttagccccgggccgcgcaggctctacgacaatgggtaccaggggtgtgcccgcctcgccagagctgctgcgccggcctgtctcgtgttcctgcaccgggctcagcgccgccttggccacagccctggccatcccgccagtgccatcctccgtctgcacgctctgatgccgcgtgcagccgacgtcccgctccagggtccggccaccgggggtcgtcgcgcggggtggggtgcacgcctcggcgccccccggggattccttctccttgctcgacactggtggcctggaggcaccctcgggcagcaacgggtccgcgcccaggctcaaaggtgactcctgtcggcccaggcggcggacggcgacctgccggggcgcgccaaggccctcgactgggggcgtctcaccgtcggactcggcaaggctatgcagcgccagctcgccatggaagtccttgcggaaatccgggtggcccacctcgaggctgtgtttgcgcagcgcgcccttcttgtccgcactcaaagaggctcccagcttctcggccgac

SEQ ID NO: 470433 - DNA, 1000 bp, Homo Sapiens; identical to SEQ ID NO: 339931

SEQ ID NO: 470434 - DNA, 1000 bp, Homo Sapiens; identical to SEQ ID NO: 159276

SEQ ID NO: 470435 - DNA, 1000 bp, Homo Sapiens; identical to SEQ ID NO: 339933

SEQ ID NO: 470436 - DNA, 1000 bp, Homo Sapiens; identical to SEQ ID NO: 339934

SEQ ID NO: 470437 - DNA, 1000 bp, Homo Sapiens
aacttaaaaaaatatttcagctttatttggggatggagacagtgacaggagtcagggtgaagggcaaaggagaggtgcttaaccaagctcattctattttcagtcgctcccacataggatcaaagtgatacctgcaggcatcttctgcttgttcctctctttttccaatgccttggaattgagagggaaaaagaaatgtctttataataaacactggctcacacttcagccccaagttctagtaccccagtttcaattacagtcacatatttatcatcaatctggaccagaagcactgccttgtcgatgtgggatctggtacctggatctctgctgcaaggcacccatcggtgaatcacatggccttccatgccctcctgcggactccagtctttccagctatttctcccagcttttaaccggattccttcatcaggccactgtagctctttccttttagacaggttgatcccttccagaatttgactgggatccacaatttggactctgtaaatcacttctgcctttttggagtgtgaattgttggcaggacttaaggtgttgcctggctgtgcatcagtggcactgctctgacctccctctgtcgcaagaaagcccacgagagtgtgatgtttgcaggctgggatgctttggctggagctgctggaggaaggcaggccgtgctgcacacaggccaggccgctctgacctgagggttccatttggttcaccatcgacagtcgggattggatggatgatggcaagtttcgaagcgatatctgactagtagaagagcgccgacaaggcacaaacccagtggtggacatccggagggatgaatgccggctgctatagcagtaggaagactggctggctactgaggcccgggcaggagactgtctgaccaggcccgactgcacagagtgagagctgtggctagtgcctagtgttggaggataagatgtgacaggtgggtggagtccagttcctgatccctgcc

SEQ ID NO: 470438 - DNA, 1000 bp, Homo Sapiens; identical to SEQ ID NO: 339935

SEQ ID NO: 470439 - DNA, 1000 bp, Homo Sapiens; identical to SEQ ID NO: 339937

SEQ ID NO: 470440 - DNA, 1000 bp, Homo Sapiens; identical to SEQ ID NO: 339938

SEQ ID NO: 470441 - DNA, 1000 bp, Homo Sapiens; identical to SEQ ID NO: 159278

SEQ ID NO: 470442 - DNA, 1000 bp, Homo Sapiens; identical to SEQ ID NO: 339941

SEQ ID NO: 470443 - DNA, 1000 bp, Homo Sapiens; identical to SEQ ID NO: 339942

SEQ ID NO: 470444 - DNA, 1000 bp, Homo Sapiens; identical to SEQ ID NO: 159279

SEQ ID NO: 470445 - DNA, 1000 bp, Homo Sapiens; identical to SEQ ID NO: 339943

SEQ ID NO: 470446 - DNA, 1000 bp, Homo Sapiens; identical to SEQ ID NO: 339944

SEQ ID NO: 470447 - DNA, 1000 bp, Homo Sapiens; identical to SEQ ID NO: 159280

SEQ ID NO: 470448 - DNA, 1000 bp, Homo Sapiens; identical to SEQ ID NO: 339946

SEQ ID NO: 470449 - DNA, 1000 bp, Homo Sapiens; identical to SEQ ID NO: 339947

SEQ ID NO: 470450 - DNA, 1000 bp, Homo Sapiens; identical to SEQ ID NO: 339949

SEQ ID NO: 470451 - DNA, 1000 bp, Homo Sapiens; identical to SEQ ID NO: 159282

SEQ ID NO: 470452 - DNA, 1000 bp, Homo Sapiens
tttttttttttttaggtttctccaatacaatttattattattacattttagcttgcatttactaagtgtcatggaaatattatactcaaaataacagagctccagagaaagacagttaactaagaaagaacagtttcactttcttagcttgtcaactcctagttagcctgcttgcctccgcaccacagatgcttgtcttcttgtggttgttaccacaagccaaagcttgaatttacatgggcatcaggccaagtctgtaaatccgtgaagacaggccatcaactgcattgagggtacagccttgctgaagggtcctttcttgacagtcaatgatgatgaatctggaaaaactgtctattctcttaggagaagaaaatataccccacctaaagtcgcagctgttaatcctgagatggtgatgacagcaaaactaaaaatcagatgattatttttactcaaatttctgctttagttttttttggaagatggctggcagaatagaaagaacagccaagatcatcagaataaatattgagttccaggaaacagcttctcctgctgttgtaagttgatacagtgttgttcctgccttaatggctacaaaagaaggaggtgcgacacctagaaaagtaccaataaaaaaaactttcaatggcacgtttatcacaggagatgtgatattaataaaccaattaggcagaaatggtgttattctcaaaaatataatgtagttaatgagatgttctctatgacgttcaacctgctgtgaccattttactgctttctctgttaggtatttgtatacaactggtctcccaactaaataggaaagcatataacagaaagaggcaccaagtccagaacacaaacaaacaagaaataaggctagtggaaagggataaagaaaccctgagagtatactgagaaatatagagcctggaatagcaaatgtttgcaagaaaatatatgtagcaaaataagctacaagtacttgaacata

SEQ ID NO: 470453 - DNA, 1000 bp, Homo Sapiens; identical to SEQ ID NO: 339951

SEQ ID NO: 470454 - DNA, 1000 bp, Homo Sapiens; identical to SEQ ID NO: 339952

SEQ ID NO: 470455 - DNA, 1000 bp, Homo Sapiens; identical to SEQ ID NO: 159283

SEQ ID NO: 470456 - DNA, 1000 bp, Homo Sapiens; identical to SEQ ID NO: 339954

SEQ ID NO: 470457 - DNA, 1000 bp, Homo Sapiens; identical to SEQ ID NO: 339955

SEQ ID NO: 470458 - DNA, 1000 bp, Homo Sapiens; identical to SEQ ID NO: 246502

SEQ ID NO: 470459 - DNA, 1000 bp, Homo Sapiens; identical to SEQ ID NO: 159284

SEQ ID NO: 470460 - DNA, 1000 bp, Homo Sapiens; identical to SEQ ID NO: 339959

SEQ ID NO: 470461 - DNA, 1000 bp, Homo Sapiens; identical to SEQ ID NO: 159286

SEQ ID NO: 470462 - DNA, 1000 bp, Homo Sapiens; identical to SEQ ID NO: 159287

SEQ ID NO: 470463 - DNA, 1000 bp, Homo Sapiens; identical to SEQ ID NO: 339962

SEQ ID NO: 470464 - DNA, 1000 bp, Homo Sapiens; identical to SEQ ID NO: 159288

SEQ ID NO: 470465 - DNA, 1000 bp, Homo Sapiens; identical to SEQ ID NO: 339964

SEQ ID NO: 470466 - DNA, 1000 bp, Homo Sapiens; identical to SEQ ID NO: 159289

SEQ ID NO: 470467 - DNA, 1000 bp, Homo Sapiens; identical to SEQ ID NO: 159290

SEQ ID NO: 470468 - DNA, 1000 bp, Homo Sapiens; identical to SEQ ID NO: 339967

SEQ ID NO: 470469 - DNA, 1000 bp, Homo Sapiens; identical to SEQ ID NO: 339968

SEQ ID NO: 470470 - DNA, 1000 bp, Homo Sapiens
ttttttttttttttttttttttgtgtggcgtcagctcttatttcttcttgagtttttgtcccgtggatgtgaatcactaagaacacatgcattcctcaagttttagaagataaataaggtggaaaaaaataaatcttagggatttgcttcaattcttatttaagcttcatggaatgcaaacataggaggctaaagcagaaataagtattgcttcagtgatcatgagtccagccagcttagtaaacaaaacaggggttaccttcctaaccttctaagttcccatttacctacaagtctgagggttttaatctgccagggtcccttggcaaaagggtcagaagtcattgtcactctcatccaggggttcagatttccggacccttcgattgggcttggttggtgagagagaaatgctctcgtcttccaaatcgtcatcctcgtcatcatcatcttccatgtcaatttcactctcctccgagtcctcattgtcatcggagtctccaccttgcatcgtgcccacaatgcgtttgccaggtcttccttgcatgagcatctccatggctgtctgtggcttgggcagccgcctttcttccaactcactgtcggattcatcgtcctcctggatgtctatgtccgagtcatcgttacttccactcttgagcaggcgcttctcttcctccttgagcttgttctgtatcaggcagagagtgtttttagcttcctcaaacctttcttgctccatcctatgatggtcttcaagctgttgttccagataagtcagattttgaaatttctccagataagtgtcatactgcttttgtaattcttcctcagtcttctcatactcatccataaaacatggcctgacactctgcagagtctctagtcgcttccgatttctttccagttctaattttctcttttcgattttggcttctaaattagcttcatcagaggccacattattgagcaggtctttagtcttctgaacctgtgtcaa

SEQ ID NO: 470471 - DNA, 1000 bp, Homo Sapiens; identical to SEQ ID NO: 339969

SEQ ID NO: 470472 - DNA, 1000 bp, Homo Sapiens; identical to SEQ ID NO: 159291

SEQ ID NO: 470473 - DNA, 1000 bp, Homo Sapiens; identical to SEQ ID NO: 159292

SEQ ID NO: 470474 - DNA, 1000 bp, Homo Sapiens; identical to SEQ ID NO: 339971

SEQ ID NO: 470475 - DNA, 1000 bp, Homo Sapiens; identical to SEQ ID NO: 339972

SEQ ID NO: 470476 - DNA, 1000 bp, Homo Sapiens; identical to SEQ ID NO: 159293

SEQ ID NO: 470477 - DNA, 1000 bp, Homo Sapiens; identical to SEQ ID NO: 339974

SEQ ID NO: 470478 - DNA, 1000 bp, Homo Sapiens; identical to SEQ ID NO: 339975

SEQ ID NO: 470479 - DNA, 1000 bp, Homo Sapiens
tttttttttttacattgtcttaaaaccaggttgtttattggtacgtacacacccacactcacacccacccacacacacccatacacccattcctgatgcactgagcaaatacagtactgagaagggacctgatgagatacaggaggctggtgtggagggctcgggtcactggtgactcgccaaaaaaaaaatatattgactatgaggcaagggatacaccaagacaacagccttccatcactgtttgcacagagttctcttcttaacacctccctgcaacacttctcaaggtgctctgaatggacccagctatcctggcacagctgctgccttacgacatggccaacagtggcaggagttgtagaggggagaggctgggactgagtctcccttacagccagcccatcaagagcaccctgaaggagtcagatggctatgcattgcccaactccaccaatcttaggaatctccatcatcttaccatccattacccagggatgggagctgtttatctccatccaactcattttctgctcaataatccctccatctccactcccagcaacctgatggcagggaggccagggaacactaagggagagcaagggcaggtggctgccttgcccaagcctaagggagagcccaccccaccacaccagtgatgggcctctcctctaccgaaaaggagcagcgggctttaagccctggcactgcccaggtgccattgctccttctggactgggtgccctggcccattatctcacctgcaagcctagtccctgctcagaactcaaggtgatcaggttgcaaagcagctgctccagccacctgtaggatggcactgcactggcccctatccaagaaacacatgccagatgcttttcctttcctctcactttgatgaagccctcggttccatcatcccaccctgaacataagtcttgaacattttcaggcaccttggtaggatgagggagtaggtgaggagcgggtatttctt

SEQ ID NO: 470480 - DNA, 1000 bp, Homo Sapiens; identical to SEQ ID NO: 339976

SEQ ID NO: 470481 - DNA, 1000 bp, Homo Sapiens; identical to SEQ ID NO: 339977

SEQ ID NO: 470482 - DNA, 1000 bp, Homo Sapiens; identical to SEQ ID NO: 159294

SEQ ID NO: 470483 - DNA, 1000 bp, Homo Sapiens; identical to SEQ ID NO: 339979

SEQ ID NO: 470484 - DNA, 1000 bp, Homo Sapiens; identical to SEQ ID NO: 339980

SEQ ID NO: 470485 - DNA, 1000 bp, Homo Sapiens
gaaggttcactgtatgttttaatcaggctcagactgaaataaaagtagtcaattgaaaccccaacctggaaagccatccctgctatggctgtgatttcatcatttcggcatcccgaaacattcacttagagcaacatccatgtaaacagttcgacatatggtcccctgctgtggatctgtggctagtaacagcctgggagcagcagacagacaggggacacttaaacctcagaaagcaatagcagcctctgacgccttgctcaaggcttctcatctggtggctcagtgagactttgggaggtggaagtggtgaaagtggaaagccatgaagacatagctgtctttgcactggaaaaagctcctccaactgactggccaacagcttttcctgtttgtacaacattccggctagttgtgaccatgacgtttccaatttttttgccacgttcactattctgaacagaatgtgagaaccttaacttcatgtctgatactgagtattggccttgaaatggatggtttggatttatttctgcaagtgctggatgcttgttgctgttccacaccctgtagttgtgagtattcttccatgctgtaacaaaagttgtcccatagtccgataatatcttttcattgtctaattgcagcgtggcagccagcagggcatgaatgtagaccgcaaactgggcccggatccattcgtcacctccctcccagcccgtgccatctaggaagacgtcatcccgattctcagtcacgtgcctcactaggtagtctgcgaaccttaggtctgcagtggttgggttaagcagcttcctgagttctggatcatggatctggatcagagcttcttctacttccacaatggcatcactgaggtgtttctgttgtcgaaaaaggatgttagtagctccagcaacaaacccccgaacggtgacatcggagagaagatgatgctgctgcaatgccatgtaaggcaaacacagatatccctttgtga

SEQ ID NO: 470486 - DNA, 1000 bp, Homo Sapiens; identical to SEQ ID NO: 339981

SEQ ID NO: 470487 - DNA, 1000 bp, Homo Sapiens; identical to SEQ ID NO: 339982

SEQ ID NO: 470488 - DNA, 1000 bp, Homo Sapiens
caggcagaatttcaaagttttatggcaacttttacagaaatcacagaaaagagacagcgactgatgatgagctgggggagagaagggtagcgggtaacgggtctgggatgttggggctgagcacaacaggacgatagaatgctgaaaacctgtgggaagcagaaagttatgggggtagttgggtcatcctaggggcccaaggagtgggtggcactgcccaaatgtgtcctttgggcaggaaacatcaacagtaagaaaatgcagatggcctaccgacagatggaaggcctccaaagttaaaaatgcccacccagatcccttggcccagtcccatccccccacccatccccaccccccatcaggcagagatgtggcagcatttgctggcttgtagcattggtcctctgggaccctcggtctcctcttcgagggtcctgcccggattggctggcactgagggcaaaatgaaccttccagattgtcaggggagatcaactggactcgctttgattcccggcctcctccccaaagctggttctcatggctgagggagtctgctgccctctcaaaagttgtctgtcacccccttttcccaagacatgcaccctcccgcgtcccccctcccccaaacacactatatacacacacaagcccctccctccaaggcgtggctgggctctcagaggtagtggagggcgagtgggggagctggaatgtctgaagttgcaggttcaaaatgtgcttcctccggctaagccctgggactgaaaccccaaacttctcccctcgtctccgagcctggagaatgagtgtcctcccaagaacccgagtggagggattggaaggaaaggtgtgcggcctccttgcgcgcacacccacccgctcctccccgccggggctgagcggagctccctgagggctggggggaagggctgggagctgagacggcctctgacagcctccttcgagggtcccccagggagggtgggttctgaggctc

SEQ ID NO: 470489 - DNA, 1000 bp, Homo Sapiens
cctttttgcaatcagtttctcaggttaaaaaataaattcctttatctttgtttgaaagagaagatcaccaccttaaacttcctaaatgttcatgagtcaaacaggatgataatatttaccccactgttatcatccctaccttttatttaatgtcatgagtatagggtgtggaccggaagaagcaatacagagtttcacagttgtgctgggtaattcataagttttgtatgtgcctgggatattagggttgtaaatcacaattaaagatgaaaaatgttaggagggaagtaaagcagaaagcccaaatcagacagtgaatcagggattaagtgggagtggtggaaaggcaggctaagaacatttacagagatagaaaatagcagagactctctcaaaacaagaattcattgttctagcattcaggaagtgtctatatagggtgtggaggaaaaaaaaggagatgtgggacatttcagagcagacactgcccagactagatcttttatccttccatgcacatgcacatgtacaccttagttccattataagcttttggtgaaaaaagtaaagcattttattgaaaaagcctcacagttctgactctttgtcattttcatccaggtagtattcatcatctgtggttgtgtctgtgtcacaatctgagtccactgggtcatcctcatagatattaagcggttcacttggagataagccatcttctggcacctgactactgggagaatttgagcttaatgactctgaggggttgggagggttcctcaaatcatcttttaggaagccagggttcttaagaaaacttggtttccataatcttccttgtgtaagtgacctctttacattttctaagaaagctaactgttgttctttcccaaagatcccatagtcgataggtctgtatatagatattgcagacctgggacctgtttttgtcccgctgcgataagcccaactttcatttccatcacaggaggggagttca

SEQ ID NO: 470490 - DNA, 1000 bp, Homo Sapiens; identical to SEQ ID NO: 159295

SEQ ID NO: 470491 - DNA, 1000 bp, Homo Sapiens; identical to SEQ ID NO: 339984

SEQ ID NO: 470492 - DNA, 1000 bp, Homo Sapiens; identical to SEQ ID NO: 159296

SEQ ID NO: 470493 - DNA, 1000 bp, Homo Sapiens; identical to SEQ ID NO: 339986

SEQ ID NO: 470494 - DNA, 1000 bp, Homo Sapiens; identical to SEQ ID NO: 339987

SEQ ID NO: 470495 - DNA, 1000 bp, Homo Sapiens; identical to SEQ ID NO: 339988

SEQ ID NO: 470496 - DNA, 1000 bp, Homo Sapiens; identical to SEQ ID NO: 339989

SEQ ID NO: 470497 - DNA, 1000 bp, Homo Sapiens; identical to SEQ ID NO: 339990

SEQ ID NO: 470498 - DNA, 1000 bp, Homo Sapiens; identical to SEQ ID NO: 159297

SEQ ID NO: 470499 - DNA, 1000 bp, Homo Sapiens; identical to SEQ ID NO: 159298

SEQ ID NO: 470500 - DNA, 1000 bp, Homo Sapiens; identical to SEQ ID NO: 339993

SEQ ID NO: 470501 - DNA, 1000 bp, Homo Sapiens; identical to SEQ ID NO: 339994

SEQ ID NO: 470502 - DNA, 1000 bp, Homo Sapiens; identical to SEQ ID NO: 246503

SEQ ID NO: 470503 - DNA, 1000 bp, Homo Sapiens; identical to SEQ ID NO: 159299

SEQ ID NO: 470504 - DNA, 1000 bp, Homo Sapiens; identical to SEQ ID NO: 339997

SEQ ID NO: 470505 - DNA, 1000 bp, Homo Sapiens; identical to SEQ ID NO: 339998

SEQ ID NO: 470506 - DNA, 1000 bp, Homo Sapiens; identical to SEQ ID NO: 339999

SEQ ID NO: 470507 - DNA, 1000 bp, Homo Sapiens; identical to SEQ ID NO: 159300

SEQ ID NO: 470508 - DNA, 1000 bp, Homo Sapiens; identical to SEQ ID NO: 340001

SEQ ID NO: 470509 - DNA, 1000 bp, Homo Sapiens; identical to SEQ ID NO: 340002

SEQ ID NO: 470510 - DNA, 1000 bp, Homo Sapiens; identical to SEQ ID NO: 340003

SEQ ID NO: 470511 - DNA, 1000 bp, Homo Sapiens; identical to SEQ ID NO: 344006

SEQ ID NO: 470512 - DNA, 1000 bp, Homo Sapiens; identical to SEQ ID NO: 340004

SEQ ID NO: 470513 - DNA, 1000 bp, Homo Sapiens; identical to SEQ ID NO: 159301

SEQ ID NO: 470514 - DNA, 1000 bp, Homo Sapiens; identical to SEQ ID NO: 340006

SEQ ID NO: 470515 - DNA, 1000 bp, Homo Sapiens; identical to SEQ ID NO: 340007

SEQ ID NO: 470516 - DNA, 1000 bp, Homo Sapiens; identical to SEQ ID NO: 340008

SEQ ID NO: 470517 - DNA, 1000 bp, Homo Sapiens
ttttttttttttttttttagacgtgtaaaagtttagtattttgttcaacaatttaaaaaacagatataataccagcataaaatattgcatagcaaataatagattatgtttgtacaaaatccagtaagaaaaacataattttctcatttaggatgattcataaaatacattttgagcaacagcgataacgagggtcccacatgcgtagatggcagcaccagagccagacccaccaccacggagttcgcgctcacggaacccaggcctgctgggtgtcagcagcagctaagctggatgcaggtactacaaaatgaccagcgctcggtctctgcttcctcagccaagtgcacaggtcagccaggtgggcactgaagtgaaaggctgcagagaggcggggaggacagcctgcagggcaggaggggcacagacaggccccagctgggtgccgcaggaaggacgtcaccctcaagccctcactggtagatgaccttcacgcaaaatgcctcttcgtttttgtcctcatggtcattgatgtagatcaggatctcctcctcacccactctctgactaggcgcaaactgcaagccgatggtgtaggtctctccacccccgacctggaaggagtcctctctgaaccgcagcagctccgggtggtcgctgtgcaggtggaatgtcctccgggaggggtaggggttggtgtaggtgatcctcttgttgacacccttcccttcgcccgcagccaacatgatctcaaaggccttggagatgagcggctggcggcagcagaggcacacgagccaggaggccaccagctggtggcaatccacgtccaccaggttgagatggacaaagcggctgccggccctaaggggcctcacgccaacatgcaggtcctgcaccccacgaggcggcagcacgaagacacctttggggtctgtcttcagctcctggggatgagaggtgaaagctctcactttcctcactgtctgtgtcccccgaa

SEQ ID NO: 470518 - DNA, 1000 bp, Homo Sapiens; identical to SEQ ID NO: 340009

SEQ ID NO: 470519 - DNA, 1000 bp, Homo Sapiens; identical to SEQ ID NO: 340010

SEQ ID NO: 470520 - DNA, 1000 bp, Homo Sapiens; identical to SEQ ID NO: 340011

SEQ ID NO: 470521 - DNA, 1000 bp, Homo Sapiens; identical to SEQ ID NO: 159302

SEQ ID NO: 470522 - DNA, 1000 bp, Homo Sapiens; identical to SEQ ID NO: 159303

SEQ ID NO: 470523 - DNA, 1000 bp, Homo Sapiens
cttgttaaagcatccttccttacccttattttgaagtcctttattgtgtaagattttctacagaatagaatctatttctggctcttcattctttccatgaggtgtagattatttttacaccaatgtcgtatttttcttgctactttgtaatatgttctaatattacatattagagcaaaggaattaaataccgctcacaaaaaaggaaagagaaaaaaccccatacggttattgtgaaagcagatcagtggttgccaggggctggggtggggcggggggtggactagagggccacaggagaatgctgggggggtgacagaactgtatcttcattgttgggttcgttacataactctgcatttgccaaaactctaagtaagcccaaagcaaaatgaaaccatgagacccacctcctggacggatgagtgagccagctgggaactcccatggccctccagcctctcctctcgtgacataatcacttttgtttttgttgcaagaagcatcattctttttcttttctgaatccaatatggatgcctaagcccccacctgccaagggggatgggttatcaatatctgaaccgtcactgcagggcctgcgccctctttgcagaaacctcaacacttacattccgtgagtctcagagaaatgtacccagccccacagataggcttcctctgcctgctccatgctctgctgacccatgccaccatggaggcccctctgttgtccctagttctgtctgaacacttctggattctcttctgttctcttttccgcctgcctggccccagtcactatttggagcggccttcactacctctgacatgtgtggtctccctcccccacccacaggtaagccctatcagggcaggggaccgagggccttggccaccttggcttcctcacctgagaaggccccaaatacatcactggaacgaatggcagctgcccctggagtccctgtgcttggcacagacctggtgcccacggatg

SEQ ID NO: 470524 - DNA, 1000 bp, Homo Sapiens; identical to SEQ ID NO: 159304

SEQ ID NO: 470525 - DNA, 1000 bp, Homo Sapiens; identical to SEQ ID NO: 340013

SEQ ID NO: 470526 - DNA, 1000 bp, Homo Sapiens; identical to SEQ ID NO: 159305

SEQ ID NO: 470527 - DNA, 1000 bp, Homo Sapiens
aatcacccaaaatgtgtttattaagcaatttatggctcagggtgctcattagacatcgtacaaagggattttattgtgttacagattgaagagtacaagatagcaccaaaagtaattcagtacatctgtgggttattcatatacaactgaggttaattagataacttccacataccctgcatttcaccaatcaacacaaagtcaggaggaaaaaaaactcacataactcaagatactgtcatgtaaagaatgcttcctgttagcaaatctgatctgacttagcagcaaggaatctttataaatatattcttctaactatgtgggtcttccatattttcaagtcccctggattcatgaaaatgttcagaaaaataagattttcttcgtagtagccatctatgagagctgtttgcatcttaataaactagaaatttatcttgaggaagctaagtccatcatctccccaagctaagaaacaagatttggcaaacagcatgtaaaataaggaggctgccttgaccttggaacaaggccctctcatattatacaaagacacccctgaatccagggacattctggctaagataaaattcttttttttccttttaaatgcaaactgatcacattgctccaaatgcagatatagttactatataatcctttgagctgacttaaagcagtttgctagttaatatcagtgaaaatcaaaggctaaatgaacatttcaaataattagagaaactacattcttctagaatgaaagtaatcttcttcttgactcctgccatcataacccaagcaccaggaccaagaatgttccacggctcatggctttatttgaaaatgaatagagtcgaatccgtcacattctggaccggcagttactatgtgatgtggcaaaaaagcagtgatccgttccattgttcaaaaatagaaatctctctggaaaacgcttttctaagagcctcaagagaagacctaacaaggaattaagcagtaa

SEQ ID NO: 470528 - DNA, 1000 bp, Homo Sapiens; identical to SEQ ID NO: 340015

SEQ ID NO: 470529 - DNA, 1000 bp, Homo Sapiens; identical to SEQ ID NO: 340016

SEQ ID NO: 470530 - DNA, 1000 bp, Homo Sapiens
tttttttttttttttttttttttttttttttttttccttttttattttattagaaaataaagtgtttattcaaagaacattaaaaggccgggacctgtgtggggttggcatgagggggaggagcgaatctcgggctcagccaggctgggcatggggctcctctccgtggagtatgggcctcagggaggctggggtgggaggccccagggtccggcaggagggcagggggtggtcagccagcaccagggcgcagtgtagagctggggcagcagcatttgcgggttcagcagctcaccaggtacatccctgtggcaaacctcctcttcaccagcgacatgcggtaaccgctgcccaccagttccaagtccacgcccgacagagtggtcccctcgctggtgaactgtgcagccacggggctgggtgtgctgggccctgagagcggctcccagctggcagagaggcggccagaaccgcctgcctcggacacatctggaagcctccaagtgagccgcttctcctccaggttccaggtggcagccggctgcaagcggacgttggtcacaggctcccccacaggcagcaggatctggacgttcgtgagtggtgtgggcacagccgtggcaccgggccggtagccgtactccactgagacctgggtgagggtggctccacactgccagtgggcactgagctgcagaggcacagactggggacccgggcgggagaactggtatcgcagcagcaccacgttgtagtaggaggcagtggggttctgctctgcctggcgctgcagggcttcggtcagagctgccatgttgagccagaagtctttggtctcagggtcactctgggaggggtcactgaacagcagatcggcgttgggctggaagtgctcaatagcggttgtgtgtacaagccggaagctgaggacaggtggtggtggggtcccgctgaacacacgcacgatgccagcagggaaggtcatggtcagctccccagt

SEQ ID NO: 470531 - DNA, 1000 bp, Homo Sapiens; identical to SEQ ID NO: 159306

SEQ ID NO: 470532 - DNA, 1000 bp, Homo Sapiens; identical to SEQ ID NO: 159307

SEQ ID NO: 470533 - DNA, 1000 bp, Homo Sapiens; identical to SEQ ID NO: 160789

SEQ ID NO: 470534 - DNA, 1000 bp, Homo Sapiens; identical to SEQ ID NO: 340021

SEQ ID NO: 470535 - DNA, 1000 bp, Homo Sapiens; identical to SEQ ID NO: 340022

SEQ ID NO: 470536 - DNA, 1000 bp, Homo Sapiens; identical to SEQ ID NO: 160545

SEQ ID NO: 470537 - DNA, 1000 bp, Homo Sapiens; identical to SEQ ID NO: 159308

SEQ ID NO: 470538 - DNA, 1000 bp, Homo Sapiens; identical to SEQ ID NO: 340024

SEQ ID NO: 470539 - DNA, 1000 bp, Homo Sapiens; identical to SEQ ID NO: 340025

SEQ ID NO: 470540 - DNA, 1000 bp, Homo Sapiens; identical to SEQ ID NO: 159309

SEQ ID NO: 470541 - DNA, 1000 bp, Homo Sapiens; identical to SEQ ID NO: 340027

SEQ ID NO: 470542 - DNA, 1000 bp, Homo Sapiens
ttttttttttttttttctttttttttttttttttttttttttatggggttaaatgtttattaaatcaagcttttaaattatatatccacctacagtctataaacaaatatagtacacatgtatgtaaaaggctagcagataagaaccagtggaaaaactaaagttccctttgcacaccggcacctcatcacaacaccctcttggtgtggatgccatggggccatgctgtagtcaaaagttaaatgaaaaaccacaagtttagtttgactccgtctcctagggtggatttcattcagatatttgttccatattataggagggtggatcctagcaaggcaacagtgtagtttttacattcacagattggctgaagtagtacaaattgagctgctaatctaggtgtctccctccctgttaccatacttcataagaaatgtgaattaaaatgaacaatggaccacaggtggttataaaaatagataactcgcagagtcataaatatctacagttagtagagcagaaacttctaaaatttacctttttccataatgtgcagaatatcctaagtatgttcaagagacacagtcagcagacttcagagtggtaattacaagggcatttgtaaagaaataacactcgagtacaaacccagagtaagaagctgaatgcagatgaaaatacgcaaaacacgcaaagttccaactcctcacatctcattatgctacttactagacaccacaattagcttacagccctttatatatcttttaaagtaactttttgttacctgtgtacaaactttaacaaagatttttcatgagacaagcaaagtgggttaatggtggcgctaaaactgctgaaacttggagtgttttgtgtgctttcgtatacttctgtgtatggggctttaaaatgctccaaaaatgttttggatagagtttttaaaattcccatgaaaatctattttataatcatttcaaggtatagaaaaaaagaaatc

SEQ ID NO: 470543 - DNA, 1000 bp, Homo Sapiens; identical to SEQ ID NO: 340028

SEQ ID NO: 470544 - DNA, 1000 bp, Homo Sapiens; identical to SEQ ID NO: 159310

SEQ ID NO: 470545 - DNA, 1000 bp, Homo Sapiens; identical to SEQ ID NO: 159311

SEQ ID NO: 470546 - DNA, 1000 bp, Homo Sapiens; identical to SEQ ID NO: 159312

SEQ ID NO: 470547 - DNA, 1000 bp, Homo Sapiens; identical to SEQ ID NO: 159313

SEQ ID NO: 470548 - DNA, 1000 bp, Homo Sapiens; identical to SEQ ID NO: 159314

SEQ ID NO: 470549 - DNA, 1000 bp, Homo Sapiens; identical to SEQ ID NO: 340033

SEQ ID NO: 470550 - DNA, 1000 bp, Homo Sapiens; identical to SEQ ID NO: 159315

SEQ ID NO: 470551 - DNA, 1000 bp, Homo Sapiens; identical to SEQ ID NO: 246505

SEQ ID NO: 470552 - DNA, 1000 bp, Homo Sapiens; identical to SEQ ID NO: 159316

SEQ ID NO: 470553 - DNA, 1000 bp, Homo Sapiens; identical to SEQ ID NO: 340037

SEQ ID NO: 470554 - DNA, 1000 bp, Homo Sapiens; identical to SEQ ID NO: 159317

SEQ ID NO: 470555 - DNA, 1000 bp, Homo Sapiens
tttttttttttttttttttttagagcttaatggaattttattttgaaaatatggcaagagtctaaggcacttcaaacatttaaatacatagaggaccaaagtaaatgtgacacggtaaaaaggaatccataaatacaaagagaacactgtgtttctctagaggcaaatacagagccgattcctctaacacaatccaacctttagcattggagttgtgcaattaatacaaatgatgatgttacgtgtagttcttcatggctttagtatggaatacaaaagctgaaaatactgtgtcaagttcatatagataccctttttataaaaagtcatatattacatctacctagttaagaccaaatgagaatattcttttgtaagttttatactttgtctggcccaggcccaagttaccaatgatcaaagtcatctcgacttccttattttaaaataagacaaaagaaaaatccaaaactatgctggaatgagattttggaagaactttctaatggttccacatttagtacatataaatatttgtggaaaaatcttaaaacgtctcagtgagaaccagacaccactttgtgggagtgaacagaaggtgccccttcagatcagaattccctgtgactgtacaaaacggagcagagactcaacagcaacagagactgggttaaagtgtgccctacacagaagacggccagaaaggaggtgtgtgtgcccaggctagcagtctctgcactgtgaaagcttcagcctttacccctgggcttgatgcttctgtttgctggtgagctcaggcacaatacgtatacattcagtatctgtcaccccaacaggaacaattagcagcttaatagtggcatgtaaataaagggctatttgcatacaatcaatcaaatgaacctcggtgggtggggccaggagacgtcttccttccaagcctaggggtgcccggagactgggcttttgcaaagttgacatgggcatacagaagaacagc

SEQ ID NO: 470556 - DNA, 1000 bp, Homo Sapiens
ttttttttttttttttaagattccagctttttttattttttccccttttacacaaaacaaagtagaagaaataatacaggattaaaactgcaaaagtagttaatcagtagaatatgtatgcacacaaaaaatccagataggaagacaggcttatttacaatgaaagtaaggtaaaattaacgtagttttcttatgaaataataaaaaaaaatcaaacatatgctacaatgggcaccactgttcacagcaatattaaagaggagaaaacaacacttatttaatagggacagatataccacaaggtacaacatcagtgcaataaattcacaaaactatattacagctagttaatcagtttaagaattgttcccgtcagtcacattttttggccctcagaagttcattcctaaagatttcaactactctaaatttctagctaccaagaagttaagaatgattataagaagctttccaaggagttatgaaatctttgtagaccagaggccaactatcatcacctcaagtctgctctcaccaacagcccttgtatttttcagggagaaatctctaggaaaaaagtcagacaccagtgtagtcactatctcccatgtcaaacctaggggactaaaatggtcagtattaccataaaatgataattttgaggtttaccttaaaaggcttattctggtctcaaaaattagataagattatcttctactgaaatgaatattgactaaacatagaagactgctgtccttttgccagtcttagagtgaaagtcatagacatgagtcttaacctactgtatactatagctaatgtcagctgaaaatctgaaattaaaagcatgctagaaatcctaaatgcaatcttttggaagtctgctattaaaaagcctttaaggatttactaacttcgagtctaagtgcaaggggacgaaagcttaagcctgtcagacattccttttcttggacaaaaagatcaaagtttcctacaaatt

SEQ ID NO: 470557 - DNA, 1000 bp, Homo Sapiens; identical to SEQ ID NO: 340039

SEQ ID NO: 470558 - DNA, 1000 bp, Homo Sapiens; identical to SEQ ID NO: 340040

SEQ ID NO: 470559 - DNA, 1000 bp, Homo Sapiens; identical to SEQ ID NO: 340041

SEQ ID NO: 470560 - DNA, 1000 bp, Homo Sapiens
ttttttttttttttttttttaaaagtcacactagataagacatctttattacttaatctttaaaacagtcacttgcctattcaattctgaaactgtttgttttctttccctcccccgcactcccgctctgatacacaaacttgttgtaaaaataatgcagaaacatatacgtcaatctaagtctctgaaatatggccaactctacctcgccgtatatccaacattaaaaagaaaaaaaaaggctgtttaagaatagaactcattcccggtttccaccaaattatttccctaattcttaaatcctcaaataagttcttaatctccaaagtctcggttgtgggaaaaacattaatttgtgcagtccaacacttacatactttcttgacggaagggcaatcctgtccctttaaactcaatgaaggcagcggccaggtccttctgagtccccgtataattgcctagaacttaacatttagtattcatagtccttggtttacagacgggtccgacagttagaaactattacttcctcctctttcctcctgggcgctgtcctccttttctcttgccacccaagccaggcggcccagaattcatcttgcctcccaagccccctttcctcttccctccctggctgggcgggccccctttcctcttgcccccaggcccctgccggcctccctttctcttgcccttctggctcattttcctcctcttggcggcctcctcctggtcctcctccctcatctgcttattggtggccctagtcacatccagctgaggcttcttgctgttcatgacacgaagcagctccaactggttctttttctcggctgcaaagtccccgaaaaggggttgaaacttccttttcttgccggagccccggggcaccttctccttggggaggcgctcctgaaagcgccccacagaggcggtggagaccttggccacttgcatggcgcggcccagctcctccttactctggtgtccggtagggtgc

SEQ ID NO: 470561 - DNA, 1000 bp, Homo Sapiens; identical to SEQ ID NO: 340042

SEQ ID NO: 470562 - DNA, 1000 bp, Homo Sapiens; identical to SEQ ID NO: 340044

SEQ ID NO: 470563 - DNA, 1000 bp, Homo Sapiens; identical to SEQ ID NO: 340045

SEQ ID NO: 470564 - DNA, 1000 bp, Homo Sapiens
gttttttggaaattgttttattttaaaattaccttcccaacaaaccatgaaacacttggatgttactttatggtttttcattgaaaacatactacattgtaaatggtatttcaaagtcagacatagaattgatcaaaatctaaggacaatattatgtaaggacaatattaaaaatggatagaaaaagcttcatttggtgaggttaatctaaaggatgcataaccatgtcacggtggacggataaaaaaggtgataaccttgtgcttttattcaactaaggtacttactaaaaccttaggttttatacaggtgttaagctcccacctggaaagggacagttttctatattacacctaaatttactttaaataactgaagcccaaggaaacagttgtttaaaagaacttaacagtcagatagctacataatttagtaaattaaaatacaactaagacagtgataattgaatgtctcaaaactatacaactggggaaaataaccactgtacacaatttggaggttgttaaagcgaccactcaggaggttgaacagtgcaagacatgcttttccagttacaagctcaaaataggagtgcaaacaaaattaaagcttttgtttaaagttgtagggtaaggaaagcttgaaactaatattaaaaagcttccctcaaggtcatcctccagaaatgaaataatcaaaatgctttttcatggtacaattttcctcaatgaactttgctgcaatggcaaaactgcatcccgcaagtcgagtcccctactcactcaccacatctgatcaatgatcacatggtggtgagcaaagaggagtattagctcccagaggtccaatattgatagaaagagccttgaaatttggggttctgccttagccagtgtacctgaaccctacagagagcagataaagcaatgggctttaatagtctcttgttcctataaaactggaggacaaatggatgaacaattccccctctagaggcaag

SEQ ID NO: 470565 - DNA, 1000 bp, Homo Sapiens; identical to SEQ ID NO: 159318

SEQ ID NO: 470566 - DNA, 1000 bp, Homo Sapiens; identical to SEQ ID NO: 340047

SEQ ID NO: 470567 - DNA, 1000 bp, Homo Sapiens; identical to SEQ ID NO: 161122

SEQ ID NO: 470568 - DNA, 1000 bp, Homo Sapiens; identical to SEQ ID NO: 340049

SEQ ID NO: 470569 - DNA, 1000 bp, Homo Sapiens; identical to SEQ ID NO: 340050

SEQ ID NO: 470570 - DNA, 1000 bp, Homo Sapiens
gattacatatgtttattattattaaaagaaatttgacaaaaatatctttaaaatgataaatataaaacattaaatggctattactattttcttcctttttttttacacagtggcattacattaaagcccagaaaatttacagagaccattaaaaaaaggcattttgctaacaaataagaaggcaatttaaaataaaaccagtgaacatcaaaattatatttaagtctaacttgaactcttaaagacaaactatgcaatacaaagctataaaatatataaaagcaaatctataatatgttggatgccctccctactttggatgtaagatacatttttttctgtgcttaaataatacaattattttgctttatgaaaatgtgtaggaaaacattttaaaagaaaatgtgttttacctccctataaatggacatatgggcattatggtataagtcatacaaaacatgttaatgaaacattccaagtaaaataaagaacatatgaattttaatggtttagatctgactcatcatcatcatcatcatcatcatcatcatcactactgctactgtgagtcataatccactccctgtagaattgaattttctgtaacatttgatttccagtcccatccctcaacctgtacggtctgataactccatcttcattgaagaaccgaggaggtcgcagactctccacttcagaagtctctgtagctctttttattccctgaaatgtactgctagccatgtctatgatgcctccagttggccttgctaccgctcctactaaacctttcccaacacctttaaagaaaccagctgctcctcctttttgagctcctttgattggttttgtaacaattcctgttatgccactaacaaatccagaaactaagccttttcctccacgagtgatgccttctctaaaaccagctggttgcttattcatggcttctcttctcttctgttggtagtcttcatccatggtcatagctgctacc

SEQ ID NO: 470571 - DNA, 1000 bp, Homo Sapiens; identical to SEQ ID NO: 159319

SEQ ID NO: 470572 - DNA, 1000 bp, Homo Sapiens; identical to SEQ ID NO: 340052

SEQ ID NO: 470573 - DNA, 1000 bp, Homo Sapiens; identical to SEQ ID NO: 340053

SEQ ID NO: 470574 - DNA, 1000 bp, Homo Sapiens
ttttttttttttttttttttttttttttttttttttttttttgaagtttcagtgttttattaacaaaatcttacaaaaagagtctgtctctggggtaaggtgcacagggcctggaccgacatttaaggcctggtctgtgtggggcaaggggcaggggttggccacagcctcatgaggtttccagggtcttcacaggctccagggcttccccaaagcctgtgccagccttgaggattggttatggcttatgtgcaaaaataaaatctgtggggctggcagggtgtgggctgaagacttgtcagagtggtctgcagggctggtcccccagtggacaaggcagaacgatgaaccctgagccagcacctgcttaggctgcagacgctagtggcccaccagcaccagggttctggtgtcggggcagggcagaatgcctggaagcgccccaggagccatggcttctgggatgtccttcctgcagctgagctcagggctgctgggcaggggtaggagctgtggccccagccttggggctcatgaaagcctctggcagagaggatggcctggcagcgggcggggtttccctgctgggagggaggcagggcccgactcctgctgcagtggctctggggacgggcagctggcggccagcggggcgggcttagtggcaggccctggtcctcgcgctggcgctcagggctaagctggggctcctgccctctgctgcagccgactcctctctgtagcccccctctgggctgtcctgggacttcgcctcccacgcaggcagcctgcaaggtgaggggtgggtggtgcccagcacagcagcaaagactttgtgggaaccttgagacctgttgtcactctcctggctctgatggtgccagctgctgcctcagccggatttgaggactcagcccctctgggaccctccgcctgccatgggtgagtcatgagctgagctctgattcttctccaggcgggcgtgaatcactggagctga

SEQ ID NO: 470575 - DNA, 1000 bp, Homo Sapiens; identical to SEQ ID NO: 340054

SEQ ID NO: 470576 - DNA, 1000 bp, Homo Sapiens; identical to SEQ ID NO: 159321

SEQ ID NO: 470577 - DNA, 1000 bp, Homo Sapiens; identical to SEQ ID NO: 159322

SEQ ID NO: 470578 - DNA, 1000 bp, Homo Sapiens; identical to SEQ ID NO: 340056

SEQ ID NO: 470579 - DNA, 1000 bp, Homo Sapiens; identical to SEQ ID NO: 246506

SEQ ID NO: 470580 - DNA, 1000 bp, Homo Sapiens; identical to SEQ ID NO: 159323

SEQ ID NO: 470581 - DNA, 1000 bp, Homo Sapiens; identical to SEQ ID NO: 340059

SEQ ID NO: 470582 - DNA, 1000 bp, Homo Sapiens; identical to SEQ ID NO: 159324

SEQ ID NO: 470583 - DNA, 1000 bp, Homo Sapiens; identical to SEQ ID NO: 340061

SEQ ID NO: 470584 - DNA, 1000 bp, Homo Sapiens; identical to SEQ ID NO: 159325

SEQ ID NO: 470585 - DNA, 1000 bp, Homo Sapiens; identical to SEQ ID NO: 340063

SEQ ID NO: 470586 - DNA, 1000 bp, Homo Sapiens; identical to SEQ ID NO: 340064

SEQ ID NO: 470587 - DNA, 1000 bp, Homo Sapiens; identical to SEQ ID NO: 340065

SEQ ID NO: 470588 - DNA, 1000 bp, Homo Sapiens; identical to SEQ ID NO: 159326

SEQ ID NO: 470589 - DNA, 1000 bp, Homo Sapiens; identical to SEQ ID NO: 159327

SEQ ID NO: 470590 - DNA, 1000 bp, Homo Sapiens; identical to SEQ ID NO: 340067

SEQ ID NO: 470591 - DNA, 1000 bp, Homo Sapiens; identical to SEQ ID NO: 159328

SEQ ID NO: 470592 - DNA, 1000 bp, Homo Sapiens; identical to SEQ ID NO: 340069

SEQ ID NO: 470593 - DNA, 1000 bp, Homo Sapiens; identical to SEQ ID NO: 340070

SEQ ID NO: 470594 - DNA, 1000 bp, Homo Sapiens; identical to SEQ ID NO: 340071

SEQ ID NO: 470595 - DNA, 1000 bp, Homo Sapiens; identical to SEQ ID NO: 340072

SEQ ID NO: 470596 - DNA, 1000 bp, Homo Sapiens; identical to SEQ ID NO: 343605

SEQ ID NO: 470597 - DNA, 1000 bp, Homo Sapiens; identical to SEQ ID NO: 159329

SEQ ID NO: 470598 - DNA, 1000 bp, Homo Sapiens; identical to SEQ ID NO: 159330

SEQ ID NO: 470599 - DNA, 1000 bp, Homo Sapiens; identical to SEQ ID NO: 159331

SEQ ID NO: 470600 - DNA, 1000 bp, Homo Sapiens; identical to SEQ ID NO: 340076

SEQ ID NO: 470601 - DNA, 1000 bp, Homo Sapiens; identical to SEQ ID NO: 159332

SEQ ID NO: 470602 - DNA, 1000 bp, Homo Sapiens; identical to SEQ ID NO: 159333

SEQ ID NO: 470603 - DNA, 1000 bp, Homo Sapiens; identical to SEQ ID NO: 159334

SEQ ID NO: 470604 - DNA, 1000 bp, Homo Sapiens; identical to SEQ ID NO: 340080

SEQ ID NO: 470605 - DNA, 1000 bp, Homo Sapiens; identical to SEQ ID NO: 340081

SEQ ID NO: 470606 - DNA, 1000 bp, Homo Sapiens; identical to SEQ ID NO: 340082

SEQ ID NO: 470607 - DNA, 1000 bp, Homo Sapiens; identical to SEQ ID NO: 159335

SEQ ID NO: 470608 - DNA, 1000 bp, Homo Sapiens; identical to SEQ ID NO: 340084

SEQ ID NO: 470609 - DNA, 1000 bp, Homo Sapiens; identical to SEQ ID NO: 340085

SEQ ID NO: 470610 - DNA, 1000 bp, Homo Sapiens; identical to SEQ ID NO: 159336

SEQ ID NO: 470611 - DNA, 1000 bp, Homo Sapiens; identical to SEQ ID NO: 159337

SEQ ID NO: 470612 - DNA, 1000 bp, Homo Sapiens; identical to SEQ ID NO: 340088

SEQ ID NO: 470613 - DNA, 1000 bp, Homo Sapiens; identical to SEQ ID NO: 340089

SEQ ID NO: 470614 - DNA, 1000 bp, Homo Sapiens; identical to SEQ ID NO: 246507

SEQ ID NO: 470615 - DNA, 1000 bp, Homo Sapiens; identical to SEQ ID NO: 340091

SEQ ID NO: 470616 - DNA, 1000 bp, Homo Sapiens; identical to SEQ ID NO: 246508

SEQ ID NO: 470617 - DNA, 1000 bp, Homo Sapiens
gatgtcaatattcaattattaactttaatgtgcaaataaatagaaaaggaaaactacattcaaaacagctgcaaaggaaggacaagccccagaacagaaattcctcaagaacggaaaagaggcgctccctagaagcatgcggggatgggaatactgggaggaggggctcggcggggtctccggctgcacccggggcccaggtggctctgcccgagacggccgtgggcctggtacaggaatcttgatggcaagttcccttcttagaaaaccaggatgtgtacaaagtgcctgtgtgacacttggggagcgggggtggggagcccaggaggacgggtcagcatcggaatcgcccagcctggagtcaaaggcatcaggagcctccaggttccacaggaaacttctagaaacacatctccacttcctggaaacttgagtccagctgttgcaggatggcaagggtggcggttattctgggcctactggtgtgcaggggccagggccaggggctctcatggtcggggagagaggcctggagaagtggtccccagccccagtcacttgggattcttggcacagaaagccttggatgcctccatgggacagtcgcctcagcccctcacaaaaggacaacaatgatccctggagtggccgcgtgggtcccagggtgggtgggcggatggggctccttgggtggcggctgggactgtcagggcggctctcggagttccacaaagggagatctcagccccagggagccgcaggacttggctgctacagaaataacaaccactaaaagcgaaaggaataaatatctgtgcgtgtatacacatacgcctagggtgcccactgcaggaacacgactgggcccgccgccccacagcagggtcgtgccggctctgagggaatactggctggggtccctccccttgtgggcccagagtccagctgctggagttggggttgggtgtcttatccagagcggggtctcccagggcactgc

SEQ ID NO: 470618 - DNA, 1000 bp, Homo Sapiens; identical to SEQ ID NO: 340094

SEQ ID NO: 470619 - DNA, 1000 bp, Homo Sapiens; identical to SEQ ID NO: 159339

SEQ ID NO: 470620 - DNA, 1000 bp, Homo Sapiens; identical to SEQ ID NO: 340096

SEQ ID NO: 470621 - DNA, 1000 bp, Homo Sapiens; identical to SEQ ID NO: 340097

SEQ ID NO: 470622 - DNA, 1000 bp, Homo Sapiens; identical to SEQ ID NO: 340098

SEQ ID NO: 470623 - DNA, 1000 bp, Homo Sapiens; identical to SEQ ID NO: 340099

SEQ ID NO: 470624 - DNA, 1000 bp, Homo Sapiens; identical to SEQ ID NO: 340101

SEQ ID NO: 470625 - DNA, 1000 bp, Homo Sapiens; identical to SEQ ID NO: 159341

SEQ ID NO: 470626 - DNA, 1000 bp, Homo Sapiens; identical to SEQ ID NO: 340103

SEQ ID NO: 470627 - DNA, 1000 bp, Homo Sapiens; identical to SEQ ID NO: 340104

SEQ ID NO: 470628 - DNA, 1000 bp, Homo Sapiens; identical to SEQ ID NO: 340105

SEQ ID NO: 470629 - DNA, 1000 bp, Homo Sapiens; identical to SEQ ID NO: 340106

SEQ ID NO: 470630 - DNA, 1000 bp, Homo Sapiens; identical to SEQ ID NO: 340107

SEQ ID NO: 470631 - DNA, 1000 bp, Homo Sapiens; identical to SEQ ID NO: 159342

SEQ ID NO: 470632 - DNA, 1000 bp, Homo Sapiens; identical to SEQ ID NO: 159343

SEQ ID NO: 470633 - DNA, 1000 bp, Homo Sapiens; identical to SEQ ID NO: 343303

SEQ ID NO: 470634 - DNA, 1000 bp, Homo Sapiens
gcacagaaaacactgctttattaactgcgtttgccaacacacgaggagtgcaaagggctccctatgacacaagccctggtggggccggggtctggaagcccccatgagtgagcaggacaggatggggctgggaactatgcagcagcggcaacacagaatcatgcagggcacagcgggcactggccacacccaggtgaccatacattctattgctcgttaagggttgcgcacatggacaatgtacaaaaaggagaaataggtctttgcgttaatgaaaaatacattttttctctacaaaggaatcttttctaatacaagaaaataaatattgcaacataagccaaaaataatttaaaattgctcttttcaatatattttcaatatttctcttgtatattaacaaatggcacatcactttctttgaaacaaagacagaaggtgtctcctcctgtgacattcatatcatccccccaccgtcccctcaaactgacgtggaacacaaagtgtttgtgcctctgagggagaaagtggcaggaggtgccttaaagaacaaccaaaggtctcagactccagccctggctcattggccaatgtggccagcgaggccaagggcatgggagagtgccctccccaagggccttgctatagaaatccagatcatttttcagtggtttgcatatggacaaaggttggccacatctggcagttagcaaggaaatgccaagttcagccgctgccaatgttggttagaattgggcagttgaatctctaggaattgtcccagctagtcccagtgtgcccatacacagtatacacaggcatgcctgcatacggacacacgagacgtggcctggcacaccccccacaaacaattcaacatctatgtctggaaacctggggtggcttctccaaggaagctgaggcccttacattgcaaatgctcacacactgtcactaagtcaggctcatttaataaaataaacccttctacctttcttct

SEQ ID NO: 470635 - DNA, 1000 bp, Homo Sapiens; identical to SEQ ID NO: 159344

SEQ ID NO: 470636 - DNA, 1000 bp, Homo Sapiens; identical to SEQ ID NO: 340111

SEQ ID NO: 470637 - DNA, 1000 bp, Homo Sapiens; identical to SEQ ID NO: 159345

SEQ ID NO: 470638 - DNA, 1000 bp, Homo Sapiens; identical to SEQ ID NO: 159346

SEQ ID NO: 470639 - DNA, 1000 bp, Homo Sapiens; identical to SEQ ID NO: 340114

SEQ ID NO: 470640 - DNA, 1000 bp, Homo Sapiens; identical to SEQ ID NO: 159347

SEQ ID NO: 470641 - DNA, 1000 bp, Homo Sapiens
ttttttttttttttttggggggaaaaaaggtaaacctttatttggaaaaagagtttaaataacaatttaaaaccccatttcactttcaaaacagaaacaagaaagcaaggaaaagataatctatcaagcatctgccctctgctgtggttagccattttaaagctgcatttcccagcagaagagaacagtgatgggccctagtcctaggaacccacagggcactgtcttgagacccttttaggcagtgtccagggaacagacagacagaatgaatggtggggtgtagacagacctggggctcagacaggcacatgcccagtacccaggaaacaaagtttgaaaatatatacacatagaaaaataaattccctagaacctaggcatggaaagcttctaaccatgaatgcagcagcacaatgcaaactgggtctttggctttcaaaaaaaggaaagaaccttaacccctggcttactgtcccgaactcaagtctcttgaccactgtcttcagtcccactttggaggtcgagtgaggcaagagcaagtcaaatctaccagggccagcagccactctgacttagggagatgtgtggaggggctggcccaggatctcccaaggccacaccccagcaatgaaagattaaggcatgcaggtgacacagtgtggactaaggagtcccctgaataagccagggtacccttctgttaggggagggaaagcagacgcaacaagcagctgaggccttgctggacagagccaatccgcaagtactgccacttcaaattcttggaccagttttgtccaaggccacctttctgctgaggcagtttggcctgagctaaataccagggttttctagaaaggaaatggaagggaagcgggagatgggagatagcagaaagtaaaaagtggtggaaggagaggaacagaaaattgcttcttaggagtggagaggaaagagaatcagcttaggtcttcagtcccagctgaggcagctgaag

SEQ ID NO: 470642 - DNA, 1000 bp, Homo Sapiens; identical to SEQ ID NO: 340116

SEQ ID NO: 470643 - DNA, 1000 bp, Homo Sapiens; identical to SEQ ID NO: 159348

SEQ ID NO: 470644 - DNA, 1000 bp, Homo Sapiens; identical to SEQ ID NO: 159349

SEQ ID NO: 470645 - DNA, 1000 bp, Homo Sapiens; identical to SEQ ID NO: 340118

SEQ ID NO: 470646 - DNA, 1000 bp, Homo Sapiens; identical to SEQ ID NO: 160559

SEQ ID NO: 470647 - DNA, 1000 bp, Homo Sapiens; identical to SEQ ID NO: 159350

SEQ ID NO: 470648 - DNA, 1000 bp, Homo Sapiens; identical to SEQ ID NO: 340120

SEQ ID NO: 470649 - DNA, 1000 bp, Homo Sapiens; identical to SEQ ID NO: 159351

SEQ ID NO: 470650 - DNA, 1000 bp, Homo Sapiens; identical to SEQ ID NO: 340122

SEQ ID NO: 470651 - DNA, 1000 bp, Homo Sapiens; identical to SEQ ID NO: 159355

SEQ ID NO: 470652 - DNA, 1000 bp, Homo Sapiens; identical to SEQ ID NO: 340124

SEQ ID NO: 470653 - DNA, 1000 bp, Homo Sapiens; identical to SEQ ID NO: 340125

SEQ ID NO: 470654 - DNA, 1000 bp, Homo Sapiens; identical to SEQ ID NO: 159356

SEQ ID NO: 470655 - DNA, 1000 bp, Homo Sapiens; identical to SEQ ID NO: 340127

SEQ ID NO: 470656 - DNA, 1000 bp, Homo Sapiens; identical to SEQ ID NO: 159358

SEQ ID NO: 470657 - DNA, 1000 bp, Homo Sapiens; identical to SEQ ID NO: 340129

SEQ ID NO: 470658 - DNA, 1000 bp, Homo Sapiens; identical to SEQ ID NO: 340130

SEQ ID NO: 470659 - DNA, 1000 bp, Homo Sapiens; identical to SEQ ID NO: 159359

SEQ ID NO: 470660 - DNA, 1000 bp, Homo Sapiens; identical to SEQ ID NO: 340132

SEQ ID NO: 470661 - DNA, 1000 bp, Homo Sapiens; identical to SEQ ID NO: 159360

SEQ ID NO: 470662 - DNA, 1000 bp, Homo Sapiens; identical to SEQ ID NO: 159361

SEQ ID NO: 470663 - DNA, 1000 bp, Homo Sapiens; identical to SEQ ID NO: 340135

SEQ ID NO: 470664 - DNA, 1000 bp, Homo Sapiens; identical to SEQ ID NO: 159362

SEQ ID NO: 470665 - DNA, 1000 bp, Homo Sapiens; identical to SEQ ID NO: 340136

SEQ ID NO: 470666 - DNA, 1000 bp, Homo Sapiens; identical to SEQ ID NO: 340137

SEQ ID NO: 470667 - DNA, 1000 bp, Homo Sapiens; identical to SEQ ID NO: 340138

SEQ ID NO: 470668 - DNA, 1000 bp, Homo Sapiens; identical to SEQ ID NO: 159363

SEQ ID NO: 470669 - DNA, 1000 bp, Homo Sapiens; identical to SEQ ID NO: 340140

SEQ ID NO: 470670 - DNA, 1000 bp, Homo Sapiens; identical to SEQ ID NO: 340141

SEQ ID NO: 470671 - DNA, 1000 bp, Homo Sapiens; identical to SEQ ID NO: 159364

SEQ ID NO: 470672 - DNA, 1000 bp, Homo Sapiens
gtctataaacaagattttaatatctgtataaatagaccacagaattaccaaaactgcaaagacagagtgtggaaaacaggtttgaaacccgtgcatagagccctctgctgggctgccgcctctcccctggccggcagtgctgtggggaatgctggaaaggaaggaaagttcctctagggggcgtctgcagcgtgaggacctgagcacagaagactcggctccccatgcctgctgttgacctcttcatctagtataaaaataacgtcagtgggtggtggctggagtcgtggctactccgggaggggggtgacaggaggtgccctccattgtataggccctagcagccagcagcacccctgccagccagggtgcagtgtaggctggtggagaggggtaggtgggcagaacagcactgccctatctttgcatatgccggacaaacgcctgcaccaactggatcagaggctcctgactctcagggctggctttggagagagaggtggacttgccctgcggcgaggggaggacaccagtggcaggggagctgggggctccccggcggaagtagcgcgagaggctggacagcagcgtgctcaactcagagctgagctcctgcttcatccgctgtttgtcccgggggtgcacagccgggtccctaaggtaccgcatcgcctgagagatgagcaggtagaagcagttttccatggtaaacatcaggagggactttaacgtcctggtcccttctgcctgtgtgctgagccccactgcctgggtgaggggctcctttttcttgtccagctctccaagcatgttgagggccacattcactgtggccagaagggtcccgaaggagggggccacttcggagtcaaaggtgggagtggtaaagctcagggcaaacaggaagttgtattcagcaaggtccagggactgatccagcagaatctggcagacatctggggtgaagtggcgcagggctgccagcgtcttgctgaggatc

SEQ ID NO: 470673 - DNA, 1000 bp, Homo Sapiens; identical to SEQ ID NO: 159365

SEQ ID NO: 470674 - DNA, 1000 bp, Homo Sapiens; identical to SEQ ID NO: 340143

SEQ ID NO: 470675 - DNA, 1000 bp, Homo Sapiens; identical to SEQ ID NO: 340144

SEQ ID NO: 470676 - DNA, 1000 bp, Homo Sapiens; identical to SEQ ID NO: 340145

SEQ ID NO: 470677 - DNA, 1000 bp, Homo Sapiens; identical to SEQ ID NO: 159366

SEQ ID NO: 470678 - DNA, 1000 bp, Homo Sapiens; identical to SEQ ID NO: 340147

SEQ ID NO: 470679 - DNA, 587 bp, Homo Sapiens; identical to SEQ ID NO: 159367

SEQ ID NO: 470680 - DNA, 1000 bp, Homo Sapiens; identical to SEQ ID NO: 159368

SEQ ID NO: 470681 - DNA, 1000 bp, Homo Sapiens; identical to SEQ ID NO: 340149

SEQ ID NO: 470682 - DNA, 1000 bp, Homo Sapiens
ttttttttttttttttgtcttatccaaccatttataatctttattctataattctccaccagtgctagaattttcttcccaaatggcctcaattcggacactgaataaacgataatgaattttttaaagctgtgcttaaatataaacaaaataaaccgctaagtttttctggctccaagcacgccatatgaagcatgccaatgtcacttatgtgccctgatcacattcaggcaaagtgttcttcactttaaatactcctgtgttccattattgtttaagtaaaatcctatttcaaatgcctttgataacagagaaaccgcctgtagacaaactctttgaaagtgactgaattaatgtcttctgtgatgtcagatttccccactgggctcttttggaagcattcttcctgaattgaagtcactgtgaatatcctttagatttcatcttgttaactcagttttcagtcagagcagcacttgggcctgctgcccttcaaggcacagtgcaacaaatagtggttacgggatttccatcagccaaggttgacaactaacaatgtaaagagagctcgagtgtgggccaaggcatcggaccttacacctaacttaggacataggtcgacctatggattattagccagtgaatgcttttcttgtctaacagtctttaagggcacataagaaactcacgttaaattataccctgacatattattattccatgaaaacaaaacaaatcttccaaagtgcttgttttccagtagctctgggtcttgtctcaccacgggtacagaaaggtattgctccgaggctctgacagggctactgctcttgactaattgttcttgtctttctgcttttcatttgatgaggacttacacatagttacttgctgcagtttactatctctcaggtgcttcctatgggaagttcataaaccattcttccataaccttttgttgatcaccatttccattagggactcaataagacatgctcag

SEQ ID NO: 470683 - DNA, 1000 bp, Homo Sapiens; identical to SEQ ID NO: 340150

SEQ ID NO: 470684 - DNA, 1000 bp, Homo Sapiens; identical to SEQ ID NO: 159369

SEQ ID NO: 470685 - DNA, 1000 bp, Homo Sapiens; identical to SEQ ID NO: 340154

SEQ ID NO: 470686 - DNA, 1000 bp, Homo Sapiens; identical to SEQ ID NO: 340156

SEQ ID NO: 470687 - DNA, 1000 bp, Homo Sapiens; identical to SEQ ID NO: 340157

SEQ ID NO: 470688 - DNA, 1000 bp, Homo Sapiens; identical to SEQ ID NO: 340158

SEQ ID NO: 470689 - DNA, 1000 bp, Homo Sapiens; identical to SEQ ID NO: 159372

SEQ ID NO: 470690 - DNA, 1000 bp, Homo Sapiens; identical to SEQ ID NO: 159375

SEQ ID NO: 470691 - DNA, 1000 bp, Homo Sapiens; identical to SEQ ID NO: 159376

SEQ ID NO: 470692 - DNA, 1000 bp, Homo Sapiens; identical to SEQ ID NO: 340163

SEQ ID NO: 470693 - DNA, 1000 bp, Homo Sapiens
tttttttttttttttgtatttttagtagagatggggtttcaccatgttggcccgtctggtttgaaactcttgacctaggtgatctgcccacctcagcctcccaaagtgctgggattacaggcgtgagccacggcgcctggcctccttccttcacttttgaaattaaagcctctttgcaagtcctgctctgagaaatggtcactgcacatggtaaagaggccctgagccccatggccatctctcttggtgaggggtggcgggcccgggtgctgtctgagatgccagctcaggagggctccatcctggctctgctgccccagggccggcgttcccggagggctccaggttcccggttctagtcctggaaaggcagaagggagaggggaagggaagggtgggaggggcctctgggaggtgcagccccaccccatgccccacaccccgggactcctcgcagacggggacacgtgtgggagtgtccgcggagcttcacatttcagggccgtctcagccagtgcctctgaagtggccgcagccttggggccaggttccctcctgagtccacctgggccacattgctcccacggtgcacactccagcacaagaatggctcagccttgatcccccaaactgggcaccgtccctgcatgtaggtgtgtgggggggcctcagcagcagacggggccatgggcctctggtggggcactcggctcctgctcctgggacgagctccggggggccctggtggcattggcccggacagagatatggtcccagcctcccccgatgccgtagtcccagccgtggcccttgggctcgtgaggctgcacgccggtgcgatgacacactgtcccccggctcaggctgtggctgccctgcactttgttggcgatcacccagacctggtccaggggccccacggacactcggcacacgttgttggacacgtgctcccagctggagccctgcgggtagctgggcgtgatcccttggcgatacc

SEQ ID NO: 470694 - DNA, 1000 bp, Homo Sapiens
gagaaaaggtaggctgcttctaccttcaaacagtcaagagcaacttctgttgagttcaccttgctgctgacccagaagttggagcaggggccaagctaaggggtgcagaaaggctaacagtacttgctgtaaaaagaagtcatcttcagtcatcctggggagattcccttgcccctctctcaacttgagtgcttttagcttcatgcaggaaagattttagttgcatcttttattaaatttcaatctcgttttacaaaagcataccaactagcagtcctgagcaactagtatgaaatttgctgaatacagctaacagaaagctttctaaactatcctgttctttgtttctttctacaggggtgtctgtagaatattctttagtttcacagtgatatatgctgtttcaggaagcacaaggtattctgtttctgggaagtgatgacctacttttagtttgagcacaagtttccatgactggttctaaatctggccagatattgctaataccaatgacaggagttagggcaattgggaggctcttggtccccagttcctgtcaagggtaagcccatctgggtcatggctgggctttcactatcagtagttatatttccctttgatgcttcaaaaagcctatggtgaatctgttgcctcactttacttctccatttgacttggaagcctgagaacttactgaattaggatgaaaaaaggctctgtacctgctaatattgacggcagtaagatgctagcttactattttgcacagcaccatgtatagtgcctgttaatcaggccaactatagccaactttttctttttttttctttttttttatataaagaaaatctatgtaagttgaggttcagaaatgcatatattttttacttacaaatattcatctgaccaaaattcaacataacctttatggaacacttaacaattgttttgtttttaaaataacatttcattcaaactgtatataattcagtaaagtttt

SEQ ID NO: 470695 - DNA, 1000 bp, Homo Sapiens; identical to SEQ ID NO: 159377

SEQ ID NO: 470696 - DNA, 1000 bp, Homo Sapiens; identical to SEQ ID NO: 159378

SEQ ID NO: 470697 - DNA, 1000 bp, Homo Sapiens; identical to SEQ ID NO: 159379

SEQ ID NO: 470698 - DNA, 1000 bp, Homo Sapiens; identical to SEQ ID NO: 159380

SEQ ID NO: 470699 - DNA, 1000 bp, Homo Sapiens; identical to SEQ ID NO: 159381

SEQ ID NO: 470700 - DNA, 1000 bp, Homo Sapiens; identical to SEQ ID NO: 340170

SEQ ID NO: 470701 - DNA, 545 bp, Homo Sapiens; identical to SEQ ID NO: 340171

SEQ ID NO: 470702 - DNA, 1000 bp, Homo Sapiens; identical to SEQ ID NO: 159382

SEQ ID NO: 470703 - DNA, 1000 bp, Homo Sapiens; identical to SEQ ID NO: 159383

SEQ ID NO: 470704 - DNA, 1000 bp, Homo Sapiens; identical to SEQ ID NO: 340176

SEQ ID NO: 470705 - DNA, 1000 bp, Homo Sapiens; identical to SEQ ID NO: 340177

SEQ ID NO: 470706 - DNA, 1000 bp, Homo Sapiens; identical to SEQ ID NO: 159385

SEQ ID NO: 470707 - DNA, 1000 bp, Homo Sapiens; identical to SEQ ID NO: 340178

SEQ ID NO: 470708 - DNA, 1000 bp, Homo Sapiens; identical to SEQ ID NO: 340179

SEQ ID NO: 470709 - DNA, 1000 bp, Homo Sapiens; identical to SEQ ID NO: 340180

SEQ ID NO: 470710 - DNA, 1000 bp, Homo Sapiens; identical to SEQ ID NO: 159386

SEQ ID NO: 470711 - DNA, 1000 bp, Homo Sapiens; identical to SEQ ID NO: 340182

SEQ ID NO: 470712 - DNA, 1000 bp, Homo Sapiens; identical to SEQ ID NO: 340185

SEQ ID NO: 470713 - DNA, 1000 bp, Homo Sapiens
tttttttttttttttttttttttttttttttttttttttttttttttttttttttttttttttttttttttttttttttttgattttaaatttcttctttattaaaaaaaaaaagcgtttttctgggttttttaaaacttctccaatacattaaaactttttttctcgccacatagcacttctttcttgcctctttcatttctgctcctggtgttgcctgcctcctgcaagacccagatgaagaaaccttttcaatggtcgagatctgagacttggagctggaggggctgaaggcttgaaggaaggtggttactggtcaaaaggagaagttcatttgcacaaaaatataaactggggaggatgagaccagcacatacacgtatggattgatctacaatccatataaaaaaatagacccaaattgtcattttacatttgcaatattatacaaaataatatatatttttaaacaacacatacccacctacacacacgtgcgcgcacacacatacacacaaggtgctagtgacccctctgtgcttctgcttgtggggacaagggtgtcagtaggcaaagatgacatggtaagtgacctggtggccattgtcccaggcatagagcaggcggtccttggggttgtagtctatctgggtcgtataggaatactcattctcgaacagcagcctggggacgatctgtgtgttggtgtgggtgtcgaaagcgtaggagatgttggcattccgctggttgtagctatccacggcatacagcaccccacagatgacgaagcagttgccgtagaaattcctccggagccccgtgcgccatgtggtctccttctgtgtgctcaggtccgcggcattgagcttgctcaggacaatgacctcctggctgaagccctcatcgtccagggccgggtagatgagccataggccattctcgtccacagcaaagtccacgtctgagtggccctgccatcgccagggggtggcctcctcgt

SEQ ID NO: 470714 - DNA, 1000 bp, Homo Sapiens; identical to SEQ ID NO: 340186

SEQ ID NO: 470715 - DNA, 1000 bp, Homo Sapiens; identical to SEQ ID NO: 159387

SEQ ID NO: 470716 - DNA, 1000 bp, Homo Sapiens; identical to SEQ ID NO: 159388

SEQ ID NO: 470717 - DNA, 1000 bp, Homo Sapiens; identical to SEQ ID NO: 159389

SEQ ID NO: 470718 - DNA, 1000 bp, Homo Sapiens; identical to SEQ ID NO: 159390

SEQ ID NO: 470719 - DNA, 1000 bp, Homo Sapiens; identical to SEQ ID NO: 340191

SEQ ID NO: 470720 - DNA, 1000 bp, Homo Sapiens; identical to SEQ ID NO: 159393

SEQ ID NO: 470721 - DNA, 1000 bp, Homo Sapiens; identical to SEQ ID NO: 340194

SEQ ID NO: 470722 - DNA, 1000 bp, Homo Sapiens; identical to SEQ ID NO: 340195

SEQ ID NO: 470723 - DNA, 1000 bp, Homo Sapiens; identical to SEQ ID NO: 340196

SEQ ID NO: 470724 - DNA, 1000 bp, Homo Sapiens
tttttttttttttttttattttcataaatgacttttacttatcatttctcttgacagtaattcttggcaatgtgcatataacatgaagggaagcataactttcagaagtcatcaaagatattatcctgttgtcctcattttcttaaaccattaaaatattttcatttataaaaattaatctaaatataaatattgacactaaagatcaaaatcacttgatgacaaaataattcttctggaactataacatatgcttatggtttttaatagtaaattaaatctttgcacttatttggcacaaggaaacctttataaaagttcagatgccacacagcaggctgctgctgctgcttcttttttgttgttttttgtttgcaaggcttacacagtacacatttttgtcaaagaaaactgaatatttttaacactgtaacacaacaatagttgcttttcatgcctcttaaagaaaacattctattcggaagtcaaatcttttttgttgtgttcttaaaatttgtttttgtttgtttgttttgctttgaatcacaccaacagaacaaaaagccaaagatttacttatttcaaaggagtcatttctgttagatgacacataacacagcatcagcaaggagtactggaagattaatgtagacccccatcaggagtggatcatagcacacaagttagcagaaaatcagatctggaaatgcacatagcagcaaaataacgtagaggttgaaaacaacagagttaggcttttgtgatgcattccaatcataattagcataaaggtgtggctttggcaaattaatctctctggccttcagttattaaatctgaaatatgggaaaacctattgaataaggttgccataaggattcaaatgagaagaacattgcctccttcagagcaggcacttaacacatattcatcataactattctcttgcctcctttcttttaccttcttcctaagattcagactatatcaggaacaaaca

SEQ ID NO: 470725 - DNA, 1000 bp, Homo Sapiens; identical to SEQ ID NO: 340198

SEQ ID NO: 470726 - DNA, 1000 bp, Homo Sapiens; identical to SEQ ID NO: 340200

SEQ ID NO: 470727 - DNA, 1000 bp, Homo Sapiens
tcacatacagaaggtctggcagtgtcttctgtaagttttcgtgttgccgtatttctgaaggagctcttgggcctgctgctgcatttcctgggccagacagccaggaaagtgggacctgatgagaagcaggacgaggcagcactccagcacatctgggaagggccaggccttaatgctctcaggaaattttgccattctctgatttgcctcggtaagccttttggttaactcaggcagagaaagtggctcatttttttcttctttacactggctctgagaactgcagaggggctgctctgcttctacttccggttcattcttatcaggaccatttgctgtggatttacagagttgactcttttggtgttgtcggatcatttctgccaaggtctcttggacttcagcaacagttctctgtgagttttggagactggcatgcttttctgaaaagagctccttaaaagtactcagcattcgctcaccttcttctgtgagtctcaagtctagttctgaaggcctgtttggctctggctgagaagtttcagggtccgtttcttcagtgctggcagtgtctaactgctggcttggctcaacagagagtgttctgtgaccagcccttacccagacactggaatttgggcaaggtctggagagagaccaccagaattcatacagacgcccataaagaaaaaaggcctccaaacttttgaaagctggtgtggcaggggattgatggtcccccaacttgtctcttaggtggtcacagccatcagggagaaaggctgagtacacttcctgcatgatggtgaagctccctgagtcatagctccggaccaccgcccgaaggagcgcctgcacagcctcgtcccaggaggccatctgttggctcagcactgccagggtcaagtcatggcaaatgtgaagcaggagctgtttggcaggtgtgttatttgtagcagatgggtacttgatgttctgcagcttctgaaaggcttcctga

SEQ ID NO: 470728 - DNA, 1000 bp, Homo Sapiens; identical to SEQ ID NO: 340201

SEQ ID NO: 470729 - DNA, 1000 bp, Homo Sapiens; identical to SEQ ID NO: 159396

SEQ ID NO: 470730 - DNA, 1000 bp, Homo Sapiens; identical to SEQ ID NO: 159397

SEQ ID NO: 470731 - DNA, 1000 bp, Homo Sapiens
taaaccaccctccaaggtgaaaataggttccaataaaccacaatgacacttttttttcagtgtattaatctgatatatattttgaactggaatgatttgtaaagaaataaataagaaaccctaaaaagaaaccattagttccaagtcaaattatgttaatggtctatagaaaaaagtgagtgtgggcaggaaacattggctacatgccaatttttatttcaaagagtaatgttgcacaaataatagttatcattgtcttacacaacaaaaaatcctaaagttaatctcacaaacctaaattagctgaacatggagtaacaaagtcaaagccagtattatcatcagcacattaatttgataaatcaaactacatctttaaaaaaaaaccctgcatctgctgctgtgcagaaactgataattacttttcagcatgtaaacgaaaaatcattatacagctctctctctttttttttttttcctagaaagatgtataccagggaaacacaacagaatttgttacttgttaaatcccacaaaagctacaagggagctgagagttgatggcacttaaggacagtaaaagtctgcacttttaatatttttaatgcccactgatgggctttgtgtcaatactttttaaaatgctttttatttacaatagataaaacagtaaggaaatacaatattatatcatatccccgcacagagatactatatctgtataaatgaatcactagtaaaagagttatttcttatttcaaatgaagtcttatctaggtattaattaggctgtaatctaaatgttgatggtgcctattttcaactcccaaaataaacagaaagagctcatgtatcaagattaattttctttggccgcaatggataccattttctctgggggcagtctttagtttgctttcttttcagtaccacgtcagaggttttcctggaagcagtctctgttggtgtggtttctatctgtgttataaagttctcaggt

SEQ ID NO: 470732 - DNA, 1000 bp, Homo Sapiens; identical to SEQ ID NO: 340204

SEQ ID NO: 470733 - DNA, 1000 bp, Homo Sapiens; identical to SEQ ID NO: 340205

SEQ ID NO: 470734 - DNA, 1000 bp, Homo Sapiens; identical to SEQ ID NO: 340206

SEQ ID NO: 470735 - DNA, 1000 bp, Homo Sapiens; identical to SEQ ID NO: 340207

SEQ ID NO: 470736 - DNA, 1000 bp, Homo Sapiens
ttaaaagtcaaaactggtgtttattgtgttcccaccatagcagtcattttgtataggtaaagtgattggatctacatattcctccataatattgctctattatatactagtgatacacagccatatgctacataaagacatttctgtcaatgattccacatttaaaaccatggtcccataagattatagtggaacatatacagaaacctgatacatggcccttgatattggcattgcagatcaagtaggggaaatgactgacattcagtaataatgctgtgacatttggtatttcatgtgaaaatatacatgtaaataaaaatacatataacatctaggtttgtgtaagtacatcctataatgtttacacaatgacagaattgcctagtgacacatttctaagaatgtatccccatcgttaagcaatgcatgactgtaattatactagacgttctggtatgattcattcatcatttccaatgctcacaatggctctgcaaggtagacctcattaaacccattttatctccattttacagacaagaagatgtaggctcagagacagtaaacagctcaaattgacagaactgggatttaaacccagactgtctccaaagctgacattctttttttatctacaactcactactccttggctcttgattttaagtgtgtgttaggatccttgcagtaaatcacaatatctgtgtcattcaaaatacactttaattatcaactatattggattaaaggggaaaaaagtacactttaatattgactatcactggcaaagctaagtttggcaagcaaatgagtgggtagagagcagaggagtgaatggactcctgtctccaggatgccttttccttcctgaagatgatctgagcacacaaggtccccaagctgggccacagtccagactagagtcttcccagatacatgggtcactctgactattcttgcctcgtctttgaagaggcgtgcttggtcctcacaacct

SEQ ID NO: 470737 - DNA, 1000 bp, Homo Sapiens; identical to SEQ ID NO: 159398

SEQ ID NO: 470738 - DNA, 1000 bp, Homo Sapiens
ttttttttttttttttcttgattaaatcattcattcattcaacatttattgagcgcctactgtgtgctaggcaccgtgctaggcgcagaaatacagagatgcataagatacagtccatgcccttaaggattcacagtctagaaggggagacaaacatgtaaacaagtaaaatacagcgtgataagtgccacaagagaagcattgacaaagtgcagaggtagcctggaggggaggggcacaggggttgccttcctggaggagggggcctttgaggggatcgtgagagatgaacttgccaggcagacaaggcaggaggagcaggggaaggcattccagtcggaagaaacagcatgagcgaaggcacagaggcatgaaactgtatgtcttgcttggtgagtgcggaactctaactagtctggtggtattgctaaagtgtactagaggctgtggctagagaagggggcagaggccagatcatgaggggaaactgagggcaggggcatcttggagggtcaccagaggtgagcagagcccgagggcaggctttgacacaggaaaagagggctcctggctgactcaaggtacacctgcctgaggaccacagggttcctcgctgtggctccaaagggatctcaacccaagagtagaggagcagcagagctggaggtgaagcagaggggtcgggccaggtctgggacccagagctgccatgcactcccgcgctctcacagacttctgatttccaacctgcacgtcagagccccctcctgccagccggatgggggcctggatccagtgggaaatcacatgggaatatggctggcaaactgcaaagggccagatgagtgtcaggttacagaataaatctttactaactcaaagaagaaaagggctgcggataaaacaggaaaggttagatggaggaaggcgggcagacgggcctaagaacaagggccaaaatgagaatacagcatcggccaaagaggaccgtggctgtctc

SEQ ID NO: 470739 - DNA, 1000 bp, Homo Sapiens
tttttttttttttttttttaccaaatcgaagcagctttattgcaccattaagtacatcactgcatcaaagacagtgccacaaatgcaaatccaatcggagaaggtagccctgagacatgtggtggctgcgagggagaaggacccccaacccttgaggagcagcgctggaagagaatcattccttaatatggctccaattccagaactgggctttatcatcacagaaggaatggccttgggctaaggctccaacataggtggagtcaagggcagttccccataggctgtggttcccctgctcctgtctcacagcctaagacagcttccagcaaaaggcagttcatccctttcaccttccatccaacctagcccacccttaataatgccggcagatgagaaattccattttaacagcgccaaagtttcctctcttggttctgctcagcacccatccctcacgtccatgagttgttcaaagggtgaacagcagtcagctctaccccagaccctgggctacagagaaatacggacctggaaataccaagtcagaggcagggaaaaggtaagggcaggctcataaaccacagaagggagaaacaaaagacccacatgatgggtcacagcagaggtaggcttaaaagtaacaatcctgttcaccctctcagaagccacttaaatagaagatccctgggggagaagatatcctgccccaggtccttacagagtgtagtattagggagagtgaagaactgattctatgccctgcctccaggcctgagagtgtcttggacagatcctagaaggccagacataaaggagtaaaaagcaggcactcagctggtttggagccaagcctacagcatcacatacctggcagcaaggaaaagagtcgggaaaaagaaacagaatctgttgcagaagtcccctcttctgcagggaggagttatgtaacagcagaagtggcctcctagcaagagaggctgcctggtttagaccagca

SEQ ID NO: 470740 - DNA, 1000 bp, Homo Sapiens; identical to SEQ ID NO: 340210

SEQ ID NO: 470741 - DNA, 1000 bp, Homo Sapiens; identical to SEQ ID NO: 159400

SEQ ID NO: 470742 - DNA, 1000 bp, Homo Sapiens; identical to SEQ ID NO: 159401

SEQ ID NO: 470743 - DNA, 1000 bp, Homo Sapiens; identical to SEQ ID NO: 159402

SEQ ID NO: 470744 - DNA, 1000 bp, Homo Sapiens; identical to SEQ ID NO: 340212

SEQ ID NO: 470745 - DNA, 1000 bp, Homo Sapiens; identical to SEQ ID NO: 340213

SEQ ID NO: 470746 - DNA, 1000 bp, Homo Sapiens; identical to SEQ ID NO: 340214

SEQ ID NO: 470747 - DNA, 1000 bp, Homo Sapiens; identical to SEQ ID NO: 340215

SEQ ID NO: 470748 - DNA, 1000 bp, Homo Sapiens; identical to SEQ ID NO: 159403

SEQ ID NO: 470749 - DNA, 1000 bp, Homo Sapiens; identical to SEQ ID NO: 159404

SEQ ID NO: 470750 - DNA, 1000 bp, Homo Sapiens; identical to SEQ ID NO: 159405

SEQ ID NO: 470751 - DNA, 1000 bp, Homo Sapiens; identical to SEQ ID NO: 340220

SEQ ID NO: 470752 - DNA, 1000 bp, Homo Sapiens; identical to SEQ ID NO: 246415

SEQ ID NO: 470753 - DNA, 1000 bp, Homo Sapiens
tttttttttttttttttttttgcatttcaatagaactagctttatttacttatttatttatttaaacaaaagaaatggtttaaaagcaaatgcatatatgtaccaagggatggacatgacctggtacttacaaaggagctgctgtgtcataatggaaacagcatattaggagaaaaatagtatttcgtgtgctgtctgcttgagtaatcaatctggagatgcaagttaaccgaaggtgctctgccaagccatcagcgtgagaaaaaaaaaccaccagaagttgcctccagataacgatgtagtggcagcatgataactggcatcaactcacggtcttctcattttccccattttctataattttcctcttcttttcatctatttttttcttgaagatgttatttcggtaaaactgaagctctttgatgctttcactaatgtcatcaagtgccctatgagaagcagccttctttggtgcaaattcatattcttctggataccagcgtctgcacagttctttaacagtgctcacatcaattattctataatgaagatgtttcatgaactggggcatgtatttgtcaagaaacttcttatcttcatgaactgaatttcctgcaagtggacagagccctggaggagtctgctgtcgtacaaaggacagaaattcatactctgcctgctgcaatgtaattgtactctccttcactgccttggtaaggccagacctcccgtgatgctccttacaccaatctgacatgctgtccagcaactcatctggttgttttataatcaggttaggaccttcagccaaaatgttgagatcagagtcagttatcagacaggccatctcaataatctggtccttctcaatgtccaatcctgtcatctccaggtccacccagaccatccgctgagccatgctctcccctgccgccatggctgcgccaccttcgcggacacctcgggccccgaaccgtccgtgactcccacctacacc

SEQ ID NO: 470754 - DNA, 1000 bp, Homo Sapiens; identical to SEQ ID NO: 340223

SEQ ID NO: 470755 - DNA, 1000 bp, Homo Sapiens; identical to SEQ ID NO: 340224

SEQ ID NO: 470756 - DNA, 1000 bp, Homo Sapiens; identical to SEQ ID NO: 340225

SEQ ID NO: 470757 - DNA, 1000 bp, Homo Sapiens; identical to SEQ ID NO: 340226

SEQ ID NO: 470758 - DNA, 1000 bp, Homo Sapiens; identical to SEQ ID NO: 340227

SEQ ID NO: 470759 - DNA, 1000 bp, Homo Sapiens; identical to SEQ ID NO: 340228

SEQ ID NO: 470760 - DNA, 1000 bp, Homo Sapiens; identical to SEQ ID NO: 159407

SEQ ID NO: 470761 - DNA, 1000 bp, Homo Sapiens
tttttttttttttttcttgcttccatgtattatagtttattaactttctttttcacgctcactggggttaaggtgcggaaagcatttcacagggagtcttaaaaccaaattaggattgccaggtaaaggctgcacaaggaaaatgccttatctctgaagcccagagctggcaggggagggcatgacccagggactccaccctcctgcaaagggaaagggcatgctggagaggcatggggacccactccagctcactctgggtgctgtctgtagttctggaagcttggtggaggatttcctgctcaacttagagggtgggccaatggggccaggccgggggaaggtgagggttggaaggcagaaggaagtgacaaaggccacctcagcacagcagtgagaggagctgaggccaagggaggcagtcacacaccctagctctgcaagacctccaagatggcccggaggatggcagcagctgccaccgccccggggtctggctgctccagccgtgctgagctgatataactggctcttccggctccagcttccatattcttggtggcctcggctgcagcttcggcactcttgactgctttggtcaggacttgtaacagatcagctcctgggctcttccaggcttggagctcctgccccgctgcccacagagaatccagcatagtcctgtcccctggagcagccttgccatacttctgcatggcttccaggccggcatccatggcagcagaccaggctgggaggctggtcttggccttcaggggctgtgcagccgcagtcaggaacaggccatagagcgccccagatgagcctcccatcttctccaggagcaggacagacaacttggagagcagctgggcagggctggcagggggtgggccctccttcagccactcctggattgctctggccgcacggctgtgggtggtgccacagtcgccgtcaccagcagcccggtccagggcattcaggtgttcctccaggc

SEQ ID NO: 470762 - DNA, 1000 bp, Homo Sapiens; identical to SEQ ID NO: 159409

SEQ ID NO: 470763 - DNA, 1000 bp, Homo Sapiens; identical to SEQ ID NO: 340232

SEQ ID NO: 470764 - DNA, 1000 bp, Homo Sapiens; identical to SEQ ID NO: 340234

SEQ ID NO: 470765 - DNA, 1000 bp, Homo Sapiens; identical to SEQ ID NO: 159411

SEQ ID NO: 470766 - DNA, 1000 bp, Homo Sapiens; identical to SEQ ID NO: 340235

SEQ ID NO: 470767 - DNA, 1000 bp, Homo Sapiens; identical to SEQ ID NO: 344002

SEQ ID NO: 470768 - DNA, 1000 bp, Homo Sapiens; identical to SEQ ID NO: 340236

SEQ ID NO: 470769 - DNA, 1000 bp, Homo Sapiens; identical to SEQ ID NO: 159412

SEQ ID NO: 470770 - DNA, 1000 bp, Homo Sapiens; identical to SEQ ID NO: 336221

SEQ ID NO: 470771 - DNA, 1000 bp, Homo Sapiens; identical to SEQ ID NO: 340239

SEQ ID NO: 470772 - DNA, 1000 bp, Homo Sapiens
cctttcccaaaggatttattaaaacacagaaaaccaaaacatacacacagagtacaaagtaaaggtgattgtgttggctacagcctctgtccagcctcccgtgggcgaagaccagacaagccacggctcacaggggagcctggcttccaaagctggacccgcccccgccggggccaccctggctgggactcctggcgcgccctgcacccagcccagggccctccctttgccagcctggggctgtgcctggggaaaggggtcggccccctcttagctgggcctgggccggtggagtctgctccctccacacccctgaactcagaccccacgggccagtggggaccctcccttcctctccaggggtgcttgggctccaatcgctgcttgaggagttcaggacacacacacacacccaacgggccctttctgggttatcgcacctaaaaaaatactttgtttaaaaaaaaaatctgaaaattaaagaaaaaaaaaacacaacgccagtgagtttgggctgatgcaccacaacctgtaaactttcagacacagaaaacgggacaggaaccagctgccgaggccgaggcgggccttgcacagaagagacttgggggaggggccgaggccaggtcaccaagacggtgagggcagaggggcgtgccagcctcggcccccacccacgccctgtcccctgcccacagaccctgacgcacactggaggctccaagtgaccaacacttgaccaagtccatctggcttctggctcccatgtacccgagcccactctccactccacctccttgggcctcaagtgtcctgggatgacaggagtgagggctgcaggtgtcaccgggccaaggcttggtcagctcctgacctcggcaggggagcacccgggggactctgggaaggcagcccccaaaagcaggaggacttcaatcatagggggcagggaaagtccagcctgcccctgggggaagccaagtttgcaaaaaacgcagga

SEQ ID NO: 470773 - DNA, 1000 bp, Homo Sapiens; identical to SEQ ID NO: 246512

SEQ ID NO: 470774 - DNA, 1000 bp, Homo Sapiens; identical to SEQ ID NO: 340241

SEQ ID NO: 470775 - DNA, 1000 bp, Homo Sapiens; identical to SEQ ID NO: 340242

SEQ ID NO: 470776 - DNA, 1000 bp, Homo Sapiens
tttttttttttttttttgacatagttatcaagtgtttattcagaaactatttaaaaaattacatgtgctgggatacatatgagactgtaacaacagtagccccatcttacagatatcctgtttgtcattatcatcattgcttgctgcccacagggataaagacattgtatagagacttgtacagtccatgatttggtcttctgaggtgccagtacacgtggatctgtacaaatgcaactgggtttggttaaacaatcgaaaatcggctacaatagtagtcaaatgaacatgtcattttggttcattaataaaaatactttcaaatattttctaataaaacccaaaacttgcaaacaattctctcggaatggcccaatcaattgccctattttttaaaatacattgggatacaatcagctctgttttcttaaaagaaaatgcagattcaattgggtgggttgcattggcttttaaagatttagccattaaattctccacattttgaatgattgaaaatgccttcctgataccacgtcagttttagaaatgcagatcctaatacagtgtgacacctctgcaaaatcataggctaaatagtgaaggaaagaggaatgctaaatgtgcatataaaaataggtgctacaataaaatatttgtatatttcatcaataagttattttgactaatcaattatggatcatatagctctgtaattttaatgatttgtccacatctatggtgatcctttacaggatcacaatactttttttttaattcaaatgtccagaatgcatacaaacacatcctttaaaaacaaagaaaaggaatgagaagggaggggaggggaggagagaaggagaggggcggaaaaagagaacaaatttcctattaaagttggggtgtgctaatttctccacaaaagccagttagacccacccatggcttaaaaggggagaaagagaggtggggcaggggcgggggagggggaggaagcaaaaga

SEQ ID NO: 470777 - DNA, 1000 bp, Homo Sapiens; identical to SEQ ID NO: 340243

SEQ ID NO: 470778 - DNA, 1000 bp, Homo Sapiens
ttttttttttttttttccttcaaatgttataatttatttcagcttcagaaatacagcttcacattttcacaataggtacatgtgaccttcaagaacgatacaggctttgagatttttcttcaaaaattccattctaagagtccatatatcagcattaagaaatcctgaaagtgccaagaagacagtggaaagtatccggctcatattaattaaagaatcagcagagaagacaagattttacttctgtatattccttcttcaaacaaagcaaaagaaaaatttgacccaaaaaagggaaagtaaaaatagacaagcaagcaaaacaaaggctgtacatgtacataggaaatataacacaaatcaagtagtactggtggaattactggttggggggaataatttttaacaaactggtagcagacaaggcaagtggttagacagagtaatttttgtcataattttaaaacatttcataatgagcgaagtttaaggaattcaagagtaaaaattaaaaagagattaatgacttgagttgagccatatgtgaaacctccaaccagaagtgagaagtctcaccaatataccagtatgaacaggtcttaagacaaacactcctctttgagtttcctctctcttgctctcacacatacacacattcttacatatatacaaagacacacacacacacacacaaatagcagtgcatatattacatatgcttcaaaaatattcttaaagtttcacctacacagcaccacataattttaaacatagcaaccagacaggatgagtaagagtatctagaagactcatttgagctttttagaatgtacaatgagtgatctggtgaacgaataatcatttcttcaaaatcatctagattcatttacattaaactctgagctcacagctagtagtcttctaattgaaatgatacaaaactcatggcttaagtctcatacactatcttctttcatgagttcaacagttagagacctat

SEQ ID NO: 470779 - DNA, 1000 bp, Homo Sapiens
agttcacattttttaataacatggcacagtttacattacacaagaaggctccgccgatgagaacatgctgaagattcagttgcttcacttttcttttcacataggatctagaaaggactttattacatacaggataaacagcaaaaaggtccgtatagaacaatctctttacaatactgaaagctaccactacagttccagtgtacatattccttgcatttttttagttgttgtcttaaaaaaaaaaaaaaacaccgcacaacatctggagttcacaaaatctgaagctcacaactaaaccttcagtttactactaaaatagatctctctgcttattagaaacaatggtctgtagttaacttttttttttttttttttttgcaaaaacaggataacaacgtcagatagcactttaatatactagaagaccaaatggaactaattttatttcatacatatattttacagtccagtagacaagatatattgtatttctctgctagtaaagtcatattctctccaaatatgtagacaagaggcttaatgtattataaaagtattatgaagagacattaagattgatgcaaactcaaaaaacacactcacacacaagacttttttttctgccatctttcaccctctaactcgcgatggctccacaaggttgacctgttacggctgttcccagacttgatcaccagctggaatacagtgcgtcacatcaggaaacgtgcaccttacatccgtcagttattgaatacagtgaaaacatatccatcatctgagaaaacttgaagctttctttcaggatctgtttgggtgtaagtaaatctcattacaaaacgaggaagtgtgtacaggtatgaaataggacacactaaaaaaggcatggttctcacatgaggtgtgtgtgaagtcactggcgacctgtgtgtgtctgacagacaccaccacccgtcccctgattttggcatctggcaaatcccaccctccctggcac

SEQ ID NO: 470780 - DNA, 1000 bp, Homo Sapiens; identical to SEQ ID NO: 340244

SEQ ID NO: 470781 - DNA, 1000 bp, Homo Sapiens; identical to SEQ ID NO: 159413

SEQ ID NO: 470782 - DNA, 1000 bp, Homo Sapiens; identical to SEQ ID NO: 340245

SEQ ID NO: 470783 - DNA, 1000 bp, Homo Sapiens; identical to SEQ ID NO: 159414

SEQ ID NO: 470784 - DNA, 1000 bp, Homo Sapiens; identical to SEQ ID NO: 159415

SEQ ID NO: 470785 - DNA, 1000 bp, Homo Sapiens; identical to SEQ ID NO: 340248

SEQ ID NO: 470786 - DNA, 1000 bp, Homo Sapiens
tgtcaaggatggtccatttataggacatatattgttgagatgggctgatggaaatatttaagaatgtgccacagacagaacgttcaggtggtgatctgggctcatagaagccacactgatgaagttgagagacctgggccattgtctgggttgggacattcaggttgttgagatgtttcagggatgcaacatctgggagactgcaagcctggcagtgcctgaatgcttctgaaacatggaatgttagctgagattgagcatttttcaggacatggatcactggttcaaatggaacactgggaataaggagcagagaagggctaagcagaccatgtgaggaagtcatggtgacaggatggaagccggtacatttctcaacttttattgtgggcccttcaaccatttttgctgctgggtttcatattttcggattgtttcacggatccacaggacgtatcttgagacacgggtgtagacaccaggccggtcaggttgcccacatgggaagtctccccaggagacgatgccatacagtgttctgttacagaccagggggcccccagagtcaccctcacaggagtctttgccaccctcttttgtgccggcacacaacatgttgtcagtgatctttcctgggtagacttgacgacactcctcatctgagcgaagttggatgttggcacattgtagagttttggggtaattcacctgggggctggtggtggtgccccagccagacacccgacaggtggtgccaggggttaggcggttgttgtgggaaaggggcagggtttggatgtagcctgtgagctggaccggggactgcagctccagaagcatgatgtcatggtcgtggttcaggtgggtggggcttctccggtattcagggtgggggatagagtggacaacttccctcacctgctcaccagcttccacacgccctagggcgtgcttgcctaggtaaactttgagcccctcctttagacagtgtgcggcagtg

SEQ ID NO: 470787 - DNA, 1000 bp, Homo Sapiens
ttagctcgcaccaggctggcactgctgctggggctcgggcgggccgcctgccccctgctccgggcccccggcgaggtccacccgctgctcgtccatgcgcttagcctgcaccctctgaatgaggctgaagaagtcctcgtccggcatggtagggccccggggcagtacgtcaggtggcgggcagcgctggtcatcgatcctggaggactggtacttgatgagcatgttgaagaagtcgtcccccggctcctggggctcgccgtggcctcggaggtgccctgcattgctgtgggtgattcgcagccccggcaggctgcccacgctggcccgctggtcgtccagccggcggctctgggagctggcgatgaggtcgaagaattcctcggtctggggcgaggccgtcatcgagggctgggcgatcctgtcctccagggtgggggcggccgtggcctcggcagccccggcctggccatcgtccaggggacaacgctggtcgtccatgcggctgctctggaacttggtcaacaggtcaaagaagcactcctcgtccgaagacggggccctcgggatgctcgtgcgtggcacgtgcacccggacgtcggcgctgtccagcggggagtggctgccctcccggggcctcctctcagcgtccgggccttcctggtacttcctgctcctcacggggaggggtagcgagtccctgctgggcccccgccagtcccctgaatggtggctgtctccattctgctcccgctccagggggagtctcagcaggtcccaggtctccgcgctcagcctctgcgtcctcttgggtctggccccctgggcctcatagccggccaggtcaggcttctctgaggctgccgggctggtcaggcggccgagcaccagctgcagctgcgccacgttcatgcgggccgtgagctccccatggcggtccccgatctcctgggagatctgcaggtgcttcttggcgaaggtcagggcctgcgctgggcgc

SEQ ID NO: 470788 - DNA, 1000 bp, Homo Sapiens
ttttttttttttttttttttttttttttgacattataatgtagttagtgttttatttcagtgcagttagcacatggtatggtttatctagagttacagactttgtaaggtttgcagctcagggcagttcttcaccgttggcaaaagttgaatccggcgagggctgggaattcacctgccctccactttcagctgcctttgggttagttttagttttgtctgctgctcttcgatgaccgtgtcacctgttggcttcagtcacaccagctctgaccacatgctgggatctgggctggaacctgggccctgctgaggtctcagtatccgtggcagctcagggctcttgtaaatgtatttgtgcctgtagccaaggtctgaatgaaagggcacaaactgaactttgaaatctcggaagcttcgagctggtgcggcgatgctatagagctttctgccaagctggaagggcaccaccgggtcgtcctcagcgtgcaggatgagcaggggacaggagatgtgcttcacgttttcatcatttgcaaatttaattccactacttgtaataggatcaaggaagaaccagtcaaacccagggaagtatcgatatatcactgaaaatggatggctcttagcttcttcacggatattagtgaatggagattccaatataagggcatctggaggcgtctctcgctcacagaggcgccgcaccagatttgtcgccacgccagtgcccagagagtggccccagatgtacacggggttgtcaccacttcttgctttgatccagtcaaaaacgtggagtgcgtcataggtcatgccccgctcagatggcgttcccactgagtcaccccaacctctgtagtcaaaggtgaccacatggtaaccaagggaactcagcaccttgtaaagctccacgcggtggtcgcctcctctggtacctgcgttcccatgcaggtacagaatgatagggtggctggaagccaaggcatcctcataccaca

SEQ ID NO: 470789 - DNA, 1000 bp, Homo Sapiens; identical to SEQ ID NO: 340250

SEQ ID NO: 470790 - DNA, 1000 bp, Homo Sapiens; identical to SEQ ID NO: 340251

SEQ ID NO: 470791 - DNA, 1000 bp, Homo Sapiens; identical to SEQ ID NO: 159416

SEQ ID NO: 470792 - DNA, 1000 bp, Homo Sapiens; identical to SEQ ID NO: 340254

SEQ ID NO: 470793 - DNA, 1000 bp, Homo Sapiens; identical to SEQ ID NO: 340255

SEQ ID NO: 470794 - DNA, 1000 bp, Homo Sapiens; identical to SEQ ID NO: 159417

SEQ ID NO: 470795 - DNA, 1000 bp, Homo Sapiens; identical to SEQ ID NO: 340256

SEQ ID NO: 470796 - DNA, 1000 bp, Homo Sapiens; identical to SEQ ID NO: 159419

SEQ ID NO: 470797 - DNA, 1000 bp, Homo Sapiens; identical to SEQ ID NO: 159420

SEQ ID NO: 470798 - DNA, 1000 bp, Homo Sapiens; identical to SEQ ID NO: 340260

SEQ ID NO: 470799 - DNA, 1000 bp, Homo Sapiens; identical to SEQ ID NO: 340261

SEQ ID NO: 470800 - DNA, 1000 bp, Homo Sapiens; identical to SEQ ID NO: 157595

SEQ ID NO: 470801 - DNA, 1000 bp, Homo Sapiens; identical to SEQ ID NO: 340263

SEQ ID NO: 470802 - DNA, 1000 bp, Homo Sapiens; identical to SEQ ID NO: 159422

SEQ ID NO: 470803 - DNA, 1000 bp, Homo Sapiens
tttttttttttttttttttttttttttttttttttttttttttttttttttttttttttttttttttttttttttttttttttttttttttttttttttttttttttttttttttttttgaaaaaaaaaacccatctttcggtttattgaaggagcagaagggagcggggggtgggggggtgggaattaaatgcttttgcctcgtttataaagagcgagttttcaggaggtcccttctcaaggaggaggggggcacctctcccccaactacaagcagcagcaaagccaagccaaggaggacagagggaaactggaggggccaagggaccccaaacaccccctcggacaggagccacaagctttctccccccacccacaatgcatctaccccaggggacccatctgggtggaagaagggagtatgtacacagatagaggtggcactgggctgggtcggggagggaataatttatccgcggcagcggtgggtggcaaaggggcagagggcagtagcctggaggcagtggtagcctaggggtcccgttctttcttaactttgatgtctccagcaaggatggtggcgatctcgccctgcatgaaggcccagggcacggaggagccgaccagcgggcacttgtctccgctcgggcagtacacctccccggccgggccctgcgccttgatgaactcccgggagcagggaaagcagaacttgtgtccgggcaccgaggggcactggacgaagtgggtgtcttccagccgctccctgcacagggtacagcacaggggggccccaggggtcgccccagtgccgctgccacccccgctgacagcttcggcccccgctgtgggactgacttctgcttcgccgttgcgggccacaaggcgatgctgggttggcggctgggccgtggaggaggctgcagggctggcgccccctgcacgcacaggccccccgcctccgccagggtccttgggtgagtggcccagggcttcggcc

SEQ ID NO: 470804 - DNA, 1000 bp, Homo Sapiens; identical to SEQ ID NO: 340266

SEQ ID NO: 470805 - DNA, 1000 bp, Homo Sapiens; identical to SEQ ID NO: 246513

SEQ ID NO: 470806 - DNA, 1000 bp, Homo Sapiens; identical to SEQ ID NO: 340268

SEQ ID NO: 470807 - DNA, 1000 bp, Homo Sapiens; identical to SEQ ID NO: 340270

SEQ ID NO: 470808 - DNA, 1000 bp, Homo Sapiens
tttttttttttttttttttcctgcctcccaccgctttatttctttcggtttcggatgcaaaacaaaaaattttaaaagaaaatgtgacttcaaaggaaaagaacaaatttccaaagacttgggggagtgaaggcagagcctggtgcagatggacgaggtctgcagacggagggcagaggtggtggaaggggccaggggcctgcaggcctccccctggaactgggactggtctcggtctgctgacgtcagggtcagctcccccgcggagctgacttcagcagcccacagctgtggggcttcagcagccacaccagcccagcccagcccagctctcgatacgtttggtctttcatgctgaaaaataaataataaagcctgtcccgtgtctactgcctcccccaactgcacagacgccagcctctaggcctgactgccagggaggtggaaacactggccaccagcccggcagcccctacaggccccccagatgggctgcctcagtcgtcctctgagagctgcagatcctccagctcgtcctccggcccctgggccagctgctgcagctccccaggggccagccccgcctctgcgtctgggtctccatcctccgagttgctgctgtcctcctcgccctcctcctcgtcctcttcatcgtcttccaccccatgccgagtgctcaggggcctcagtatccctctctccgagaatccctcagtgtcgtcctcttcagagctgttcaggtcaaagaggtctttaaattgcttcctgtcctcatccttcctgtcagccatcttccttcgtttgatctcagggaagttcaggtcttccagccgctctttgccactgatctccagctggatctcccggtcacgcagcttgcgccagtggctgtagtacaaggtcaagggtgtcccctcttcccgggtcagcttctcccaggcttccactgcctgctgctcagagacgccgaaggaaaccctctggcggcggctgcagatgt

SEQ ID NO: 470809 - DNA, 1000 bp, Homo Sapiens
tttttttttttttttttttttgaggttttattatttttatttatttttgagactgagtcttgctctgtcatcaggctggagtgcagtggctcactgcaacctccgcctcccaggttcaagcaattctcctgcctcagcctccctagtagctgggattacaggtgtccaccaccatgcccaattaatttttgtatttttggtacagacagggtttcaccatgttggccaggatggtctcgatctcgttgaccttgtgatccgcctgcctcggcctcccaaagtgctgggattacaggcgtgagccaccgcccctggactacttatggaggttttaaaaaatcttttaagtccaggcctgacgtttagagaaggttacaaaggcggccaggatctgagtatttccaaaaagctctggaggcagcattgaggtttccttccagttgaatcactgactttaggtcgactggggtactttgggttttttgggccattttttgggggtgtgggaagcttttctcacagatttactaggagtggtgaaaaacttggcctctggcttttttggagtctgtctcgcatcttttttccccagcgaaggacttttttccttcactgcctcttctttgatttttggcttcttctctgggcttttccctggggtctcagactctgcagcttttggggtctcagatgctggcaaagcctttcttttcttcccacgaggtgtgctgggattaggactctttgctggagacttctttcctgtggcatgtttttgaatctctactttttcattagctggagtcttctttcctattggtaccagctgtgggatttcgtcttcggattcatttgttgctttaacttgggcttttcctctgccacgttttttcttcccatgctctggcgtctgttccttctttgattcaggtttcttcactgtagtatcaccactttcaggtgccacatcatctttactaagaactgatgcagtcttcct

SEQ ID NO: 470810 - DNA, 1000 bp, Homo Sapiens; identical to SEQ ID NO: 159426

SEQ ID NO: 470811 - DNA, 1000 bp, Homo Sapiens; identical to SEQ ID NO: 340272

SEQ ID NO: 470812 - DNA, 1000 bp, Homo Sapiens; identical to SEQ ID NO: 159427

SEQ ID NO: 470813 - DNA, 1000 bp, Homo Sapiens
tttttttttttttttttttttaaaattaatacttgattttattaaggtggtttatcacaacaaataccaacaagaagagaaaaaaatctcaggaaaatcaacagcatgcatggatttggaatgacactatgtaaataaatgcaatgaaataaaattgacttttcaacacttggacagcatgaagttcaacagacaaatccattaaaaagggaaataaaagctcaatctcaaggtgaaatttttgtccatgacactctcgaattctagatctgaaaaagtttgggataaatggcagaaaacaacgcgtcatcacgagatctctaatttaatccaaagctattccggaaggcagcagttttccctatttcttcaccagcgccctggggcaaaaggttaggaataatcggcttcaggaacttgaactcgccggcccctgagtctccggtcaaacacacctcgtagtggtagctctgggatagggtcccggtgccgctcacgtccaccagatgccctggaaaggggccctcgggcaccgagcagcgaccgaccgaggccgccctgctcctcctgcacagccgcactgccacgaacaggagcaccgaaaagaggaagagcgacgacaccgaggccaatgccaccaccaggtagacagtgagcgagtcggcctgggcctgggccggggccgcctccggcagcggcaggtagggctgggagaagccgtccaccaggagcacgtgcagcgtggcggtggccgagcgcggaggctcgccattgtccttgaccagcaccaccagcctgtgcttggccgcgtcgcgctcgctcagcagcctggcggtgcgcacctcgccattgtgcgcccacatgctgaacagcccgggctccgtggccttgagcagctggtacgacagccaggcgttctggcccgagtcgccgtccaccgccaccaccttggtcaccaggtagcccggctcggccgcccggggcaccagctcggtgcaag

SEQ ID NO: 470814 - DNA, 1000 bp, Homo Sapiens; identical to SEQ ID NO: 159428

SEQ ID NO: 470815 - DNA, 1000 bp, Homo Sapiens; identical to SEQ ID NO: 340276

SEQ ID NO: 470816 - DNA, 1000 bp, Homo Sapiens; identical to SEQ ID NO: 159429

SEQ ID NO: 470817 - DNA, 1000 bp, Homo Sapiens; identical to SEQ ID NO: 159432

SEQ ID NO: 470818 - DNA, 1000 bp, Homo Sapiens; identical to SEQ ID NO: 340280

SEQ ID NO: 470819 - DNA, 1000 bp, Homo Sapiens; identical to SEQ ID NO: 340281

SEQ ID NO: 470820 - DNA, 1000 bp, Homo Sapiens; identical to SEQ ID NO: 340282

SEQ ID NO: 470821 - DNA, 1000 bp, Homo Sapiens; identical to SEQ ID NO: 159433

SEQ ID NO: 470822 - DNA, 1000 bp, Homo Sapiens; identical to SEQ ID NO: 159434

SEQ ID NO: 470823 - DNA, 1000 bp, Homo Sapiens
ttttttttttttttttaacatgtgagtaagatcagtaacgtgtattcgtgtcaatatcctggagtgatcatttaccagagttttctgagatgttaaccacaggcacaagctgggtgtgtgggtatgaatggtccccaggaccaaactgcggtcccacaactgcatgtggttgtaggattatctcaaggtgcaggtgtttgacatccataaaccctcctccccaccactctgaaaggctgggctgtagacgaagacagggctcagaagccctggcctgtgggcccccaccacccggccactatgtctctgaggggccggagtctggccccatctgtggaacgggctggcgctctgggtgctgctttccaggttcccgctgctcacaggaggccgaggcccggctgtgaccctgtcctccgcctccccttcaggctcagggtctgagtcctccacctcaaggccggctccattcagcttcacgtcctgctgtaaaggccccggggccacagaagccaggtcatccccgtaggtggaggacgacgaggccggcagccgctgctcgagggcgcagcagctgggaggcgcgggctccaggggcgcggcctggcggcaggcggcctcccgcaggcggcaggcgctggcgtagaccaccccgtcggagccgcacaccgggttcccctgggcgccgcagtcgtggtcgcagccgcatcgcgcgatcgccgccccctcctcaggggccacggcagggcccgactcgccggggaaccagcccgggccccgggcaggggcgcgctccacttcgttgcacgcgggtccggcgcacagttcccgggcgagtgggctgtgcgtgctgacgttgtagaagcgagtggcctcgaaggcgggttcgtagtagtcgtacacggagactggcagcgccgacgtcctgcccaccacgcactcccggagagcacggaaccgcacgcacgtcaggcaccggctggggatctcatcaaagtag

SEQ ID NO: 470824 - DNA, 1000 bp, Homo Sapiens; identical to SEQ ID NO: 340285

SEQ ID NO: 470825 - DNA, 1000 bp, Homo Sapiens
aaaaattactctattattatcaaatagaaccacagtatccaaaaggtaattataaagttctatccccaactagatgggccctacaccgcccctctgagtggccggcggccaaatcacgccccccgtgctgattggtttcatccattttattgtcaaggaaattaacagcccgaaagggttccccaggtccgcgccctcccccctggggcccccggggaaacgcggcagcaagggacctggtctcactgcccccatgtccttgggaggagggacgagaggagagggggagctcacggcaaaggggctggggggcgccccgccccgcccgctgggctcgggcctggcggtgtccgagggggggcacggcccgcgcacctggccgggcggcggcggcggggcacgtgtagggccgctcacccgtgtgcgtgatctggtgtttggtcaggctggacttgtggctgaagctgctgtcgcactcggggcacttgtagggcttagggccaccgccgccgctaccagagctgggtgacttgggacgcggcttgagcgcgtgcttggggttgaacgtgggcccgcgttcgggtgagacgcagcctccgcgcacgcggtggatgcgctggtgcagcgtgagctgttgcttgtgccggaagctgatctcgcattcggcgcactcgtagggcccctccttgatgtggttgcgctggtggatgatgaggttgatcttcaggcggaagctcttgccgcactccatgcatgtgaagggccgctcgccgcgccggttccgctgctgctggctcgaggccccgcggttctcgctcaggtgccgctcaccgtgcacggagggcgccagccttttcactgcggggtttcctagctgcaggggcggggggctctcctcgccctcgggggacatctccccgggcagcggggtctggtacatactggcctcatatctcccggacagctgcccaagggattgcaagtgctgcggcagctcatc

SEQ ID NO: 470826 - DNA, 1000 bp, Homo Sapiens; identical to SEQ ID NO: 340286

SEQ ID NO: 470827 - DNA, 1000 bp, Homo Sapiens; identical to SEQ ID NO: 159435

SEQ ID NO: 470828 - DNA, 1000 bp, Homo Sapiens; identical to SEQ ID NO: 159436
  misc_feature (45)..(45): n is a, c, g, or t

SEQ ID NO: 470829 - DNA, 1000 bp, Homo Sapiens
ttttttttttttttttttacttgaaatggtttttattataccctaaattttggtaaatattgggtttgtttctagcttccctactggttcacccatccctttcccttgtccttgtcccaggactgcaccagaagtagaggatggaacaatgatcttcccaccttctgaaggcaactttctcatatggtacagaactggtaccagcctgggggatgggaggagtcccatgggtcagtcatcatctgtgtcactagggcccatgtactggcagatggcatcgtagtgaagctccaccacctgattttctcttggcagttgcaccaaagcccggctccgtgctctgtcccggctcagcaaatgtcccacccttccagtctgtgggcccagcaccaccatcacacggtcaccctctgccttgggaaccagggtctccagcatgtcttccctcaggccttccaggactcggccttcatctgtccgacatacacaggtatctgggcttaggacatcttcaattatcatcttggtgttgtaatattggcctcctttgtacatgttgtccacaaaccgcacacgcaggtccctgtgcaaccagtgctgacttctgggggctgctttctcactcttggctgcaggcccatcctgtcggtctggaaggtgtttccgcttcctctctgagttgtcctgctggatgtagagttcttgattccagagggtcttccgtgatgaggcagttccgttctgttgcctgagatccaaggtgttcttgtcaaactcctgctgggagacaggccgcaggtagtactcactaacagtcaccacccggctccccacagccagacgaaccatggcccgaacattgtcaggatcaaggccttccaccttcccatagaggcctcggtgagggccagaaagaaccaccacagctcctccaggcaccagcccttgaggctgatcttccttatctttctcttgctcctcatctggtcttggcatgcgg

SEQ ID NO: 470830 - DNA, 1000 bp, Homo Sapiens; identical to SEQ ID NO: 340289

SEQ ID NO: 470831 - DNA, 1000 bp, Homo Sapiens; identical to SEQ ID NO: 159437

SEQ ID NO: 470832 - DNA, 1000 bp, Homo Sapiens; identical to SEQ ID NO: 159438

SEQ ID NO: 470833 - DNA, 1000 bp, Homo Sapiens; identical to SEQ ID NO: 340292

SEQ ID NO: 470834 - DNA, 1000 bp, Homo Sapiens; identical to SEQ ID NO: 159439

SEQ ID NO: 470835 - DNA, 1000 bp, Homo Sapiens; identical to SEQ ID NO: 159441

SEQ ID NO: 470836 - DNA, 1000 bp, Homo Sapiens; identical to SEQ ID NO: 340294

SEQ ID NO: 470837 - DNA, 1000 bp, Homo Sapiens; identical to SEQ ID NO: 159442

SEQ ID NO: 470838 - DNA, 1000 bp, Homo Sapiens; identical to SEQ ID NO: 340296

SEQ ID NO: 470839 - DNA, 915 bp, Homo Sapiens
ggacgtgaaatctttacttagagaaaagcgacagagtcagagacccacgggggcggggctgcagcgagggcgcctggggacacgaacacggcggagagcatcgggagacgcgctggtcacaggagctggcggaggacgcccgggccgggctgcggggctggagacgtcactgcgcgggcgggggcgccgcgctcccggccgccttccgcgccgcctccttctccgccttggccgacggcttcccggggggttcggtggccgccgccgccgccccagcctgggtgggccccttgcgctcctccttggctgcgcggtagccgtccccccaggccgccggcgtctccgtgccgtgcttgcggctcagcgggtaggccccgatggccgccaggatgctgcggtggcgctcggggtccatctccgtgtagtacatctccagggtcagcggcgtgcagatcttgtgccgcagcaggaagccgtcggggcaggtgaactggtcgtaccagatggccttgtacatgatcagcacgcagcccagtagcgccatggcgaaggcgatcatccgtgcggtgggcagcctgcgcccttcctctgggtggctgcagttcagcctctggccctccaggtcagggaaattctgctggtctggggaggacagctggtattctgtctgtgtcttgatgaccacctggtcagggagtggcggctggagctggctgatgtccaaggggctgatcagaggcacactgtccatggcagccccatcctggtccccagggtctttacctggcttcccagagaagctgcagcccagcttcaccatggtggatggcagtcccttgtcaggcggctccactggcagctgctgcaggacgcggtcggggaggacgacgatgcggatgtggatgcggaggatgc

SEQ ID NO: 470840 - DNA, 1000 bp, Homo Sapiens; identical to SEQ ID NO: 159443

SEQ ID NO: 470841 - DNA, 1000 bp, Homo Sapiens; identical to SEQ ID NO: 340298

SEQ ID NO: 470842 - DNA, 1000 bp, Homo Sapiens; identical to SEQ ID NO: 340299

SEQ ID NO: 470843 - DNA, 1000 bp, Homo Sapiens; identical to SEQ ID NO: 159444

SEQ ID NO: 470844 - DNA, 1000 bp, Homo Sapiens; identical to SEQ ID NO: 336277

SEQ ID NO: 470845 - DNA, 1000 bp, Homo Sapiens; identical to SEQ ID NO: 157622

SEQ ID NO: 470846 - DNA, 1000 bp, Homo Sapiens
ttttttttgaagttcagtgcaatttattgagaaaagaaagtgcaacatactcatcaccagaggatctacagctcagggaattaggggacagaagggagtcaggatctgaagcccagatgtagggagggttccctgggaaccagcagtctggagatcttggccgtgcaccctccagcacagaacccatggctctgccctcctcagacagtgctgagatgactggcttcaaatctccaactcccagtaagaatgggagatgggccagagtgggaaccggccaggctgtgaaggccaaaactggcttgggctcaggggttgctgtccaaagtaaggggccattgcaggaaggtttccaggggcatcatcatcccagaccagcagcaggacctccatggccctgggaaggtcatggggatggagaaaccaggagttcagcttcttctccagggaacttgaggaaaaatgtggttgacccttatgcatctattgatgccaagcagagagtgggaaacactattgcaggctgagtgggaagcaggtggttatagagatttggaacagtagatcacttggtggagctatgctggcttgagctcgtggtctgggagaagcggatactggtgctgcctccaccaccagacttgtagccacttcctccagaagtctggatgctgccagagctggagcccattccactgtggctcacggagatgctacctgcaccgccgagcctgctcccactactgctgctctggtagctcccgctgctacccctgcccccagtgctgccactgctgacccctccatagccactgccgctgccgccactgactccatagccgctgctgctgctgctgctgctgccgcctttgtagccaccactgccactgccactgacccctccaaaaactccacggctactgccagagctgccacttgtgctggtgacattgctgaccactgaaatgcacacggcactctgacattctccagacatcct

SEQ ID NO: 470847 - DNA, 1000 bp, Homo Sapiens; identical to SEQ ID NO: 159446

SEQ ID NO: 470848 - DNA, 1000 bp, Homo Sapiens
acaggtgcagaataattttttttccctctctcgtggtttttcttttccccatttttttcccctgttgtttgcaaagttgaatctggggtcaggagttctaattgtaacctcagactggaattccagatggtgcgctcaggactggaagcaactctcagttcatcaatttcatgggcctacgtatctgctctggccacggcctggcctccatccccactgtggcattaatgcagaacaaattgagacatatcctctatataattagttccagaatttaaaaagatttacggtataataatagaggcagtgccgcggaatcctttcactgaggactctcggggagctcggggaccatctcgcggtggcatcagaacagacgagtaaccccagcggctccaggcactgcgaactgggggagagggggaaattttgcaccgcattcggcagtacctaacggttccgggctcccagatagggtcagcgaggagagttaggacagtaagtggggactggttaaaaaaaatcgacttaattttgaaatgatcagaagaagctgggagtagttatcacaaagcccctcccttgcccccccctttttttaattgaaggaatgacgttgaaattttcaccgccagcgcggggctgggaaccatcctaaacacttgccctgcagccccgagtgggcagattccgaagagttggagtcggcggggaggggaggaacagctgttgggctgtcttgcgcgtggggctcggggcgcgggccccggggagaggcgctagtcgaaagcttgttcctctcccgcgacaggcagcagcgaggtcgagccactctttattacggcctgcgggccccgcgcgcagtgtggctgtccccgcccttgaccgaccgcagcgctttggggtgtttattcagttgtccgcggccgctgggtgactcccggagggcggcccaggcgtgcgcactggtccctggggttgcggctgtagcagcccagct

SEQ ID NO: 470849 - DNA, 1000 bp, Homo Sapiens
gtaagtagtgtctatgttgtcaaggtctatctttgttccagtagctttgcttctactgcacttttctgacatgcagaaacgaagttttggttggcatatgccccaagtttcaaactgtccgctttacattttttttaagtttcttttatttataaaagaaaaaaagcaactcttcaccattctgcatctccaatggctttggaaaatatataatctcttccattaagattcataatgccatccttgagatgaaatttccatttgtttttacttctgtgtatcttatcatattggcatacaacaacattttctgtgtcaaagagttcctgtccttcctcatcactcacatcatcttcactattgaggggctcttcttccacctgcccatcttcagctccatctttctctttgtcttcctcctcatcatcatcatagtcttcttcttcatcttcatcttcttcagatgatgtatccccagttccatcaacttgtaagaccaatggagcttgtgtttgagcaggctgggcctgcggttgctgctggccagttgcagttatctgtgcttgggctggtgtaggtgctgccactgtcgtaggtataacttgagtcttatttcctgtaaataagatttgctgaggctggatgatgacacctgtctgtggtgaaatccctccaggaagaggagccagcacctgctgtataacaggagcttgtactccaccaggctgcatttgtggtataacctgttgttgtagaaccactgactgctgaggctgaaagatatattgggcaccattggctgctctgaccacctgaagaagctggcctgaatttgttaatatctgctgaacaggagtcacacctgcagggagtgctaaggtagcagctgtagcagcagcactcatgtttgatgcattcatatgctgtatcaacttagaatctggaacaataacttgtggtgctgtggcttgctgtgatgcaggaataagaacctgctggg

SEQ ID NO: 470850 - DNA, 1000 bp, Homo Sapiens; identical to SEQ ID NO: 340306

SEQ ID NO: 470851 - DNA, 649 bp, Homo Sapiens; identical to SEQ ID NO: 340307

SEQ ID NO: 470852 - DNA, 1000 bp, Homo Sapiens; identical to SEQ ID NO: 340308

SEQ ID NO: 470853 - DNA, 1000 bp, Homo Sapiens; identical to SEQ ID NO: 340309

SEQ ID NO: 470854 - DNA, 1000 bp, Homo Sapiens; identical to SEQ ID NO: 159448

SEQ ID NO: 470855 - DNA, 1000 bp, Homo Sapiens; identical to SEQ ID NO: 340311

SEQ ID NO: 470856 - DNA, 1000 bp, Homo Sapiens; identical to SEQ ID NO: 340312

SEQ ID NO: 470857 - DNA, 1000 bp, Homo Sapiens; identical to SEQ ID NO: 340313

SEQ ID NO: 470858 - DNA, 1000 bp, Homo Sapiens; identical to SEQ ID NO: 340314

SEQ ID NO: 470859 - DNA, 1000 bp, Homo Sapiens; identical to SEQ ID NO: 340315

SEQ ID NO: 470860 - DNA, 1000 bp, Homo Sapiens; identical to SEQ ID NO: 340316

SEQ ID NO: 470861 - DNA, 1000 bp, Homo Sapiens; identical to SEQ ID NO: 159449

SEQ ID NO: 470862 - DNA, 1000 bp, Homo Sapiens
tttttttcccgtgtttctggaggccagctttactgtgctagaggaagagggtccccacatccggccctggccctcctggtccggtttgctgaagcaacacacttggcctacccactgggtggggcaggaagtctcgagccttcacttggggtgaggaggagggagatcggtcagcagctttaccgcccgctctgctctccactgcggagactggggctccggcagaggctggaccgtgatcttgaggttcaggggtgcattctgggtggattcccttggcatgggtggtcggccctcagcaactgcagccctcatttggctctgtcaccctgggctgccaggacacaagtctttccatgcttttcccagtgcttgacttggcactccctgcagcaataccactcattctggcatcgtgagcagcgcttagaagcctctgcactgcagtaagcacagcggggccgctctggagccactgcctctagcacatccagcctgtaggtctcagcccaccttcgcgcctgcagccgcaggtcctgctctgaggggctgaacacatgctggagctggtgcttggcaattgcctgccacttgcctctgttttctcgctccagccgctcccagatttctgggatctgttccaacaccaggtccttcttaggaggctgggtttcagttagggtcagatgggccaggaaactctgcaagtgggccaggttgggcagctggtccagcagtgtgtctgtgaggaaggcccgaagcttgagtagccgtcccttggcaaaacttgtgaggcagtagcgcgcctgagcctcagggcttagcagcaggttgtacagggcgatccacacttgcccgtccaacttgctcagcttttgctgctctgagggggccacagtatgccaacggctgccctcgaactgctgcagcttgcctccttcccgccggctccagggactatgctccagcagttccaccaggaggcagggcaggttgtgtg

SEQ ID NO: 470863 - DNA, 1000 bp, Homo Sapiens; identical to SEQ ID NO: 340319

SEQ ID NO: 470864 - DNA, 1000 bp, Homo Sapiens; identical to SEQ ID NO: 340320

SEQ ID NO: 470865 - DNA, 1000 bp, Homo Sapiens
aattttatttatttatttatttttatttttatttttttttacactttagcactttattccctgaagttaggaggtgctgcccagcagccatcatacaacctcatcagattccagcccatggacctcttataaagcgtccagtatggccatctgcttcttcatggcagggaggtaaaggctgaggtccctctgcatcccaatactgaaagcttctttccggtggtcaccttcctttacggttaacgcggccacaaaatcttcataggatggagttgcccttaaagctaacgcaaaaacccctcgaactacccagccatggtgttgccgcaatgttttaccatatgcgttattcagggctgtctggatatccttttccccatttttcacttctgtcaaaaatcccttcaaaaatttgagacctctcttcagccacaagagggcttcagtcgctgagttcctaacctgggctacatccgcctccacttcgtgcagcactatcttctggagagtggtaaactcttctttgttggttatatacttctgatttactttcttaatattttcaacaagatccatcttaacaggagcaaacactgtagggccaagtttgtctaatactggaaccacagcacaacatgatgccaagaatgcttctgtgggaatgccactgtcttccagaagttcaatgtcactaaagcttgtgttcatggtactaaagaaagttgggataacttctttgccttcctcccagaggcattctggagagcaacttgagtctgatccagactgagacaagttattgtcatgatttttcaggttttccattctatcttccttcattatttcaccttggacggttatattatcatctgtattttcctcacttgatatgctgcagtctatctctgcagatttcaaatataaggaattcttatttttcattaggatttcttcctcaccatttatttccatatttaaagatccattttcacaagtgctc

SEQ ID NO: 470866 - DNA, 1000 bp, Homo Sapiens; identical to SEQ ID NO: 159450

SEQ ID NO: 470867 - DNA, 1000 bp, Homo Sapiens; identical to SEQ ID NO: 159451

SEQ ID NO: 470868 - DNA, 1000 bp, Homo Sapiens
tttttgttttccggatttttctttaatacagttgccatcttacatgatgtactattaagtgccttcttaatagcatctaacctacccttctgttgcaccgtttggcctcctgggatggaactcttgttaccacccatgtttgtggagtactgttcttcagtacagtacacctaattcatattgtcaggccatataattcacgggtagtggtattaatttctaaagctgaattaaagcacacatccaaaccacatatattttttacttttcaacttaaagagttcatacaaagtctatttcctttctacagtagctatcactccagactgtggtttaaaaatccaagaagtgggaagaatgtctttgttttcaatgcttctttcttccatcctttttctatcctccttttttccttctttccattttctttcttctattcatctccttctttcctttctttcttagtgataagaggttaacagaaatgggctattaaggaaatcaaagtctagtaaacgtccaaaacagagatgagaatagtcacaaactcttctttttgtagtgatgttaaattactgacaaatgtttttttgaaaacaaaaaaatctaaaaaccagcacaagctagtggtgctgcatattatttaagcaactggcgttcttcaatgcttttgaggcgtttcttccggggctgtacaaagtcatcatctgaatcatcactaaatttattatcttctgattcattcctgaattctggtttgggaaaccttttttctggatagaggttctttagaagttcttcaaaataattttcaagttttataccagcattggctacttctgaatcaggctcattgaattcagcacagttttgaaagatcaatctaaaatcagctacaaaatcttcaggttttgagtacatggaataatcttcttgtagtcttttcttgatggttgacaaatccattggatttttaattattttgtaataatcaggcaca

SEQ ID NO: 470869 - DNA, 1000 bp, Homo Sapiens; identical to SEQ ID NO: 159452

SEQ ID NO: 470870 - DNA, 1000 bp, Homo Sapiens; identical to SEQ ID NO: 340326

SEQ ID NO: 470871 - DNA, 1000 bp, Homo Sapiens; identical to SEQ ID NO: 159453

SEQ ID NO: 470872 - DNA, 1000 bp, Homo Sapiens; identical to SEQ ID NO: 340328

SEQ ID NO: 470873 - DNA, 1000 bp, Homo Sapiens
ctagaccactgagaaaatctttatttacaataaatttcaataaaatttgcataaatatattcccaatgtacaattttcacctctgatttcttcatatcatttaaaaagttagtctgtcctgttctccttattcctttcagacaccagtgtggcgctgacattggcaggtggaggggagctgccagggagctggggggtggctgagggctcaggctgcttggggtggacctctctctgggccgccaggctttcagctccatccctgccctccagtttcctctccatggtcgccaccaggatcttgagccacgtgttctcggtaaggaggttttctgaggcatcggccagctcctgcagcttgcgggccagctcctgcagctcacgtgtcttctgctcatagagggcctgcagctgctcactgtgtgcgtggagcaggctgtgctgctcttccagggcccgctgctgctgccgcagccggtgctcatctctgcgggcactggagagctgggactccacctgcacttgtgctcgctggaggctgcttatttctgctctcagtttctggatctctctctccaagtgggagatgtgcccccgctgtaagactgcctcgctctgaagacactccttggtaggagagttagccacattctgggggctggaagcagggtctgagtgatgcaaaatgaacctcaacaggtttggaagggtgatggggacgtcttcggggtatttcacacttaggtcctttctgttgcagggaaaaaacaagacagtaggaagacgatcgaccataaattcccaaggaaggtcattctgagacacgtcaatccttgccacagtgaatgtgtccatgggcaggttccgagctagctggatgaagatgtgattgagggatggacagaagccgcaccacggagcgtaatagagcaggagaacgtcctgtttttgaaggactacttcccaaaaggtatcagttgtcacttcagtgattaaatgc

SEQ ID NO: 470874 - DNA, 1000 bp, Homo Sapiens; identical to SEQ ID NO: 340329

SEQ ID NO: 470875 - DNA, 1000 bp, Homo Sapiens
gacagagaacaaatcggtataatatgaagctgcctgcttcaagaaatccaaatccagttccatgaaggaagaaatgtctgtttttgccgccctcatcgtcacggaaagagtagggtgcgctctctgcctagcagaaggagtcacaggctcagagcaaactcattcaaaggatgttatttcatcaatccacaggggaaggagtgactggctgagcaacgtgtcgagagagcccagcctccagtgtccctcacttgaccctccgcaggtggcgaaagctctgcacggtcctctccatagcatcatccatggtcactagtggctggtagcccatggcctttttggctctctcgcagctgtagtagtggaatgtgccagccagtgcgacccgcatgggtgtgaaggtgggctgcagctggatgacaggactgatcaccatcaccagcagggatagcaggagggccaggtagtaggccacccagtaggggatgtggtacttgggggcctcataattgaggcctgtcaggatgcgagacaggaatgtccagaaagggatgggctcatcattggtgatgtgaaatgccttcccacccagtgtcgagtctcgggagagctgctctgccgccaggatgtgtccatggaccacgttctccacaaaggtgaagtccaccaagttcttcccatttccaatcacgaacttcatcttgccgttcctggctgcctcgatgaggatgggtaccaactgcgggtcccttgggccgaaaatgccatgagggcggatggctgtggttaagaaattcttctcaggatcgttggcgcccagaactgccctctcctgtaagatcttagtctctgtgtagtagtcaatgggtttcatggcatagggaaggtcttcagttccattcttgatatcgacgccctcaaagatgacactggcactgctggttaaaatgagtttctgaaccccagcctctttgcaagtttcaatgacattcttggtgcc

SEQ ID NO: 470876 - DNA, 1000 bp, Homo Sapiens; identical to SEQ ID NO: 159454

SEQ ID NO: 470877 - DNA, 1000 bp, Homo Sapiens; identical to SEQ ID NO: 340333

SEQ ID NO: 470878 - DNA, 493 bp, Homo Sapiens
ttttttttttttttttttttttttttttggattctgagctggttttactttaaattcacagttatggtaggaatgacttagtgaaaacaactaaagagatgatgagccactgtaagatttttctttttttacaaaagtttattcttaaatgtacaacagctccaagacaacacttaattccagctatacgtggcaaaagatgttatggcagggaatagagaggtttaaatacagatgaaataaagggtcaccatctcctcaggcacaaggaacagcttactttttgccagatttcttaattccacctgtggccaagggccccttccccgcggccttcgcttttagctcctcgagtttcttctgctcctctttttgtttctgcttgaaagccttatcttcctcgtccatctccttggcctgcttcttgggctgtttcagtggcttcttcttgccaccttcgcggccggacatggcgcctgccgccgcttccccc

SEQ ID NO: 470879 - DNA, 1000 bp, Homo Sapiens; identical to SEQ ID NO: 159457

SEQ ID NO: 470880 - DNA, 1000 bp, Homo Sapiens; identical to SEQ ID NO: 339922

SEQ ID NO: 470881 - DNA, 1000 bp, Homo Sapiens; identical to SEQ ID NO: 340339

SEQ ID NO: 470882 - DNA, 1000 bp, Homo Sapiens; identical to SEQ ID NO: 340340

SEQ ID NO: 470883 - DNA, 1000 bp, Homo Sapiens; identical to SEQ ID NO: 159458

SEQ ID NO: 470884 - DNA, 1000 bp, Homo Sapiens
tgcttatataacatttaatctgttactaataatgactcaatcttcaaaaggactctgagatagacattatccccatttcacagattaaaaaactacggcacagacaggttaggtcatttgcttagggtcacacagctagtgacaaagccagtattcaaactaggctgtgaaaacatgtaaggtctccagaatgcagtactcagtaaacattcatttatttcctgccagcaggtgcagtggggccccactggggaggggactggtgttctaacaggagcgagaaaatgaaggaggcctggcttaagaccagacatttgaagaaggctccaggcagggaaaggaaaggagaggccaggcccacactgtcccctccctgcccccacgtctccagcaacacaaggcggccagtggaccgtgaaccatttatttccaaactataaagaaacctgctctctgagaaaagacactgcccaggtgatgaagctccagcccctggaggtccaaaacccagtccaaactcagtccctttagaaagctgctgtgccttggaaatgagtctcggctgtcagagcctgggaagtggtgggaagaaccagcccactcccctctcctgctgcgattccagcgcagcttgggcccagctctggccagtcccaggctggcctggtgctcgccccttgtgtgaccaggctctgaagggaggggcaaaagtcatgagtccctggcttggccccaccacctggtgactcccgtccacagctcccagctaccatgatgagccctggcggcttgagcacagtgagtgctggcagcaggctggggagtggcctgcttctaagccatttgccctggctggtcactgctgcccctgggccacaaagtactcctcctcctcattgtcaccttcctcccgctggctgctccggagcagcagctccaggtcggggctggagcccagccccttcaaggccttggggccaccatcacctctggaatgcag

SEQ ID NO: 470885 - DNA, 1000 bp, Homo Sapiens; identical to SEQ ID NO: 340345

SEQ ID NO: 470886 - DNA, 1000 bp, Homo Sapiens; identical to SEQ ID NO: 340346

SEQ ID NO: 470887 - DNA, 1000 bp, Homo Sapiens; identical to SEQ ID NO: 340347

SEQ ID NO: 470888 - DNA, 1000 bp, Homo Sapiens
ttttttgaccttggacgtcatttatttccatccccggctccattacttgtaagggaattggggtggggacagacccagtgtcctgtactttctcttccacactttttacttcttttccccacgtttagtctgtaccatcccctcccccgcaaaaaaaaaacaacaacaaaaaaaacaaaaaacacccaaaacaaaaccacagtaacagattaaaacggggggggggggcattttattagagtacagggatatcagctttgggcagaagcagaaggcagcttcacgtaactcttcatggggggtagtggccgaatctttcggccagcccagccccccttgcggtgccaccgcccactgttaggcctcttgcccagccagcggttgcgacctgccttgccaatgacccgtttgttatgatcaacgttggatactcggcctactgttgctacgcacgtttccagcacctgcatctgcctcttagagggcagctggataatggctgtgccattcaccttccgcagtagcacaccacacgtccctgcagctcggatatattgggcaccccggcctggctcactttccacgttgttgatgagggtccccacaggcagagccccaagaggatgcgcatccccttcccgagcagcaactgccattcggcctatgtggttagagttcaagattgtatctccagcctgcatgttttctgtggcgatgatccagcgtttccggctgcccccagcaaccagagctatgtctgctgacctacagggatcatagcggacttggataaccttctcctcaaagggtcctgacttggtctcctcaggccggaaacgcagaaagtcaatcattcgataacgttgcttgtggcccccgccaataccatgcacccggattcggcctgtgtggtctcggcccccagacttcctcatcttcactggtgtaatggtgtacttggtacgactcttccaggacacaaagttggcattaagggcca

SEQ ID NO: 470889 - DNA, 1000 bp, Homo Sapiens; identical to SEQ ID NO: 340348

SEQ ID NO: 470890 - DNA, 1000 bp, Homo Sapiens; identical to SEQ ID NO: 159462

SEQ ID NO: 470891 - DNA, 1000 bp, Homo Sapiens
tacttactagataagccaaaagacctgtttgttacacaaacatgcatgcatccaggtattaatccattctcacactgctatgaagaaatacccgagactgggtaattataaaagaggtttaattttcgactcacagttccacatggctgggaaggcctcaggaaacttaacaatcacggtggaaggcacctcttcacagggcggcaagagtgagaatgagagccagtaggggaaatgccaggcacttataaaaccatcagatctcatgaaagctcactatcatgagaatagcatgagggaaactgcccccatgattcaattacctaccacaacacctgggaattatgaggattaaaattcaagatgagacttgggtggggatacatccaaaccatatcaatccatatatggctgaaatttacatcagacaatggtaaatatctatgttcaaagtccattgatgctttgagattctgagctattttctggtatggaaaacagacttagcatctccatctccattggatgtatgctgcctcctgtgatgatcaaggaatgcaatggttctcccaagtccacagtgcacatttgccttaaagtgcctgctgcaattttctggtcgtcggctccaaccctggctaagccaacacaaagtgtctcctcggtaactgctggttcttctcctcgtattctttgattttgaacaatctccagaagctgctgggctgcttggtttacactcatataccgtggaggttcatagatcttccttcccttgattagattttccaaagactgctcctttactttgatgtctagtaaacataatgtgtgcatgccattttgtctgttcttcttcactttgtcaaagaagctttctggtctccaagtgtccaaatggatcaccaaccacaaggaatgcaacatcactgatatcagcataatagaaactgtctctccaaacttatataactgtaaaccacagcagcctacagcattc

SEQ ID NO: 470892 - DNA, 1000 bp, Homo Sapiens; identical to SEQ ID NO: 159463

SEQ ID NO: 470893 - DNA, 1000 bp, Homo Sapiens; identical to SEQ ID NO: 159464

SEQ ID NO: 470894 - DNA, 1000 bp, Homo Sapiens; identical to SEQ ID NO: 159465

SEQ ID NO: 470895 - DNA, 1000 bp, Homo Sapiens
ttttttttttttttttttactatcacaatcaatcaatagatttatcaacctggggctggggctgaccgaggaggtggagggtggcagaggctgggggacaaccacaggccagggagaaagaggagacagaggaagcaccgagggtgactacgttgtcttccctagatcaattttcttctggatggctcgtgctgagtggtagatgagcgaatcgatgagtccagccactgtgaacatgcccccaatgatggcgcacacacctgtcaggaagtgggtgaaggacctgtgcttctccgtcagcttcaccatcatgggcgagagctcatagaggacgaagactccgggaaggccttggtcgcccaacagcccattggcaaccttctcatgtctggtcacagagaactgatttgtcctcagtacctctccgtccaccttcatgtacacagtgggcaccaccttcacaaagtactggaacatcatggaggcttggggcgcagtgacattggtgtggtccagggggttcacaatgcctggatagtcctccccaaatgacaggtgctggatgtagtgggtcatgttgatgttgtcaaggccaaagctctgcaagtcatggacgtgcacatgggactgctggaagctcttcccaggggcaaagtggaagtttccggccaccttattgacttccaagaagccatacacctggcagccttcattcttctgctcctgcatcttctggctgaagccctctcgccggcactgctcaatagtatctgggttcttgaaggcccagcctctacggcgatatgcctcccgcacatcttcacaggtgttacagcacttgatatcttctgcctcagcaccatagcagctctcacagcgatcagggtccagggagtcagggtcaaacaccgtcacctcgactttcccaagctcatgccgctcagcctctgagctcacggggatgccatctttatctagtcgttgcttgaacaggttgtgt

SEQ ID NO: 470896 - DNA, 1000 bp, Homo Sapiens
tttttttttttttttaacaaccaaaaagtttattgagtgtctgttggatacattgtactacaagagacagataataatacttcattcaatttgccctattggacttccaaatgaaaaatactgaagaacaaatgatgtttaaacaatactacatgtttctaaaagttataaataaagttatttaaataaaaatatttttaatgcattaggggaagtcaggtggattctttgtaaaaacaattacctgccaatttatttactacataaaattagagttgaactagattttcttatggcagatccatattcatatagaaattcattttaaactagtatttctgattggttagataaaaattgcacatgatctgaaagatcctgtataaacatatacaatttatatcttttgctaccaaaagatagctattatatttcattgattacttttctagaattggtaatttaatgactttggttaaaacttatcaggatttcagttgaattccttgttacattcaaataattgtcattatttgcacattttattctaataaatataatttctcattttcttaatattccagttttccacaacatttgggaagatttacaaggtatactccatttaggcaaaaataactgtcagggaatagtcattgtcaagagcagtttgtattgcaacccacaaagtaagttttttttttaactttttatagtatattctggcaatgtagaaattagttgagatccaaatcttacaaaccttttgaagtttatgtttatgtagaaaagtaaaagaaaataaaaataactggcaaaaatgaaaaataaatccattctaaaagtgtttctcatatagcattctgtacataagctcaagtgacaaacttttatttgcagttttcaactcaatgcaaatgatatgaaaatgcaaaactggcacttattggcattttgcttttcttttaaaagctattaacacattagcatatcttcatat

SEQ ID NO: 470897 - DNA, 600 bp, Homo Sapiens; identical to SEQ ID NO: 159466

SEQ ID NO: 470898 - DNA, 765 bp, Homo Sapiens; identical to SEQ ID NO: 340355

SEQ ID NO: 470899 - DNA, 1000 bp, Homo Sapiens; identical to SEQ ID NO: 340356

SEQ ID NO: 470900 - DNA, 1000 bp, Homo Sapiens; identical to SEQ ID NO: 340357

SEQ ID NO: 470901 - DNA, 1000 bp, Homo Sapiens
catactaaactttttattaaaacagtccttacaacatatttaaaatggcatgttccacagtcaaatatttaagaaaaaaaatctatatgcaattattggcacacaaatttaagaacataattaaaaccaagccagatatctctctgtatttatatatctatatacatatagatatatatccatacagatagatatatcttcaaattcatgtcagtgacctggaatacctgagatttcaagttgttggttttccagatgggtacaaaacatttttcatccactttataaggacacggcagatccagaaagaataactttggttaataaatgctgtctcccaaagatcaaacagaagtcctcaatgggattaaggtttatcttcagaggcttcttccaagtgaaggttggtctgtgatgtaaggaatgactcccacgtagcaaggcactgttcataataatggatattctcctcagccatatctgtaaatgctaacttgatatcattttgcatattttgtttccatctctcccaatctgctttcagggcattattagcacattccactttatcttcaagttttccaatctcctctggaagcagatcagtatctgcctttttataggtcaaaacttcaactttggaatccagttctgcttgtatttggtctcttcttttcataacacccattaacatttcactataaagcacgtactcatgtacaacaggaagcagggcctctgagagtccagacatccgcttttcagtggccttacagcatctgtcaatgcagctggcaacatcctttagagtatcaaccagatcctcttctgacgctgaccacagaatatgaattgggccatattctttcatttcatcaaaatattccctttcttccttataaattctctgagatattttatctatcaaatttattttctggctaaatagttcaataaagttattcatttccatgaactcctctgggcggtttttaactcc

SEQ ID NO: 470902 - DNA, 1000 bp, Homo Sapiens; identical to SEQ ID NO: 159468

SEQ ID NO: 470903 - DNA, 1000 bp, Homo Sapiens
ttttttttttttttttttttttttttaaaattgagatgtttattacttttctactgacagcagtgaaaatcactggaaattatacttttgtcctttttaaatgatttacattaaaatcatactttctcaaataactggtatagcagataaaattcagttttaaaatcctcaaaacacttagatatcaaagatagaaatactgattttttttccgttaatgatgagaagaaataagacaaccagtttaatcaagatctgacaattgcaaattttaagtatttaaattacagataaggaatatcgtttgtgcattttctagcttcatatggtagttggacaaccagaaaactaacagttgtcagactcaatgtcaaataatggaatttgggaaagcattcttaatatcactttcatttaatatgcactacatgcacatgatgcaggtagggaagaagtttatgaatccatgcattaaagacaagacaggctggcactattgccaaacgtgcactgagccaattaggatgttgctctaagttctttatacataatggtttccatgaaaatatgtgcagaagcagaaatgtgtacatatctgaaaacatcttcatttggtttcctgagctttctttgcgttctgtttttcttttgccttttctactagtggtattaactgctggtgttctgctaaagtctttaacaattccataatgaaaggcagataattatgcttccttctgatattctcaatcttgtatctttttaatttctgtacttcttcttcaataagcatctgatttttggcaacttctgactgaatagcacttaacatactattaccttgatctgtatccatgggttcctcctctgcaagttgtctttgtaactctgctatcttctgctcatatatcatttttctgtcagacacaatggccattaaattaaatcgaatttcaccttcactgtacttttgtatccttttttctatgacaggccttac

SEQ ID NO: 470904 - DNA, 1000 bp, Homo Sapiens
tgaacttttttagttttttattttgattcctatggctggacaaggtatctacattctagaacatcttcttaatccctaaacaagtggaaatctactacttatatataaaaagacaagtagaaaaggtcatgattgtctaacaggggaacatgaatccccaaataaattatcttacaaaaatatcatacttgcttttctacttttttactactggtaaaaatgaaaaaaataattcacattaaaatagaatctgtagggtggcatagaagacaattatttttacatattaaagtccttcaaataaatattttacacacaaatttaagtaagtttttaaaaaaaataagtatttacgctatatttttttgctctgctaaaaagagaccacttattaaactgacattaaactggactgcagctcattctctgcaaagagtaaaatgcatgtcacaggcagattggatacacacgtgcatattacatacatacgaaatggctaacactgctgtgcatactactgccataactagttttaccctgtaaaaatactgtagcctatactgtatcaaattgcaatgaaagaacaaaaggtactacttgcctattttagacacttggtcaagcatttaaaaaaatacaaaaattggcccactgcagtggctcacgcctgtaatcctagcactttggaaggctgaggtgggtggaacacctgaggtcaggagttaaagaccagcctggccaacatggtgaaaccctgtctctactaaaaatacaaaaattagccaggtgtggtggccgacacctgtaatcccagctactcaggaggctgaggcaggaggatcgcttgaacgtgggaggcagaggttgcagtgaactgagatcacaccactgcactccagcctgagtgacaagagtgagactccgtctcaacaaaaaaagaaaaaattataatgttttggggacttaaagattactgaagaggggataaaagtcaacactg

SEQ ID NO: 470905 - DNA, 1000 bp, Homo Sapiens; identical to SEQ ID NO: 340360

SEQ ID NO: 470906 - DNA, 1000 bp, Homo Sapiens; identical to SEQ ID NO: 340361

SEQ ID NO: 470907 - DNA, 967 bp, Homo Sapiens; identical to SEQ ID NO: 340362

SEQ ID NO: 470908 - DNA, 1000 bp, Homo Sapiens
ccggtttttttttaatttctctcatctttatttttattaaaaaaaataaaacagtcaccaccaaccacatgacaactcgccaggcaaggccttgcttccctccctcctttgcgtcccatgtgcctagtcagcaaggtcggggaggcaccgatgttagcttcgcccaaagggagtattacagagagaggcttgggaaagggaaggaaacctggacaggcttttcagcactgagaaatcacttaaaactgatttgctttcagtaactggtatgtctgaaatgcagggagggaagaccatgctgtcagcaatcaacccactttttacaggttggctccagggagaggttggttgaaacggtgtttaaaggaaggagagtggtttcaccagcttgctcagctctcctggaacaaagactaaggtgctacgtgttgcttgttaggcttatactacggcgggtctggggctgcaggtctggagtccttgttagtgcatttagtgctggtgagaagggtgggccccagtcttggacgctgaagtcctctaaagacaaggcagagacacagcctcagatcccccgtcatcttccactgaataagggggatggagaagaggtctcagcagttggcctcctgcaagccgagatgcctgccagcctgggcctgcttccttagcgctgtgagagcttatgtctgacgggcagagaggagcaaatgcagtccctgttgggctgactccacgcagggctccccagcttcaggcttgcagggtgaccctgctctgtgacccagcggcggcttcagccccagagggggccgtggcacaggtggtttaggcatagccgccagccatctgactggtggccgcattgctgcctactcctcgccaggcctggtagctgaagaaggcactcactccataggcgatcatcaccaaacacgcaaagaacgaggcagccgcgcgctggttataaggccgggtgcccctcagggatgtcaggtca

SEQ ID NO: 470909 - DNA, 1000 bp, Homo Sapiens
ttttttttttttttttttaaaataatgaatcataaattttatttcaaaatgtaaacgtcactaaacatgcatacacgttaaaacaataaaatttacaatttcgttaatttttctttttgcataggacatcattacaatatagaatctatgccatacaaaatacatacaaagttttatccgagcaagccaaggccagactgggaactgtacaactgtaatacttcactgtagtgatccaggaaagatgaaacgtggccttcggaattatggtgggtgctggttaaaaaaaagttcctacagaaaagaaaaacatgagctccatggaaatggtcttggacccttggattctgccttgggcttttggcaaatgattccagagaagctccaccaatggctttggatgggaaggggttgcctgtgcgggcctggggcagctgagacccggaagcatgcacccaacacatgcacacaagcaattcccagtcaccaaggaaccaccgaaagccccaaacccgacaatgacaatgcatagttgctcagtagtgcctcctttctgctgaggctttccagccccagaggcctcagcactaggcaccaggggcctctctaggatgaggccagggagcaaagtctcccactcacacacccagaggcaggcacctggagccggcacagacgctggggctaatgagcccacgtggtgtctagagccacatgggaggtggcctcttgctcctctcagggcagccaggtacaagggctcctctgctgagtgcatggcctggcaggcattcggctcacacacctggtttccaaataagcacgcactgcgacctgtccacgggccctctagaagaggccagggaaaacaggaccctgaggccttaagaaagctgttcccgtgctcccacccccacccccatgacttcctgcctccaccccccacccccctccccggaatgtgtgacttgtagggtaggggacgctacttctctcccat

SEQ ID NO: 470910 - DNA, 1000 bp, Homo Sapiens; identical to SEQ ID NO: 159470

SEQ ID NO: 470911 - DNA, 1000 bp, Homo Sapiens; identical to SEQ ID NO: 159471

SEQ ID NO: 470912 - DNA, 1000 bp, Homo Sapiens
ttttttttttttttttttttttttttttttttttttttttgaaatctttgaatgccaagtctcttctgtactttcttttattaacatcatagtctttgcatcaagatacatagcaatgatagcaggtttctttttaaagcttagtattaaatattaaatatctttccccatttaaattttacattactctgccaagaaaaaaaaaaaattaaaactcaagttacttgaagcctggacacacttccatgattagccgggctaggtaaaagttggtggctttattcttcctgctctataagcagatccaggccctagaaagatgggaccagggtatataattgtttttgaaaagtgtgctacaaaaatggatggcctgttataagccaggatacaaagttaaggatgggggtaagggagggacattttcttccagaagaaaagacagaatttctgaagagtcccagtccataattttcccaaaatggttggaggagagggtaaaatctcaacatgagtttcaaagtactgtctctgtgaggggccggtagatgccttgctgaggaggggatggctaagtttgaccatgccccatccccagctaggagaatggaaatggaaagtttattgcccagtgggtgtgaaagtgggctgaagcttggttggtactgaattctctaagaggtttcttctagaaacagacaactcagactcttcctctcacttcagcaaagaagttatttttaaaagcacttgggaagttcctcctccaccccgcaggtgggaaggctcagagaagggtgtcatcagtacagccgccttctaggccgtaacggaattcctgaaggttggagactccatagaagtggacaaaggctgctgccaccaccaggacatggaaaatctgatgagactggaaccatatgtcaaattttccaggaaagaagcgctcaggaattcgagcagcataaaggccagctccagtgatgtacatcacagccat

SEQ ID NO: 470913 - DNA, 1000 bp, Homo Sapiens
ttttttttttgctatgtatatacgtgtttattatatgcttattacaaaagaaaaagtcttttgccttattttagggcttccatgtaaaacctagttaaaatacaaaaagtaaattagagaaaaattctgcttaggtagtgaaaattgatagcaacttataagctgtatccttaaaaacctagtcacagatatagaattacgtaaagataaaatgataagcctacttattggcaagaaacaggttaggccacttaagcagcatgtttctaccactatacaaatacatcggcaggtccaaacattaaaccaccattcgattgacaaccttttatttttcaacttaggtaacagtccaaaatcagtgtagattggcgaaaaactaggcaaaaatagcaaaaagtgcagtttaatttagcaaaggctcaagacagtatgtggaaggaaggtgagatttccctcctactgcggcaaggcaagcggcagttactgcccgacagtaacgatggtgtgcgcacccccgatgagaatgctgctgcaacacagactgggacgccgcctcccccattagacctgccagctcattcgtgaaaatctaccaggaacacatcaatgaaaaaaatatgtcaaatatgagttctctgttataagcaataaaatcacaaaatcaactcagatttgaaatttagggtaagctaggacaatttcctactttttaatatatagatattttagatttgacaatcgtttccacatacactcagacaggcttacagaagaatttcaaatatcaaatagagaagctgttaattcacgcacgttatgacttcagttaattcttccagtgtttagacttcagagctgctaataacactaaactcaataccgtgtttgttgagtctgtcaatcaactttgttttggaaaaagctgctccaggtgtgaagaccccgcccgccttaggcagatgagaagcatcacttagaagagtcatggctgcctgaa

SEQ ID NO: 470914 - DNA, 1000 bp, Homo Sapiens; identical to SEQ ID NO: 157673

SEQ ID NO: 470915 - DNA, 1000 bp, Homo Sapiens; identical to SEQ ID NO: 340364

SEQ ID NO: 470916 - DNA, 1000 bp, Homo Sapiens; identical to SEQ ID NO: 340366

SEQ ID NO: 470917 - DNA, 1000 bp, Homo Sapiens
tttttttttttttttttttggatgccattaaagaaatattttattttgtctatatcattgtagatgctagtacccttagattagtaaaacaaaactaccatatgatctttatttaaaaagccttgggttaagctctggagaattttcataggcaaattcttctgtatgagctggatcagtaaacacgccaataaaatctatctccaggaagaatggaccatccactttatcagccaaggtgaatcctatagaagagatcttatcaagcggaagctcatgctgaacatcccggattcttcctcgattagagaagaaaaatttggaaaaaggaatcttgacctcctgccagtagggtcccccgcgggtgaacatgaagtaactatacatctgattcgtcctctggaagaaatctgtgtcctccttgatattcaccatccaaggccgaccatccccacgtacacggagatacagagtattgaactgggaccaatcgtaagacatcttcctctcaaaagcaccccttggaatcctggatatcattgcacagtacccacttcgggtagactccccgtcctgaggcgcctcagagctcagagttccatatagcagtgcactttggttattcttgcccattttcaaaaacacttcacttctgcctccaatcgtcttatcagaagtcactgtccacttatccaaatcttctttcccccggaattgccagacaaccttggcttgttccagcaagacctcatgcagagggtggccttccggtcctctccaatgatccacaatttcatccttcaaaagcctaaaatggtatattgcttcatctctaattgctttatcgaaactaacatcaggcttctcctcagaagaagttatatccaaagcaacttctttctggtgatctccttgcaaatccccttcagtcttcctctgtgaggaggctttgccaggagaagccactggtttctgaagactactggaatactctgcaaag

SEQ ID NO: 470918 - DNA, 1000 bp, Homo Sapiens; identical to SEQ ID NO: 159474

SEQ ID NO: 470919 - DNA, 1000 bp, Homo Sapiens; identical to SEQ ID NO: 340368

SEQ ID NO: 470920 - DNA, 1000 bp, Homo Sapiens; identical to SEQ ID NO: 340369

SEQ ID NO: 470921 - DNA, 1000 bp, Homo Sapiens; identical to SEQ ID NO: 340370

SEQ ID NO: 470922 - DNA, 1000 bp, Homo Sapiens
tttttttttttttttttttatgagtaaagtcactggttttattgagcagctcaaactagttctgaaggcaactgttcagaaggcgttcccaacagcttttgagcaatgcacagcctcccataaaaccttaaaaagtacatctgttaatgtgcacattagtctttgttagtcacgttcactaaatgcattaaccttacatatacttccaattaaaaaaacacataggcttttcagtattttggcctagatttttgttcaaatgagtccaaatgtgtgagtgaggtttacctgttttctgattctgatctataaaaatgggtggtctcaaaagaccagaaagtttattcatagccaaaaatgacaaaaagagttcttattctcccaaaataggaaattttgtattcctatagtcaaaacaataaacaatttttgaaattaaaaaagttgagaatcttgaaattcatttttttcagtagaataaaacaataagcagcatgaaaacgtaaagtgctacataaaagccccacattacataaattttgaaaagtttattggcttaaacagttacaggtgaaacagattacgtatttttttttcaagcatgctattttaattaccttgatatctcatcatgtgctatgttggtcaaataaaatgtcatgagttatctagatctgaggattaaagaggagtcctcagcctttacttgccagaatatacatccagttttagctgtatgctggaattaaggagttaaagtagggctttaaagataatagttttctgaagaggcctttcagtggggcttggacaaaaagggccccaaagaccaattttgctcattaacctcacactggggatcagattgacaacttaaggatttttagggagcatatgtgagatcaaagggaagaagaaaatggtgcccctttcagatggtgcttcaggtgctaaaaaatatcccaacacaaacaagcaggtggctagctgacaggtgggg

SEQ ID NO: 470923 - DNA, 1000 bp, Homo Sapiens; identical to SEQ ID NO: 340372

SEQ ID NO: 470924 - DNA, 1000 bp, Homo Sapiens; identical to SEQ ID NO: 340373

SEQ ID NO: 470925 - DNA, 1000 bp, Homo Sapiens
tttttttttttttttttttttttgactgtaatcaaacttttaattcttagtttttattctggtaaatgaaaacaaaaaataatcaaaaagaatttttatttgtcattgacagttcaatataaattaagtaaaacattaattcatttattctgcactattatcagaatttttctaatttttccgtaaaatgaccatttctaaacatatagcttaatggtcaaaacaagtgcaataaaagattaatttacaagtatcagaagtgaagactgtggtcctataactctttcccccaccaaagttaaaatataattgtcattccaggaaatcaaaatcttttagaatagcacactccaaacaagtgatgggaacactactaattccttagacttcctttggcagcattacttttgataagaagtctccaaataaaatacaaaattttggcacagacattttaatcttgtcaagacaatgtaaggaaatgccccaaaatattattaaattgaccataattaccaatatcagtccctaagataatttttctgaatgaagaattgttttttttgtttgtttgtttttaggattttttttttttttttttttttttttttttgccacactggtttttgttaagacctcatcagtcctgggtgcttgccctcaattcctccatagctatgttagcatatttaatatcttttgctattaatccttaactagttaatccttaaagggctagttaatccttaactagtcccttcattttgtgcattatcttccagtattctccttctctttttttacttcttccctgctacccatgtgctcttggtgggtagttaccaacatatacagaatctgcttccctttgcagcatttcatttgcataaagactggatggcactggtttgctccatctctgattattgtggctgttttgaactttgtgaaaatactcccttggcacacataaacaggaagacacacaaagatatacaca

SEQ ID NO: 470926 - DNA, 1000 bp, Homo Sapiens; identical to SEQ ID NO: 159475

SEQ ID NO: 470927 - DNA, 1000 bp, Homo Sapiens; identical to SEQ ID NO: 159476

SEQ ID NO: 470928 - DNA, 1000 bp, Homo Sapiens
tttatttctaccactcttatggcgattatttattttaccctattatttgtgaagaagcctagaatattttatatttacacggttaaatggtcacaacatttaaaaagccgtagaacagttatagttcatatattaagtttagaattaaaagaaaaggcaatgtttattagctatttcataaatcttctctgaaaagttctcaattcttctcactgaaacttgtaagcaactgagcagcttctgtctgtatctgtttatcctcctctgtgtgtgctggatagtccttggctttcattagccagaaagcagcaagctttttgttgtgtagtttcaagtatgtctttcctaaaagaagtaagtttttgctgtagaagtttggatccacttgttctgccctgtgaaagtagcctaaggccttctcataggtggaactaggaggagttgcaaacagcattttagcaattcttctttgataccaaggcatttcggcaaatgtatagcaccaaatacccataaggtgaattgaagtagcatctttagggttcagttcaattgctttctcaaaatgctccttgatgatatatgcatttgcaattttagccttgatgccttcataatctccaacatcactaaggcagattgcataccacttatgagatgcaaaacttgattcatttttttctagtgctctttttgcatactctagggcttcatacaccaatagctttttctcctcttctgaggttctgctaagctgagctacatcacgtgatgcccgtgccaaacgccacagtaactctgcatcttcactttccttgtattgggttagcaactgataaagtttttctgtttctccgctttcatacaggtagtctgcttgttcaagtatttcttcaactttggctgtggcatgaaccacagcagcctgagagataacctggtaagtttcaaaacccaaatacgacaaagctgagagtaaaaggcctctgttgaaagttcc

SEQ ID NO: 470929 - DNA, 1000 bp, Homo Sapiens
tttcattttgcccaaatctgagttttatttttgctggaatcaggtcatctggcctggctgtcccaccaacccagctgggagcctctgagtggcctgccagcagcatctcattacaaaacagccccctggaaccaggtagccaaggaagcggcccacctgaaaggcatttagattgagaagaaaaactgcaccttcctgacaaaggtcaggggtcacggtgaagggagggctgctgggatcacagggacagcagcatcttctagcagcttggccataccagccactgaggtcctaactgcagccaaggggccgttctgcacatgtcgctcaccctctgtgctctgttccccacagagcaaacgcacatggcaacgttggtccgctcagccactggttctgtggtggaacggtggatgtctgcactgtgacatcagctgagtaagtaacaacgactgaggatgccactgacccagggctggggaaggggactcccagctcagacaggcttggctgtggtttgctttgggaggagagtgaacatcacagggaatggctcatgtcagccccaggagggtgggctggcccctggtccccgggctccttctggccctgcaggcgatagagagcctcaacctgctgccgcttctccttggcccgggtgatggccgtctggaagagcctgcagtagaggtgcacagccagcggagagtcgtcattgccgggtacagggtaggtgatgaggcaggggttgcagttggtgtccacgatgcccactgtggggatgttcatcttggctgcgtctctcacggccacgtgtggctcaaagatgttgttgagcgtgtgcaggaagatgatgaggtccggcaggcggaccgtggggccaaagaggaggcgcgcgttggtcagcatgccgcccctgaagtagcgagtgtgggcgtactcgccacagtcacgggccatgttctcaatcaggtacgagaactgccggttgcggcttata

SEQ ID NO: 470930 - DNA, 1000 bp, Homo Sapiens; identical to SEQ ID NO: 340378

SEQ ID NO: 470931 - DNA, 1000 bp, Homo Sapiens; identical to SEQ ID NO: 340380

SEQ ID NO: 470932 - DNA, 1000 bp, Homo Sapiens; identical to SEQ ID NO: 340381

SEQ ID NO: 470933 - DNA, 1000 bp, Homo Sapiens
tttttttttttttttttttttttttttttagtgagagaaaaatggaattccgttttattttgtcctctctgaaacttccatttacaccatggcctcatctatcaagaagaggaagaaaaggctctgccttataccataaaaatcaagtactcatgtacttgttagaggtggcaggatatttgtttctccagttttttggctctaagaaattacactttcagtaccagtgtagtgaggaaccactggcaaactgttggaaatgtcttctggattagtcagtgtaccatttcataaagtgcttctggagttaaaatctgccaagctgtcaaaagtgtccacacttttgcaacaaaggataaaagatcccagtgggtatcaccgagtccttcccagctgggtctcattattggcactgctgctttaacctccaagccgctggccctcaccccaggcgaagcctcctggccgttcctcaggtagtggattgtaatttggatcctcatctggtgtatcaaaaatagctttcaaaatagatggtgttttcagaattcttattccaccaggttgattgggaaatacatcttccaagaaaaaatatatgtgtccaactgcaatacccaaaaggtccacaatgattgagttccccaacaacaaggaaaatcccatgagcacccagggcagaaagggggcctggaagttgagaaggccgaagaagttcatgcggacataggggttccttcggctccacacatagacgagcattattgtaaaggcctggcccaagaaaactaagctcacaaacagaccaaaaagggtcattaagaatccaccaaaaaggaacataaatacaaagtctgctgtccgacctcggaaagagccttcttctagcattcgacagtaacgatatagaaaaatcatgttaaataaaaaattgaatccaactggcccaaaaaataagaagttggtgattaatctccatatttgaaagtgtttaaagatt

SEQ ID NO: 470934 - DNA, 1000 bp, Homo Sapiens; identical to SEQ ID NO: 340382

SEQ ID NO: 470935 - DNA, 1000 bp, Homo Sapiens
ttttttttaaaagaaagtttttattaacaaaagttttccttaattcacatttcaactttattaaatagtccaagggtttcatttatgaacacttattccagtttagttctcttaaattcatttgcttgttgtgcatttatgtttaaaaaggtaactaactgcactggaaaatgaaaatttatagttttatcaataggtcagtttttaaaaaatcaaaggataaggatttaaaaatattagggcattacacctttttcagaacaaggataatttacagaaattatacaaagcagattttcatcaaatatcaattatttagcgatgttttatttagctgaaatgttatttcacttgtaaaaactatctccggttacaaaaaaaaatcagaaaccttattaaatttaacctgcttttacaaatgtcctaagaagtcttaagctaaacaaaatttaagtaggaaaacgataatttaaaaatagtgtgttatactatttctgtggtttatgtacatatattaactggtctcttggataggaaacatgactagaagtttatcacactaagcactgtaaaataaaggcaagagctaatcatcttctagcaaaaatagtctctatgcaacaattgcaaatgtcaaagctattatttagtagttaattgcctgctacaatacataaaacaaagtacatttactggattgtttttcagtttgcagctgccctcttgacatcccaaataaggaattcccgttaagtaaaacctgcagtgcaattcactcagtggttagtttcaggccaagcctccccctaccattatgcttgttcttccccaccgcccccaaatcctgcagtggcaccatattattaaaaacactaagtacctgggatttatgcctcagagcaagacatcatttgagtaatttcaaatgatacacagctccttcatgtaaaaaagatgttttgtggtcacaattacttcaaaaagtaattatattcaaata

SEQ ID NO: 470936 - DNA, 1000 bp, Homo Sapiens
tgacagctggaccccctgggagcttgttatacatgcagaacctcaggtctcactccagacctgtttcagaatcggcatctattccccaggtgatttggatacacattaaagattgagaagctcacctctagattggtattgtcaaatgaaactgctagtgaaaatcctccttagcttgccaagcacagtgctcatgcctgtaattgcaacattttgggaggccaaggcaggaggaccacttgaggccaggagtttgagacagcctgggcaacatagtaagactgcatctctacaaaattttaaaaggccaagcacagtggttcatgcctgtactatcagcaccttgggaggccaggagttcaaaaccaactcggccttcccaaagtgctgggatttacaaacatgagccaccatgcctgcctcacatgctatctgtatcaccacgtgtcctcaaattttcattaaatcacaatgtacctaaatgaaggggacgtatgtaaagcacctgactcagtgcctagcacagtaagtactcaataagcagaagtactgaaatgtcctgacaccatttagatgtctttctctgcttaagacaacagactctataacatccttttagtaaaaaagttttatcatagcaaaaaatatgtatttataaggactgtcaggagggataggctatttccaatatcacagttttgtttgttggtgccttgaaaagataagatttattactcaagagaatgaaatccactgataggttcacagaaacatgttccatctacagcgtaaactggaagatttttctggaagtggctgttggccgacgccaggtgtttgaataaagacagcagcatcttggtgttatactcaggaacagcttacccccttccatagggtaaaaagtggcttcttaggtctgcaagaattcgggttgtactcgggctactttccggaattctttagtgtgggtcttagggcactgcatctcacaccagct

SEQ ID NO: 470937 - DNA, 783 bp, Homo Sapiens
tttttttttttttgtttcacaaaaagctacaagtttattaacataatgtattccaatatgtatcaaagtttcaagcaggtcattttgaacctcaaataagaaatcacaatatttagtattaattaaaaaggaaaaaaaggtggtagttgtcattcgtgggatttagtccaaatgaaaatgtagaaaacatttattttggtggatctgtgttgatgccatatttctccttgagaagcttcaactgttcctccttcttctttgtgtccatcttctgaaatgccctgttggcattatagtacaaaaccacaaggtatctgttacaaacattgaatcccgataggtgatcacatgcattcttggcatcaaagatgtcctcatagaccacataagctgttcctctagtttcaggtgtgttccccactctgatttgacgaataggtccatatttcccaaatatatcatacatttcttcagctgtgattttgtatggcaaatttcttatatacaatatccgatttacttcaggtggaagtcgaatgttcgccctcttggccgcttgcatcgccatcttggcgggctgatgaagttaccgtagcagatactgaaattcctccggagctcgctcggcttcgggggttacaccgcgttagatgcaggacatcaacatccaggacccgccggaagctgttacagcggaatagcgccgtcttacgctgagacgcgctgacgtagcagcccccttcgaatagactccggggtaaaaccgagcctgagcgagactcg

SEQ ID NO: 470938 - DNA, 1000 bp, Homo Sapiens
gaaagattataaatgtcaagattttattaccttaaataaatattagaatccctggaagaatactcatagagccatcttgtggaggccaaaataatttcaatcacaatacattttctttaattactttaatataaaagacagcagtttcacatttcacatatttgaaaaacatttcaaaaccctctaacaagtatttaatgaaaataaatttatcgaagagaaacaatgaccacaaaattaatactaccaaatcattactgagactttttgcattacaatatttggagagtaggtgaagaaaatatagaacagaacatgaacattttaaaatgatattccacccaagctttatctttttgctaaatcttgtggacactagaatatatattcaagatgttggtaaagatattcagcaagccatacttcaaagatgttaaaacagccctccaccaataatatggcattgcaaacccttctatcccatcccttttcagttaaaagagagaatattaacagagatttagtaatagtgaccaaaataagaaatcagtatagtcaagaaagatatgtaattattcaacatcatttggtacggatagatcaatgcaactcactaagtggacaacattgtgaggggagtgggtaacatgattcagagtcctgtgggtaaattcatatgcaataatcttattccaatcaatctgtaaagtaaaagcactacatccacattaacattataacatcttacagtaatataaaagccaaatcattgttggtacgtcattttctttaaagtgaacaatttaagaaaacttcacaagagtctgcactttggaaagatacgatcagagtacacagtagagacaaaacaggcatcttcattgtaattttttttaataaataaaagcacattaacaaaaaaggaaggtaagcagcaccggaagcctttgacgtttgtaactaaatgctggtactcaaatggtctagctggttaagtttc

SEQ ID NO: 470939 - DNA, 1000 bp, Homo Sapiens; identical to SEQ ID NO: 159480

SEQ ID NO: 470940 - DNA, 1000 bp, Homo Sapiens
tttcagtttggaaaaaatgttttattcctctttgcacagagcagtttatgaaggtggttttctcctgactccatgcatcttttacacaaagatgcccccttaaatatgccccgttatctgccccacctcagtgctggagaactggcagttagtaagtggggcagaatgcttaagtctcaggaaggtttttaaaggcatttttgtggggaggaagttctgggtcaaggggaaagattagacccaagagtgagtattccattctccatcttcctggggaaatccaaaccccaaaggttttatgaagaaaagcacctctctcagcgacctagagacagggagagcacagacctactgcttgggtgtaaggctgaggcagagagagggtaggttgcagcgactgcagacccacggcagagagtaaatgcatgtcggggagctgaggggacagagacagcctagaggcccaagtcataagttccactccttccccagttctgagtagaaacttttcttcccaagactagaatggagttttagttttaggaactggctttgctccaggacacagagaagacaaaccaggcaacgatcccacaggtagtaagggtggacagttaaggtagctaactaagagatggacactcgccactgcagttttgaagctatatgccagatcagggtacagaatgcattttatatgccctgttcaatacaatttaaatcgctgtttcttccatgttgtcccttccctatgaactattcccaaagcctcttccaaggcagaggacagggcagtaagaaggaatggaagaaaacactgaggtcactaagtggggttagggcttagattggataaatccctacccatccccgcccccactcgttctatagaaaagaattctctttctctctccccttgctgggctgttgggatgagggccaggtagaggcaaagggaggaaaacactcagcacattctttctcctactttaatctgaag

SEQ ID NO: 470941 - DNA, 1000 bp, Homo Sapiens
aagcacttaacatagcacctggtttgtggtacctcccaaatcaatggtagctttcccaaatgaacacaagtatttgaggctcctcatgtttgttctaaagtcaagagtccagttagtaactaaccactagttgtcctgccatgactaggtcaagtgaggccacagtgattcagtgattcttaaagccaccttgcaaagcaggtaatacagttatttcctgtcctgcagaattcaagaacctttatgcagttcctgtcctatgatttaaagaggtcagtgactccgctactctcactacatcttagagtagagtggtagagtagttgatctgagacagtaaggttccaggagatggtcttgccctactatatgtcaggaacagctagccttagaattcagtatacttggtggcccacccctaccccatgccccagtgccttatttggtctaaagcacctaacttttccattcttaatcagctgattatgctaaatgcgtaaaaaagaaaaacaccttacaaatccacagggaaatcaaagaacaattcaggtttaacagaaatagtctattaacaataaaaagttggatgaaaaagcacactaaaggttctaggggctaccataataaaggtagataggaagagttttcattttttttgtcttcactgtacaaaagaaatacattatatacatgtattaagtgcctcgtttgtatccagtttttcattttcccgatgtgttattttgctgttgctgctctgccaaggcttgctgaaggcgcatccgcttccgggaatagtgctgccaatgtagaatctgctgttcatcaataaatttcgcacactgagcattcaccagctcctttcggaagtgttcatattggagcagctctaacatgtgtaaacactgagggtactttagatacttggcatattctgggtctttccagtaaagcaagtatttaagataattaacaaaagctttgtctttgaagtaacctc

SEQ ID NO: 470942 - DNA, 1000 bp, Homo Sapiens; identical to SEQ ID NO: 159481

SEQ ID NO: 470943 - DNA, 1000 bp, Homo Sapiens; identical to SEQ ID NO: 340387

SEQ ID NO: 470944 - DNA, 735 bp, Homo Sapiens
tttcccaagccacagccccgttttatttacactcatcccaaagcacatgatggggctgaaggacgaatctcaggggagcagaaattagctgaaggccacagaggatagagacggggggcagggggagaacagggaaaggacagcgaggatggacaggccctcctggagcgttctccgtgggctcccgcgtctccttcaggatttggacttggacacagcaagtccgatgagtccggccagtcccgccacacccagggccatgcctcccacgatggccatgcccacgagtccatctttcttcatggccttgtcaatgagccgctccagttccttggcctggttgttctggggctctgtctgcagcaacccgcggacgtactttaaggccttctcgtattccttgagccggtagttccccacggccaggtagaagacgtaatcccgctgttcctccttgctccctttgggcagcagctcctcgagcagcacgatgcctttacggatgtcatcattgtaccttgtccgcaccaggcaccaggcgtactcaaactgcgtgctcttggacaccgagcctgctgccttctcagactgaaatttcttttcaaacttcagcaggtcctccacagacaccagctcgttcagcacggcctccatggccactgcccccgcgagcctcacactacagtctactgtgccacagtctccatggcccagtggcaggggcggagaaccact

SEQ ID NO: 470945 - DNA, 903 bp, Homo Sapiens
ttgagtcccatttgaacaatctttataaaggtttcttcatgttatttacaattcaaagtaaatttactttataagcagctagggaattctttatttagtaatgtcctaacataaaagttcacataactgcttctgtcaaaccatgatactgagctttgtgacaacccagaaataactaagagaaggcaaacataataccttagagatcaagaaacatttacacagttcaactgtttaaaaatagctcaacattcagccagtgagtagagtgtgaatgccagcatacacagtatacaggtccttcagggaggcaagagacctttcgactggtctgcaggtgcctccaaatgctggtcctgtggaacttctttctgagtctcgttttcttccaacgcagtctgtggtctgacactcaagtgttcggatttccgggaaacgtgactacctccgtgttgagtccttgcttcgcctactcgtcttaaaatgacaccttctgccaataaagccttccctgtttccacaaataacttctcttcatctgtttctccaagtttctgtagctcagtgtacttctccacaaaccgttgacaggtagacttgaagtttggattgaatagatcaaaagctctttgaccagacccatacactgaataaaacttcgctctaatccgatcctcgtggtaccagatgtcttggatgggagctttggctttgccatatcgcactcgaggcctttggaagacgggctccctcagcgggggaaaggcgtcatatacgtcaaaccacaggggcttctccttcagcaccccggcccgaaccaggtcccgagtccgagagaagatgctccctacggtttccagccggctgcctgccatgatctgcgcctggtaccgagcgtgacta

SEQ ID NO: 470946 - DNA, 1000 bp, Homo Sapiens; identical to SEQ ID NO: 340390

SEQ ID NO: 470947 - DNA, 1000 bp, Homo Sapiens; identical to SEQ ID NO: 159482

SEQ ID NO: 470948 - DNA, 812 bp, Homo Sapiens; identical to SEQ ID NO: 340392

SEQ ID NO: 470949 - DNA, 1000 bp, Homo Sapiens; identical to SEQ ID NO: 159483

SEQ ID NO: 470950 - DNA, 1000 bp, Homo Sapiens
tttttttttttttttttcttataaaagtattttttaataaatcaatgtatttcaatgttgtaacatgatagcccaatgctatatcaaggtagcaaaagtgaagattcctggtattttgatataaacactatgaatgacagtacacttgcattcaacttcacaagaaattatcttcaggtccatgaagattctttgacagctgtaacacttttcaaacagtaaagatgtacatgtattgaaagagaagacaacgaaagcctactaactgatctgggctctaaaccatactgaagagaaagagatacaatggttgtatggctagcttgctgaaaaaacatctaaatcttttaaagaaagaaaatacagcatatatcaaagttacagagtagcttacagaaatggagtcataaggagacacacagattagaaccctgaagcagtgaatgtgtttctacccgttttgtgatggaaagaagccatggatatcgagtcctgcagctgtctgtggtgttgaatctcctcatacacacaatgctaccaatggactaaaaccagaattccctgctctgtacaaatgctggtgatgggtaacttgctctattgctgtgggtcagagcaacagctggctggattcaggcatcaggacgaggctaagatcatacaccactgccttctacactcctacagagtcacactttccaaagctgatgctccccttgtaagggtttaaaaaaaaaccccaagggtatttaaagcaaacagcagaaaccagaagcttctgaccctctaacatgtattactgtccaacccaccatgagaagtatgttcacttggtgacaacaaagagactccgtatcatatgtatgttaatgaccagattgttcatatgggatttttcttaacagattatcaggttgagaatgattctttttctccaagggcaagaaaaagctggctaaatgctagttaattaaatccattctcaattttgaactgtaga

SEQ ID NO: 470951 - DNA, 1000 bp, Homo Sapiens
tttttttttttttttttttttttttttttttttttttttttttttttttttttttttttttttttttttttttttttttttttttttttttttttttttttttttttttttttttttttttcttttttttttttttttttttttttttttttttgccttgtaaatagtagaattttatacaaatataaagttttgcaccttcaaagctatcactccaataagacacttattcaattaaacaaataatcttaaaaactattttaacaatgtacaaatatattcacaacataatctgctgattaagacttcaacaaagtttataatacctacaacagaatttacagatgcctacaatagtttgtagattggtttaatttacagttacatagattgctttaagaaataccattaatacaaatgcataatttacaatatccccattatagcaagaaaaaaatagattcagaaaataaaatgtcttttaggcatttattatgccaagtatgtaaattattattctcattatgacatgagaataatgctcttttagtggtaaaagatctattagctcaaggtccactgaagagctttcaatctagctatcctttctgtaaaataaatagaacagcagcaatctctgggtattccttaaactatgatgattccacttatgttaactgggccttaaatagatgacttcttacaaacaaaaataaaattttataaagtagttaataccactggccctaattgttttcacttgcttgcatacgtctaagaaatttccccacgaagtgcatattaaaaactaacaattatttctaacttatacataagccaaagtgctcactcttaccatagaagcaaaactttctcctgaaaacaatctacagaaataatatgtaaacatatagagctttgagacagactaagaacatcctcctatgttctatggatcaaaatgcaaaggtctccattacctatgtaaatgaacactttc

SEQ ID NO: 470952 - DNA, 1000 bp, Homo Sapiens; identical to SEQ ID NO: 159484

SEQ ID NO: 470953 - DNA, 1000 bp, Homo Sapiens; identical to SEQ ID NO: 159485

SEQ ID NO: 470954 - DNA, 1000 bp, Homo Sapiens; identical to SEQ ID NO: 159486

SEQ ID NO: 470955 - DNA, 1000 bp, Homo Sapiens
tttttttttttttttttttcacagttaaatgcttagtcttgattttaatattagatctgagacattttccatgggtttgctctttttcaaaaattgtttctctgcctcagtgaataaaattaaagagaaatagaatgaagactgtggggcagggaaacatttctttatcttattaataagaaaatgaatattctctttgtccattctgaattttaaaaatctatttttttctatataatactgaaatatttaacaattcataaaaaacataagcatttacattaaaatacatccttaaatagagccctgtaatttttaccaggaaccttgtaaaatatgatgaatatacatgcatgaatattaaaaacaagaaagaccacttaacattcaaatagaaatgcagcattacataaaatataataaatatccaggatatcaaatccacaaattgatcactattctgatttagattcttttttccagttaagacttttactaatataatttattataataaccttatgagttaagcataactaatgtgaaaagagaattcaattaatcttactgctgaaataacacaaatttttgatattttgcaacatattttaatctataacatataaaactgtcattttagcaagaaatacacatccatataactaactgctaagttaaattctcttcgatgtccaaaaaaatagcattaatagtatgaaaaaaaataagctaatattatttatgagataattttactgccttagctcttaggctttgtcaataaatgttttaatataaatcatataacttaagtactgtatttacaaaatagaaactttttaaacaaaattctttacaaaacactgtctttacacatttaaagggtgcttttctttacaatgtatgaaattatatttttacctccactgtttacctctccttttcccgcatgtttcaggatcctccccccagtatctcagaggtgggtttttaacagttg

SEQ ID NO: 470956 - DNA, 1000 bp, Homo Sapiens; identical to SEQ ID NO: 340397

SEQ ID NO: 470957 - DNA, 1000 bp, Homo Sapiens; identical to SEQ ID NO: 159487

SEQ ID NO: 470958 - DNA, 1000 bp, Homo Sapiens; identical to SEQ ID NO: 340402

SEQ ID NO: 470959 - DNA, 1000 bp, Homo Sapiens; identical to SEQ ID NO: 159488

SEQ ID NO: 470960 - DNA, 1000 bp, Homo Sapiens; identical to SEQ ID NO: 246514

SEQ ID NO: 470961 - DNA, 1000 bp, Homo Sapiens; identical to SEQ ID NO: 466019

SEQ ID NO: 470962 - DNA, 1000 bp, Homo Sapiens; identical to SEQ ID NO: 159489

SEQ ID NO: 470963 - DNA, 1000 bp, Homo Sapiens; identical to SEQ ID NO: 159490

SEQ ID NO: 470964 - DNA, 1000 bp, Homo Sapiens; identical to SEQ ID NO: 159491

SEQ ID NO: 470965 - DNA, 1000 bp, Homo Sapiens; identical to SEQ ID NO: 159492

SEQ ID NO: 470966 - DNA, 1000 bp, Homo Sapiens
tttttttttaagttttcctaaggagttttattgatagccaccatggaaacccacatggtcttatggaagaataatgtcagaacccaccacatattaattcaaagatctctgaatcctgagttcatttccttgcctgattcccttcaggctccatttttatctcctggttaaagcccactcagtttccaggttcagtggaccaggaggcagcctcttgcagaagatccttcatagactttgctccgggagtgcctcacacttaactcctctgcaacgttggaatctcaccacgggagagtctcctctcctctaaggcttcctcttctcttttatagggaacctcactctcctgcccaccctggactccccaggggtctggggtcacagctggggctggctgcgggtgcttccaaatagcttgttccttcacgcctggggagggagccagccaccccttcctctccagcattttcagctttgagcctacagcatcaatctgggacactactccttccaggacagtctccagctgcagaactctccttgtgagcatgtagaattcttctcctgaaacccagcctcctgctctggcagcctctggacccgatttgccttgtgggctgctcacaatagatcggcctagtttctcaatctcagtgttgagggccaccctctcttcctccaggtcctgtcgcattttttcctgttccttctcatccagaatacgattcccatctctgtcaaacttggtgaaggtggccgtgagctcagtgatttcatgctctgcgtgtcccagttcccttaaggtgttggtgaaatcctcaaactggatctcctgctccccaccctgcaggaccttctgcacatccgaaaccctctccttcctcagacgcagtcttagtagggtcttgttgtagccctgtttcaggaggtcagaaagttgcagctcatccttctgtccagccagctcctccttgacctctgaatatgtgtcattgat

SEQ ID NO: 470967 - DNA, 1000 bp, Homo Sapiens; identical to SEQ ID NO: 159493

SEQ ID NO: 470968 - DNA, 1000 bp, Homo Sapiens; identical to SEQ ID NO: 340411

SEQ ID NO: 470969 - DNA, 1000 bp, Homo Sapiens
ttttttttttgaatatatttcccaccttttatttccatcggtatcatccgtttaaaaagaatgacaagaagattcccatcagtccaaactggaccacccacactttgaaaaagttggagcatttcagccggctccgcatgatccatcctgtcttcagtcagtgccttctggaagggagggaaagtcttggatgcacctggcactcaatccactcggcacctggctgctgctgtggtcctggggctggaaggaactcccactgggcacacatctacagaggagtgcgtggcgcagtgaggacggttactgctggagccgacacacagcgaactacatacttttagaaagagcctctgtcacatggctagaacaacaacaacaacaaagaaaacccacaaaaaacctggagaaaatatatctaaatctctgataggtctcttagctagcagtgagttcagtatgacagcacagagtctaaaaatattaattaaaaataaattgctttggttagcatttaaacctttcccattcaatagaagatttctgtaatgaggaatgctgaatatatataaagcctgacactcaatcttgaatttcgggggcgtattttactgaactaagagcataaaacactggcgtcccaggctgaagccatttgctgcgacctggtgtggcccccaaggccagcgcctcatcgttatgccccacagcacttggaaggaagacttaaaggacgatttgaggggcggggaaagggtggcacaggaacccatgtggcaccctggcagagatggcagcgtgggaagcaggaaggtcagggcagtgggtgcaggaggcaggcaagctgggcagatggagccacagctggagaggaagcggtcgggacacccttcccaggaccctgccctggacaccttccccaggacccctgttctacaggacccctgttccttcctgtttcggggtaaaacaccaagctggggaaggggttagggacgca

SEQ ID NO: 470970 - DNA, 1000 bp, Homo Sapiens; identical to SEQ ID NO: 340413

SEQ ID NO: 470971 - DNA, 1000 bp, Homo Sapiens; identical to SEQ ID NO: 159494

SEQ ID NO: 470972 - DNA, 1000 bp, Homo Sapiens
tttaaaaattaagctctttaattatgtgcacacagattttagaaaaggtagccttttgtatatagatacctttacattctttaggctgacttttaaattgtcatcttttttcaactacagtttttgtatatagtaaaccagaagatgtgtatggaccctgttatggccaagcatctcaaagatgaagagagaattaatgatagttatatttcactcaaaatgccaaaaaaaaaaattcaacaaagtaaaaattttaaaacttgactctaactagttcctttttgttttacattctcaaaccattgtcaaatattctaaatatctctgagaatttctcttttaatgcttcacttgtataatcttaaaatcctgacagtcatacaatacagcatgtagtaggtaccttttcttgaggcacattcaagtgttttggcaaacagtaaaaagtatctaaatgccacaggttaaaatgtcaagttttactgagtcaccaacttcacctcttttgatctgcctgttctccaagaacatcattctccggaagatccaagttcctctagttgttttctttgtgttgtttccagttcttctagtcttttgcgaagtagagagagttccctttgatgttgttcctcctgcatatgaggaggaaatggtagttccatgcttggaaccatggctgatgactgaaagctaacaggattgatagatgctgttggaggcatgttaggaaccaaaattagacttcgaaattcattatgtcttctctgtatatcttttagtcttttttgaagccttgtatagtcttcaaaggaacattttgtctatttaagacctgatttctgtttccaattcttctttctttgcctccaagacttctactttctcttgtagtcttttcaatttgttttcatgaagagattttctctttttctgggcaattgcagctcgctgcagtttctccttagcttgattgtacttttcttctctgtctgtgata

SEQ ID NO: 470973 - DNA, 1000 bp, Homo Sapiens
tttttttttttttttttttttttttgaatttaaatcatttattttcacttattactaatcttactacagagaataatacaatactataatgtatcatcctcagtaaattaatcttcacttagaaaatgttactgataaaatacaacatttagaattttcatttaaaaatacaaattttatgaaaatattaagaatttttaggatgggaattataaaagtcaatgctgaacaaaattctacttttagatagtatgtatcttaaaatattatgaaaaatattctttattctgaaaacaatgtcaggaaagaatacctgagttctctaaaaccactagttctaatttcaaattgctgttttggtaacataaagaaaacacatttacaatttaacactgcagttacctgtcaaataattagaatagaataaatgttgcatatacattaggttgaacattatatatattttaaaacacagggtggtttcatttaatcttttggtgaattggatcataagtcctacattctaaaaccatctggaaacatttttctggtagccctgaaaatccattctgatgccttatcagtagtcattatgaccaaatgacattagtattttgtggccttgatagtttatacaacttaatatatttgaaggtgtgatgaagtggctccatccttccatttgtttatatggtctgaaatcacagttctgcagagtggacatgttttctctctgttaaaccataaggtcatgcactcttcacaaaatatatgctgacagatgagaagaattggcttctgaaattcagcttgacatattgaacaaatatcatccacatctgaacactgtctcttgctggcagccactccataacttggttgtgtaaaaaatattcgtaaaacctgtctgaaagttctcagatgcccaaaaaattccaaaagttttaatatgaggtagagtaaagccagcagtatcccaagactccatctagttacgtta

SEQ ID NO: 470974 - DNA, 1000 bp, Homo Sapiens; identical to SEQ ID NO: 159496

SEQ ID NO: 470975 - DNA, 1000 bp, Homo Sapiens
ttttttttttttttttttaactaaaaacaaagtactacttttatttggctcatttctccatttattagaataaccacatttggagaggcatgaagcacttaagttttacatgactacaaagttatcacaaatctcaaactttttagccacagatatttcacctctgtttaaagaaaaagctttcaaaacatctgagttagcttaatacacagagaccctgaaatatatgggaactacatattttaaatgcttgtacttcctgctctaataatgtcttctttaaacggaatccagcataaaagggattgaaatgtataaggtcatgatgcaaatgctttggagatagtgaaactgatctgcacaacatggaaaaagatgtcatgtgcacagaagttctgcaaggattcactgagccatctgggcttccatggcttgtgctgtccattctggtgctgtttgactaattttctccaaaaggttattcacttggaaacaaagtgattggatctgcttatcccacgttggcagggcttctcgtgtttcaaaatgaactattccatcaatctggtcaataaatccattcatacgtccttcggttatcatttgagatgctatcttttccgccttagctgcagggatctctaaaagagctccaagttcttcgaaggtaatattattatataatttgcttgcagacaacaaattgtgttcaataacagctctgtccaagatgctggaaccatcagctgtagttgctttttggtgaggcatcagcatggcagcaaattcttgaagttgatttcctctgatgatcctatctagatacattttctctaggatcccataggcagcaagttgctggcacctttcatccttaaaaagagtagctagcatccgagaacgctgctgccctgctgatgctaagatcgtacagtgcaaagcatgttttaaggcctctagtctttcactttcgtggactattgtcttgtaagagagctca

SEQ ID NO: 470976 - DNA, 1000 bp, Homo Sapiens
gttttttttttttttttttttggaaatatttcagtttatttaaattgttaagtagaatatgaaaccgaatttgtagctagtaccagagaatggacttaactgtttggtgtttaatgagaacagcttctacacaggatcccaagagacttacagaaaaggggcaaagccctaatattaagcaaataaaactcatgtttcaaacagattatacaaaaattgatttatacttcatttcccttttttgatatttagaaagtgcagatttaacaaaaggtagccatatcctttctatgtacaatgccgattataattatgcaaaactgtcagtctgttatccaaaaatcccagtgtttagctctccaaccttaagtcatggaattgaataagaattaaagagggttaaaataaaaaagctaatgccacattccagataaagggaagcaacaaatacattaatctaacaacagtaggtttaacctaaacttttcaaaaagcttaacatcatttcattatatttttagtggaaaattagggattatttggcaatgctgctttttactagtagtaaacaatgataaagtcaagtgtgggaataacctaagaataacaaccagtgaggcatataaaattgtttttagggcactatctgaaaaatttgtggattttcatagcagatacgtccctatgttgtttgcttatgtgagccaagaggtcattaaaatgctattcacgacacagaaagacttctcaatggaagctgcagtcctaaactcagcctctgctagaaatgaatcatgctattcacaattctttcaacaaaggtatcatcttaggatgctagcagcatagcaaacttcacttaccctatcctaatgataagcaatgaagcaaaactagaaaaaatgcagtgaaaaaaggacagggttagagatagccaaagatcttatctttacatgaaaagcctttcgttgtcctttttccaaactcatggtaatacaag

SEQ ID NO: 470977 - DNA, 1000 bp, Homo Sapiens; identical to SEQ ID NO: 159497

SEQ ID NO: 470978 - DNA, 1000 bp, Homo Sapiens
ttttttttttttttttttttttttttttttgttcttccaaaaatttattaagtgtttacttttaaagtggaaacaatgtttttaagaggtgatataaagaaatgcccccactgtaatccctaccatatgttgattctatgtggtgggagggaggggagaatgattcctttttctagaatcagagaatttggaaagtatcaagaaagataataacagaaagcatgaaatagagttgtgctttgaagatgaattggatgaaattgttatgtgaagaggagttttccaaagttgcagacccaggattcctggccagaagcatgaaaacgtttctttcttactgtttctaggacctaggcagcatttcttccatgtctgcaacaacataagaaacaacagcccaaacagcagcagcaacattcatctgctttggatccatgacagtcatggtgtctccgtgggagtgatggaagaagaaatacttgtataagtcatcaagtagactggctccaggcactccagcttggatccaaaagttgatgtctgtcccttctccatggctcaggacctgagtgatattgaggggctgcagcaggctcataacctcctccatgatggccctggccttttcactgccagtgaattgcagcccagtgggtaagaaggttcctgcgtcagactccatcaccagactgtagttggaaatatttaccttgtgtaactgataatactggaaggcaccaactccaccttgttcttctgcagtccagagcaccagccgcagagtcctctttggacgcagcccaagatctttaataagtgagagtgcttcccatgatataaaggctccaccgccatcatccatggcaccctgcccaacatcccagctgtccagatgtccactgaccagtacaacctgttctggatatttgctcccagtgatctctgctacagtgttgaaggaatcagtatctgggtaggtctttgcccccatctttagctg

SEQ ID NO: 470979 - DNA, 1000 bp, Homo Sapiens; identical to SEQ ID NO: 340420

SEQ ID NO: 470980 - DNA, 1000 bp, Homo Sapiens; identical to SEQ ID NO: 159499

SEQ ID NO: 470981 - DNA, 1000 bp, Homo Sapiens; identical to SEQ ID NO: 340422

SEQ ID NO: 470982 - DNA, 1000 bp, Homo Sapiens; identical to SEQ ID NO: 159500

SEQ ID NO: 470983 - DNA, 870 bp, Homo Sapiens; identical to SEQ ID NO: 159501

SEQ ID NO: 470984 - DNA, 1000 bp, Homo Sapiens; identical to SEQ ID NO: 159502

SEQ ID NO: 470985 - DNA, 1000 bp, Homo Sapiens; identical to SEQ ID NO: 340426

SEQ ID NO: 470986 - DNA, 1000 bp, Homo Sapiens
tttttttttttcacagttccgctcagatattttatttgtgtttgtctttttctttttttggtggggggaaggggacaggttggaagggagacagaaaaacaaaatcaaagaggagaaaaaaaacatgactcttcccaccctccaccacccctggccccaggcctgagtcaatgagggtgaggatgagcacacacagcgggcgaacagcaataacttaggggaggagcgccaggagaacacagagtgactgctggactccacagctgaggaggctgcctgtctagaggtccgaagggctgggcctggggtaagtgagcaaactgaggaaggtgggtgaaaagagaggactagggactggagaaacttcactgagtcgtgggagataaagtgctcaatgctctagatttgggctggaagggctggagtcagctacctccaggggggcagggcccgggactggcgggtgcgtgacctccgcccggctagagtccctggcagtggctggcgggaggcagggggccctagctggcgctggctgcgtggtagtagccgggggattcgggtgggccgttcaccccgaagcaggccccagctggccagtgtgtggatggcccacgggggcaagtgggatgctaaaccctggctggcccgtgccagacgccagttccagcccttgcacaggacccagacccttgccaacagagctaatgggtgttgggtggtgcggggattacgccgccggggcccagggacgggcaggcggctgcggaagccatccttgttggttttggggtacagtgcaaacagaccccggtcccccacagccccacagccctgcagggcccggaaggccatgggtgacaggcgcagcagaacccgcaaccagagtcgagatatgccccggcgcacccgggggccctgctgccgcacccatctgccccccgctgccatagccaccagaggtagagctaggcctggccaagctaagagccaggcagct

SEQ ID NO: 470987 - DNA, 1000 bp, Homo Sapiens; identical to SEQ ID NO: 340428

SEQ ID NO: 470988 - DNA, 1000 bp, Homo Sapiens
ttttttttttttttttttttttttgggcagtcagaaaattactcattttctgacacatttattgaccagcacatattctgcccaaatgctgccctctatgtgctctggtctgcgtagtctgggtacgcctggggcccatcgctagctggcatgtactgtgacgtgcggtggctgtgggggcaatggtggtgcagagctgggagatgggggaacatgaccatggaggcagcaggctgtgcagccccagcagccactagggtcaccggtacccagagatggcaaaagggcagcatgccaggtgcaggaagtcctgtggtgtccatggcaagggtactacgggacgctgtgggaagggccaccacaggcccgtaagaattcatctgagtgggagatccagggacatagaggaagggcagcgctgcaggcccagggacagcggccaccggagtgacgtgagcctggctgccctctgaccactcgccggccggctgggtcactggactgttgtcactcgccacggcggaatcaggcaccatcacaggagttgctggtggagcagagccactcctgatttgggtgttgggaccggccggttcccggtgttgcggtgtgacctggtcattctcattcggagacgtgtgatcttgttgctcagtgtctgctggtgccagacaggatccagcagcttctggcttgtcctcctcctgatgtcttggtgcagacttgacacccactcttctcttcatcctcacgaggaggtgaggggagtctctttgaaagtaaggatggcagtagaactctaacttattcaagatggagaccagcctttttgcggagaaaatgcgggtgaaggtcctgaaagtgcattgacgccgttttcggaagccatacaagtttagctggcggaagaagctctttatcgaagttgtggcaaacactttgtgtgcgacgtcccttttgagaatctccttttcaaagagtttttgattgatcactctac

SEQ ID NO: 470989 - DNA, 1000 bp, Homo Sapiens; identical to SEQ ID NO: 159504

SEQ ID NO: 470990 - DNA, 1000 bp, Homo Sapiens; identical to SEQ ID NO: 340432

SEQ ID NO: 470991 - DNA, 1000 bp, Homo Sapiens; identical to SEQ ID NO: 159505

SEQ ID NO: 470992 - DNA, 1000 bp, Homo Sapiens
tttttttttttttttttttgtcaggaaggaatccttagcgattattttacagttgagggatgagatgcccggggtggacaaccctctggtttcggtcacaatcagccagcctctcgcgctccagcaccccctctattgcttcgccgtggtcggtgtcttctttccttcacacctttggtacagacccagccggcaccgcgcgcaacgccgctagagcccctcagagccccagctcccgaccacccgccggagaatttcgagtccctcaggaaagcagctcccattggccagcccggccccctccccgcacctcattggctactgtcctgcaggtcccgccctctcggcgcctcaggttccagcgagggcgtaacggcagtgaagtgaaaaatggcgggaaaggccgcctctgagctggccgtgcatctgcgcaacgctggcttgggagccggccggtggtggaggagccctcgacgacagcctcaaggcctgccgctcctcacgcgcccggctgccactagaccatggacgcaggcagccgcgcgctccaccgctccgggcccggcgctccacgccgatcggacgggcgtcgctcacaccaccgaggcgagcccggacactgaagccactttgttgtcctcggcccagggctgcaggttctgcagcgcgaagagcgacgagttgtgcaggcagagagggtccgggggcagcggcggccgcagcggccgtggcaacgcgtcctgctgcagatgcaggagcagccggcccgcgcggtgccgctcggcctcgcgctcctccgccgtctggcgccgccacttggtgcgtcggttctggaaccacgttttgacctgtgcgtcggtcatgcgcaaggccttggccagcgccgccctctccgcagaggccaggtacttctggcgcaggaagcgccgctccaactccagcacctgtgagcgggagaaggacgtgcgcggcttcttccgcttcggaggggtccggtttt

SEQ ID NO: 470993 - DNA, 1000 bp, Homo Sapiens; identical to SEQ ID NO: 246515

SEQ ID NO: 470994 - DNA, 1000 bp, Homo Sapiens; identical to SEQ ID NO: 340436

SEQ ID NO: 470995 - DNA, 887 bp, Homo Sapiens; identical to SEQ ID NO: 340437

SEQ ID NO: 470996 - DNA, 1000 bp, Homo Sapiens
tttttttttttttttttttttttttttttcaaggtgcatttatttattaacaaaaacaattgtaagacaaattgtgaaagcaaaagcaggctacaaaacaaaaaggtttttgattgcctttgccttaatttaaacatgttacaggtaatatgccacagctgataaatgctataaagtgtaagttagcatttgctaatacaatttaaacattttcccccacccagagcactacggaaaatacgtatgtgtatggtaaacgcttcctccttcaagtatcacaatcttgtggtcacgtaatcttcgtgggtgactgtgtctgggaggtttagatcatagtctatactagagtcctcttcttttgcatgtttctcctttggtattataggaaccgtgtcctccaccaccaccttctctgacttgaatggacacactctctttcctacctgtaaccccagtgtgtccgtattcctttctctatggtctactaacacacattgttcactgagaccgggaatgctcaggtcaccccgtgaagctaatcctcgagattccagttgaatatttctctcaagtggtcctgcagcctgttgacgagcaacttcttctgaaacagagaagatttggtttgcattttgctcagcagcattttgttttgatcgtctatgaaataacccaaagtttttgatatcggtcacaaaattcacttttctctgcttctccctgggcggctcctgaaccaccagggcagagccattgcttatgttatgtctttcagaggcaattgctgctgatctcggatgaatcagggtggttaaatcaaaaaggctgaaattctttttcttgtccttgctattaccttcgctatcactcttttcatctgagtctgccgaatttgaagactccttcgaggcattcgcagattgtattgtggaaagtttgcttcctcttagtaatcccaggacttcaaagcggaaactagaaatgtcttgctttagttcct

SEQ ID NO: 470997 - DNA, 1000 bp, Homo Sapiens; identical to SEQ ID NO: 340438

SEQ ID NO: 470998 - DNA, 1000 bp, Homo Sapiens
gggacagagttttactctgttgcccaggctggagagcagtggtccaatctcaactcacggcaacctccacctcccgggttcaagtgattctcctgcctcagcctcctgagtagctgggactacaggcacatgccactatgcccaactagtttttttttctatttttagtagagacggggtttcaccgtgttagccaggatggtcttaatctcctgaccttatgatctgcccacctcggcttcccaaagtgctgggattccaggcgtgagccaccgcgcccggcccacagttttattctttacaggaggtcagtgcccatcatgttccctgtctacagacaaataaaaagctgctctctccagaggggcggcagcagtcctgatggtccagtgagacccagaagcttccaggagaccttcagtcccgagtccctttcagtcatcatcttctgagtctgactcttctgtggactcagatgcgctctctggcaagtcgtctcccatctgctggaaccttcccgactgtgaatcccacatgtatttgatggtcaccttgaattcagccatctcatacccaaaaagcttcaggacgcgagcctgctctggggtcagcacatcgccctccttgcacacctcgtagtcagacagcagagtcaccacacctctcttgagggcggtgggcaggcccagctgcctgagctgtggctccatggagtgggggaactgctccaggggccctggatccaggctcacagtgaaagctgctttgttaccagctcgggcgtagtccatttctgtgtatttcgtgaaccactcattcacctcttcctttgtgcggttggtgaacaggagacccacctcacccctcaaccttttgctgacctggtgcaggttgtctttgtattcatcagatgggctccgacccaaggccaccatcatcaccttgtttttgccaaagaacatccggctgtgcttccaggcgttccggatgtccttcagct

SEQ ID NO: 470999 - DNA, 1000 bp, Homo Sapiens; identical to SEQ ID NO: 340439

SEQ ID NO: 471000 - DNA, 1000 bp, Homo Sapiens; identical to SEQ ID NO: 340440

SEQ ID NO: 471001 - DNA, 1000 bp, Homo Sapiens; identical to SEQ ID NO: 340441

SEQ ID NO: 471002 - DNA, 1000 bp, Homo Sapiens; identical to SEQ ID NO: 340442

SEQ ID NO: 471003 - DNA, 1000 bp, Homo Sapiens; identical to SEQ ID NO: 159507

SEQ ID NO: 471004 - DNA, 489 bp, Homo Sapiens
ttttttttttgaggtttgcaattttattaagaaaacaaaaattcaacctatacaaaaaggagaaatgcttccgttccaggaggcggtactgcggtgggagcagcagccaagtccgcgggaaaccgagctgctcgggcctgccctgcaccccccgcgcccccggccaggctaggcgtcctgctgctggatgaaggggttggggatggcctccatgccgtcctgcgggcagattagcaccacggacgtgccccggcacaccacgaggcccagctgccgggtgtcctccgtgagcttgtactggtcgtcagggtctcgcatgtactcaatggtgccgtccagcacaaggttgaggagtgggtcgaagcccttcaggattccactggcttcgcggcctccctggaactttacccggatcgtcttgtcgatgtacttggacaagtccaagatgctctcctttttcttcttctccttatccgccatcttgtcgcg

SEQ ID NO: 471005 - DNA, 1000 bp, Homo Sapiens; identical to SEQ ID NO: 159508

SEQ ID NO: 471006 - DNA, 1000 bp, Homo Sapiens; identical to SEQ ID NO: 340444

SEQ ID NO: 471007 - DNA, 1000 bp, Homo Sapiens; identical to SEQ ID NO: 159509

SEQ ID NO: 471008 - DNA, 1000 bp, Homo Sapiens
aattttctccccaaaatagccacattcttttatttgatgattcaatacatttttgattcaaatagtcaccacataacctaggcacgatattaagcattttacaagcaaaatattttactgattttcttttaaattgccagagtacaataagtgaactggttaagagacatacttctgtacataaaaatatccatgtatttatacaagtgtatggaacagagtttaagataataaaaccacaacatcacaataaataggatgtgttcctactgcacagcacagcacgctttatcaggaagctgccaagtctttttcaaggtgctttatgtttttctgagctaggctcagatttccccaaaaaaggaataggttagtaatggctggatctgaatgtctactttcataagttgctttttattttcatctccaataacaggaatggaagatatgataatttaattattttcaaaaagtctttgcaacttaccaattctattccaattcagttttttaaaatgcagattaatctaactctagcaccatacgagaatgaaatacatgtatttttgtcagagcaacaatattttatatcatctttgttcctctggctataacaattgtgtttagaaaaatttaccaagctaaaaatagttgatctaagttgtcataaaaaagaatattaaatacctttggtaaaaatagatatatttaacaagattagaaaagccaacagttataatgtcaaaaggagaatataaaaatgtacacaatgaaacaaataaactgacttatcgataaagtgaagataaggccactcttcttttcaggtttatctcttccaaaccatgaatgtagttctcttcttctaaatggcagaaattttaataagaaatatgaaaaatccagtctgtcctatcagcacgacacaagtttaattcatagcaacatagttcctttttaaaaaccaggtttgtagtacatagaatgttctggtttacat

SEQ ID NO: 471009 - DNA, 1000 bp, Homo Sapiens; identical to SEQ ID NO: 246516

SEQ ID NO: 471010 - DNA, 1000 bp, Homo Sapiens; identical to SEQ ID NO: 340449

SEQ ID NO: 471011 - DNA, 1000 bp, Homo Sapiens; identical to SEQ ID NO: 159510

SEQ ID NO: 471012 - DNA, 1000 bp, Homo Sapiens; identical to SEQ ID NO: 340450

SEQ ID NO: 471013 - DNA, 1000 bp, Homo Sapiens; identical to SEQ ID NO: 340451

SEQ ID NO: 471014 - DNA, 1000 bp, Homo Sapiens; identical to SEQ ID NO: 340452

SEQ ID NO: 471015 - DNA, 1000 bp, Homo Sapiens; identical to SEQ ID NO: 340453

SEQ ID NO: 471016 - DNA, 1000 bp, Homo Sapiens; identical to SEQ ID NO: 340454

SEQ ID NO: 471017 - DNA, 1000 bp, Homo Sapiens; identical to SEQ ID NO: 340455

SEQ ID NO: 471018 - DNA, 1000 bp, Homo Sapiens; identical to SEQ ID NO: 159512

SEQ ID NO: 471019 - DNA, 1000 bp, Homo Sapiens; identical to SEQ ID NO: 159513

SEQ ID NO: 471020 - DNA, 1000 bp, Homo Sapiens; identical to SEQ ID NO: 340458

SEQ ID NO: 471021 - DNA, 1000 bp, Homo Sapiens
tttttttgaaaggtcatctcgtccactttaatatttatatccgtagtttcacttggttcctcatttttatgtttttttttaaattaaatacaggttatcaaagtataaatgaaaggtaattgtttattactggagaagagaaaaatgtatacaagaaagtctagattctttctccacatgcactacttttggaataaagttccaaatatcaactttgaagatacttacaaggataaatttttcttaacaagtgaccaattactgtgttgtggacattttttcatagaatccatatactgtaaactaaatatattcttatagtttacaggaagcttggagcaattatgtattaacagagaagatggtattatattttactgcaaaatattataaaagtgatacaattttgtggctcttaaatgtttaattacttgatttcaacaggacaatgaaaaaaaaccaaaaatcatcaagacaggcctggctttaaggttttttgtattcgattcgttctactttcacatcatctccaattagctgatacacataggtgaccactgtagaagcctggatatccatcaacacaaatgatggaataatgtttgtttccaaggcattatatgccccagtggcagaacctggattaatgtagaatttattttcatgctcaaatgcttcaaatttgtgtgtgtgtcccgagataagaatgtccacatcaaattgcctctgcaacagggctaagctggccatatctccccatggaataacttgatgtccatggatcagaccaattttgaactgtccaacagtcacaactttctgttctggataattcagattctcatcgaagtctcctctcacaatatgaacatcaccagccagagtcttgagatagtcataactctctttggtgcaaaggtttcctgtgcagagaatgtgctgaatttttcctggcaccaggagttttttgaatttagctggcaaactgttgcaccggtgt

SEQ ID NO: 471022 - DNA, 1000 bp, Homo Sapiens; identical to SEQ ID NO: 340459

SEQ ID NO: 471023 - DNA, 1000 bp, Homo Sapiens; identical to SEQ ID NO: 340461

SEQ ID NO: 471024 - DNA, 1000 bp, Homo Sapiens; identical to SEQ ID NO: 340462

SEQ ID NO: 471025 - DNA, 1000 bp, Homo Sapiens; identical to SEQ ID NO: 340463

SEQ ID NO: 471026 - DNA, 1000 bp, Homo Sapiens; identical to SEQ ID NO: 340464

SEQ ID NO: 471027 - DNA, 1000 bp, Homo Sapiens
tcactgcatgccgaaccactgctcctggtcagcccactgggccgcctcactgtcgctgccctccaggtccccttcttccccactcccttccatgtcgtccacatcctcctcctgagtggcatccgtgggactctcctccttctccatcttctgcatcccctctagagacttctggtcattggggtccaaacttagtgctatactatactggtccattgcctcctgatactcattgacagctacaaggaaatctcctaggatccgatgcaggacacagtcactctgattagccagtgcgttcctcagcaaagcaattccatcttcatatttctgttctctgctaagtagttctgcttttttcaccacagccttaatgtaatctggcctttgggtcagggctttatctaataatgttttggctttctcctgtgtcactgggtcttcaagacaaacggtggctaaaagggtaagggtctgtgcatttgctcccagagttttgtaaacgttgttagccattaccattgcttctcgaatactgttggaggctaagtaacattcgataagaccttcataacaatctaagcgacaaggtgcgagccgtatggcctcccgaaagtggattattgcttcttggactctgcccatgttcctaagtgctgctcccttaagtagcagagcttgaacactattactgttcagctgaatggccttggctcctaaatagagggcccgggagtagcgtttgctatagaagctgtgacagccagaaaccacccacggttctgcatgctgatcagagatattgaaaaggcggcatccaaggttctcaacatcctctagccgcccttctcgtgccagtaggtagccatatacatccattccttttatcagataaagatccaacatctgtgcctgttcaaacttgaggacagagtttttattgtctccagctctgaagtacagatctgccaagcttcccaataggtccacgttatctcgc

SEQ ID NO: 471028 - DNA, 1000 bp, Homo Sapiens; identical to SEQ ID NO: 340465

SEQ ID NO: 471029 - DNA, 1000 bp, Homo Sapiens; identical to SEQ ID NO: 340466

SEQ ID NO: 471030 - DNA, 1000 bp, Homo Sapiens; identical to SEQ ID NO: 159514

SEQ ID NO: 471031 - DNA, 1000 bp, Homo Sapiens
tttttttttttttgatcaaaaaaaagaaagaattttatttagatgaatgcctgattataaactatccattaagactatttcaaaggtttccccttctacccaacaataacaaatatgctccaaaatattcccttactaagccagacttctccatgtaagagtctcaccttattttcctattgaaaaacccgaggcacagttcttaggagacacccccagtgattcagaagcagacagcaactgcagccctaaatcctaggtccagctttttcttatagaatactttccagagtttacgtagttttcaatttatttaaacacagcattcagtctttatagaaataaaaatggtaacatctcttactacattctgaaaacttaagctgaaaaaaaaacagtgtgccctatatttaattttttcatagaaaactcttcttccaacagtgtttaaaatccaggttaattatatgacataagtaacaagtaatctccatcttctccaggcttctaatcagtttcagaacaggagttttggttaaacctcttccacttgttgctctctcacaaaagctgcaaactcaggatcattggcatacagttccaaaactctcattctctcttgaatttcctctctggaaagctcactgctctcatacatctgtctgatttcttctctgctcagcccaccaatcacgtctccgctagcagagctgtagaagggatgctgaggatagggtccctcatacttctcacatccagccctgtgactttcatacacggggttgtacttcacagcattctcaatagatgagaggctgtcaggctgcctgctggagccactgaagggactctctctttcactcctgtcatggtgtgcttgaagagtcctgatgaagaagtagatgatagcagaaaagatgacaagaagtccaaccacggaggcaatagtgatgcctatgatcacgggctcagacacaaattcctcacagtgcttgcctcg

SEQ ID NO: 471032 - DNA, 1000 bp, Homo Sapiens; identical to SEQ ID NO: 340469

SEQ ID NO: 471033 - DNA, 1000 bp, Homo Sapiens; identical to SEQ ID NO: 340470

SEQ ID NO: 471034 - DNA, 1000 bp, Homo Sapiens; identical to SEQ ID NO: 159516

SEQ ID NO: 471035 - DNA, 1000 bp, Homo Sapiens; identical to SEQ ID NO: 340472

SEQ ID NO: 471036 - DNA, 1000 bp, Homo Sapiens
tttttttttttttttttttatttttctgactttttaattccaaggtttgaattatttcttttttcaagaatgatgaataaaacatgtaagacattcttgaccccacagtgatctctaaagtcagctcaaagcctcacccagggtggatcttcaggaaatatttgttgcttcaatacatttttgtgtaaaaaatatttagtgtcagcttactaccctgcctggagaccccagcttcttctctttcttttctttcccccatcccacgccattccttctctctctgcagcaaggcaaatttctacctctagagactctgccattgtcaggaaaggatttagtgcctttacttatgaactaactttttcttcacttttgatatacaggtaagttaaataatcctgactacagctgaaaggactaaagtggccatctgaagtagcctttgctgataatttttagagataagaaataagatgctcatcaattagcccaaaaggatgaatgagggtagagtatgtgagaaggcagattctgggaccttgcaattcacagagttgttgcaataagattggaatttaaaggagagtttgaatatatcaatgttttgattgtctgtatatttttgtgtctgtgcaagtcatacataaatctctgccagccttgtgctttgtggcaagtctctctcagctggtgcagggacgggagacctgtgtctcttctcaaggcagggccagtgctctaccacagtgctcctgagcacacagtccctgggacacccaggagtatgcaggagcatgtcctgggccacctgttgttccttccatcagcaagatggtggtcccagttcctggcctggcattgtgtgttcacactgctgggctgtctgagaatattgggcctgaggagcaaaaatcacccatgggtatgtgtgtccagaagcctggagtaatcaaacacgccttcatgggtaggcatgtttctcttagtgacgatgatggtg

SEQ ID NO: 471037 - DNA, 1000 bp, Homo Sapiens
tttttttttttttttttttgatgctcaacaggatctcacgtttattgagaagtgattaatggtaaaaagaaaggcaatgccctttcctcattggctgaacaagaaactgaagaaacattcacgacacgttttacagtatttttctcttccaaaatgcatttctgtaaacgagtttttaccactgttctcagctttgaaatcaaattaatcctgacttaatcagtataatgtacaagaacagaacatttcttaggactcctagtactttactttgagtaacaaaaggtcagagaaaatgaaccacccttaaagacacaaccttgggtaacactgttatattctcctagacaaaaattcttcataaaaatgttcttccagttcggaaggataaaatcaaattcccactttctggggtggatgcccaaaaccttcacaactcaagtgttctccaagtgcaaatgtccaaatgggaggaggaaagggtttaaaaattagagaaaactgtatgcacttacggacttaaaaatccgaaaaacatagtaaaaagacaaaaaacatagcattatgctctgaaatcacaaccaaagccaaaataaaagggacatttttcacctaaactacctagagggattttttgtttagttttttctttttcttttcttttcattttccagttaagtcctatgtcttttgtgaaattccaatacttaaactgcaagtctgcaatcgtctctgaagtcagtgaaattaagaaaaaagtcctaattctcttgaaggtcattttttcctcttaggatatgcagatgcaaccgttgctgcagtctgtgtagaactgccttttatttcccacgaccttgacgttcctttttaacactttcttcttcctctttggcgtttctcatagtgtgagaagtcatcaaaaatggaagtggtgtgcttgtagctggctataattttcaacacctgcttagccttttccagaggcacttcctgagtgtcc

SEQ ID NO: 471038 - DNA, 1000 bp, Homo Sapiens
gctgccagggtgtctataaaatgccagtcatcaaaactatggaaaaacagtgcttacgtttagaaaaataagatcacaggacctcagatgtattgtaggtggcccttaactacctgtagtttaaaagttttgctatatggtacagtgtaaaacatactgaattataaattccataggggaagtaaacatagaacccacaacaactcagctcctcttaggagttatcactgaaaataacaatgtgtttgtgttccatgatctctgaagaacaaaaaattggtttacagtttgaaacacattcttctttcaagaataaagttacttataccatttttaaaccaccaaagtcctgcccagaaaactctaaactttcctgtcttccatcataattctgaatatcagtggcaaatcagaatctcttaggtgaatctttatgaatcaagtgatttttcaaagcatgatatgccttggtagaaatggactgctcttaaattcccacaaaataaacaagccaggtgataaagaaacaatattcccgccccttctctcttctgtttcttccttatcgtaattaggcagagcaaatgacactgcctccacaaaataagaattatcaacagtaataatattaaaaaaaataaaaggtatgtcaacatttgaggaaaggtgggattgtaagtgcggtatttcttcatgtgcagttctttacttcataggggtcccctttggaatgaaaaggcctagtggaatgtgtgctcccctcgaacaatgtgtgatgaaaactcataacggtcctggcttctgtagccacagatgttgcattccagtgggtcccggtagccatggcaacccatgtgaatggtgtacatgacatggtctaggaaaaggactcggcagtgctcacacttgaaggccctaatctgttctccttctccattgaagaccttgtagatgtccttcagagagcccttaggagccttggtagtatccaaagctttga

SEQ ID NO: 471039 - DNA, 1000 bp, Homo Sapiens; identical to SEQ ID NO: 340473

SEQ ID NO: 471040 - DNA, 1000 bp, Homo Sapiens; identical to SEQ ID NO: 159517

SEQ ID NO: 471041 - DNA, 1000 bp, Homo Sapiens; identical to SEQ ID NO: 340475

SEQ ID NO: 471042 - DNA, 1000 bp, Homo Sapiens; identical to SEQ ID NO: 340476

SEQ ID NO: 471043 - DNA, 1000 bp, Homo Sapiens; identical to SEQ ID NO: 340477

SEQ ID NO: 471044 - DNA, 1000 bp, Homo Sapiens
ttttttttttttttttttttcaccatccaaaaaagtacagttttattattattcatcatctgagctgttacacaggagcaagcagggtgtggatggggaacattgacagcgggggcttctgggattttcacagggcaagtactgagctcatactagacacgaagctgtttaacagattggggaggcaagtgggtgtgagcagctttcatttttatctggaacaatatgcagggatgtcttgctgccgtgtcttagaccaagtgttgtctttctcctccaacttgactaaagatgctgcaggtatcgatgtgggtggccccagtggtttggtggtgtaagtgagtatttcccaggtgtctctaactctgaaagagtttcatttggaaggctggtactggcagatccacgagatacatatagtttcttatagtgaactgagccgggaggcaggttgaagagcaaccctgtgcttccagctatctggccagggttgccattctccctggcggcagattcctgaggacgggctaggcatctgtcttgctggaggagacttaggagaggctcacgtttcccatcaggctggggctctggaaccaggtgccgagcggggaagggatgagagtagccaggctctaaggagctggtgcccgccagggaggagaaatgccacagctccccaggccgaacagaggccctcctagccagggacggtgagaactgattcacagccatgggaccaggcacatgcaagttgcagttggcggcacggtttgtgacaggtacttctggttgtggctttgtccatggagacgagtaacgccactgatttggagacatgctatcatcgtttttcagcatcacaccttcactctgactcgagggggtcaattcctgggggctcttgatattgctcagagctctggagaagtgttcatccactacgctgctgatgtccccttggaagtaggtgaaaaggacacaccgggaattccattcc

SEQ ID NO: 471045 - DNA, 1000 bp, Homo Sapiens
ttttttttttttttttttaaatgacaatttttaaaaatgttttattacaaagcttcttttaaaaaaatgctcagcacattaactcaaactggaatgacaaacgttaggatgacagttttgggcaaaggctgtgcttgcttttttaaaaaatgggtacatcaatgctcattttaacaactggcataaaatcccactaattggctaataaaaacagatacaaatacagaacatttaaagtaataacaattcaagtgctgggctttttacaacaagggggtgataaggaaagaaatgaaaattcactgcaaaccagtctgctgaacgcatctgttaaggtttactgtttaaaaaaagaaaagaagaaaacagaagaaaaaataaactgaaatagggctgccaattgctaccaacagagtggggtttggctattacatttatttagctctactgaacaccttacaagggcggagaagccactatgtgttacaggcaattcacagagaagccacttaccagacaagctgtctcagaaaaagaaggcttctttttatgtcattatttcaaacttttccagaactttcaattttatttaaaagctcatagctagcaaaatatacaagaaaattaaaactaaaaagtgtaaattaaaaaaattcaagtttaaaaaagcaaaaaaaaacgatccttttgcactgttaaataaaagctttaggagaaaagaaaagaaagaaaaatgaagcagaaacaaagagggaactcttccatgaactcctccactggggtgctgatggatagctggttgctggctccagttgcgcatgacaggcaaatgcagccaagttaccgtccttgccgaaaggttacaggtttggatgcaagatgctctgggaagtgcacgcagatatggggggagaaaagctgctcagctgccccacagcctgctagcattctcatgtgcttttacatttccttttaaaaaacctttttatgctttattttg

SEQ ID NO: 471046 - DNA, 1000 bp, Homo Sapiens; identical to SEQ ID NO: 159518

SEQ ID NO: 471047 - DNA, 1000 bp, Homo Sapiens; identical to SEQ ID NO: 340478

SEQ ID NO: 471048 - DNA, 1000 bp, Homo Sapiens
ttttttttttttttcatttttgttttctttttttgattgaggtaaataaaaaagctttatccagcaacacggagataagagtctgtccaacccgacaagttccagaccccaccctgccctcacatcaggctcttccggtactgactgtgcggggtggtctgtctgaggtgggagtccggggtctgcaggtccatctgtctgtacaggtctctcagctccctgacctcctgcagcaccctctttgcctggctccaattcgatgatgcctctcccagcagccgttccgtctccagcagcagctgctctgactcagaatccggcggagaccgaggggggtccttggcctttcgcttcccatctcccagtccctgaacctctgccagaagctcctgagtctcctccagtttccttgctaccaggtcctggatccgggacagctgccccgggttggggagggcaggggttgggggttcctcagcccgcagctggagggtgcgggcagaggcagcatcccgctgagataggatctcctccagggaggcgcagcggcctttctctgtgggcgtcaacttcttgggtgcctggggggtgtaggtggcccctttgtctgttttttcccaaggtcgggagagactgcttgcccggtctgcggagggctggatgcggtctgagtccgctctccgccggctccctgccagctgggccacagacttgtccaggtcaacccgaaagctctcagcacaagaggttggttcctcaggggaagggtcttcctcttggatcaagtccaaggtcagcatcccatccgaggtagaggtggaagccacagccattaggtgtccccttgttggggggcggcgggagtgctggatttttgccctgtctcgagtgggatgggcaagatagctgtcctcctcaacggtgacctcatccaagatacggttcttggctcgggtgatggcagagttgagggcattgatccacgattccttctcttctg

SEQ ID NO: 471049 - DNA, 1000 bp, Homo Sapiens; identical to SEQ ID NO: 159519

SEQ ID NO: 471050 - DNA, 1000 bp, Homo Sapiens
tttttttttttttttttttttttttttcaacatagaacaataagagatattgataccctatgagcttgttacatctctgtcattttacacattgagatcaaaatccaaacaccaggaggccctctggtaaaagagtgctggctgcctacccaacattctcccctaatgtcttagtgtcagaacccctttgttattagggatagtcacgtacccagcaaataagccacatctcccagcctccattccaggtaggggtgggtggttagtgagatggaagcagaagtcattgggtggagcttttgggaaagctctttaaaagcgccctttgctcttctcccctttcctccattttcccttccctaaacacaaaataggcagctagagctccagtaaccatcttgtagcaaacctaacattggaagccatttgtcaaggttggcagggcagagatacagcctctgagtatctgatgacctgtcctgccagtcctggactccgaaacattatttttcttttatgtgctggaaaaaataaacctgcttctcgttgaagccattgttagtttgagtcgctcttcctagcagctgaaggtaattccttactaataccagctggcctcagtagtttcacaggtccttctcttctagcaatccaagatgtcatcatcctctggcgcataagaaaatcccaggaatgcacttgaggccccagagctgctggccacagtgtcaggggtacagccaatggacttggacacagcttcctgggtgaactctgggtcaaaatgcttcaagtcagcaggtcctgtcacatttgggttgaagggtggagttagcctcttgtggtacaggtcatcccagtttatggggctgaagaatacatggttcttaatctcaagaaagtctgctttggagcccagccgctgcctctggtccttgtggagaaggctttgcaggaggtcacaggcggccactgtccggcctccggggatctgtagcgg

SEQ ID NO: 471051 - DNA, 1000 bp, Homo Sapiens; identical to SEQ ID NO: 345258

SEQ ID NO: 471052 - DNA, 1000 bp, Homo Sapiens
gttttataaatactagtttatttcataaaaatacaaaaatataaatatacatttataaaaatatgaatgaattaacacaaagacattcttcaactaaataaatatggcagtaatagtcattcctatttcattagggatatatcttcttcatattaatttacaaagcggttgcacaatatttagtttaattgtaaaggtgactgaaagtcagttaagaaaacatttataaattattatacctaagaaaaggcacaaaaagccttttacttatttttattgattattgatgtgatatattttccttccgagattgttaggcaaagagggtgaactggttattacttttttaaaaatctgtatcattcgtattcattcacaaagacttactgattaagcaaatccctacttgacaacatctacgtattgtttgtaacttcaatttttgaaagatttcctcccaggaagagaatgcaggccactcaatctaataacatagacagtacttccactaatattgattaagtcaaacaatcctcttagtctcggtcactatcatcacccccatacatatcggcaagttttttgaaacgaggcccccagtcactgaggtaatcataatcttggttacaatcagctgtgagagattccaaagaactgagcgaatctgctatggaatcattcccttcataggcatacgttgccagcgaatcatatggaggtgcacttgggtctgcgtcgttttcttttaatcttcgatggataaaatcttgtacatcaatattttcccacagaggcacagtcctccttatctgaaaaatagtttcaggcattacatcccgtctaagtttactgtcttctcttgcctctggattccttaatgtgccaatgtcaaaagcttgggtatcttcttccccgccgccttcatcgttgtaggtcacaatgttgtcccggacatcgtcttttgaaattatcagaggttccttttttctttgcctcttca

SEQ ID NO: 471053 - DNA, 1000 bp, Homo Sapiens; identical to SEQ ID NO: 340480

SEQ ID NO: 471054 - DNA, 1000 bp, Homo Sapiens; identical to SEQ ID NO: 340481

SEQ ID NO: 471055 - DNA, 1000 bp, Homo Sapiens; identical to SEQ ID NO: 159520

SEQ ID NO: 471056 - DNA, 1000 bp, Homo Sapiens; identical to SEQ ID NO: 340488

SEQ ID NO: 471057 - DNA, 1000 bp, Homo Sapiens; identical to SEQ ID NO: 340489

SEQ ID NO: 471058 - DNA, 1000 bp, Homo Sapiens; identical to SEQ ID NO: 159521

SEQ ID NO: 471059 - DNA, 1000 bp, Homo Sapiens; identical to SEQ ID NO: 159522

SEQ ID NO: 471060 - DNA, 1000 bp, Homo Sapiens; identical to SEQ ID NO: 340493

SEQ ID NO: 471061 - DNA, 817 bp, Homo Sapiens; identical to SEQ ID NO: 159523

SEQ ID NO: 471062 - DNA, 1000 bp, Homo Sapiens; identical to SEQ ID NO: 340494

SEQ ID NO: 471063 - DNA, 548 bp, Homo Sapiens
tttttttttttttttttttttttcactgatgacaatttattataatctgttagtagcacacagacaaatattagttaaaccagaaccatgtctacacagaagtgggcaatgacatgtgccattctatggcacacggtgtgcacttaatcatcatgttttagcattttgatcttctgcttatggcgctcaatttctttctgcagacgctcaatctccttcttatgatgaacgatttcttcttcatggtgttttttcaaagctgccagttgttctctactctgtgctcggaaatatcgttcctcttcagcctgctctctctttccgaaggccccaccggcttcccggatggagcccgcgccccggtcgacattctcggactgatccgagccgaagcctcgggcttgcatggtcctcacgccccacacgccaagccacgtccgcgccgccaacgccgtcactgccattgctgctggagctgcacctctggcgtctctgccgcagcaagcagtctctcgttacgcgctaatggcagggacggccaagcaccc

SEQ ID NO: 471064 - DNA, 1000 bp, Homo Sapiens
ttttttttttttttttatttaaaatcatttattttcaggaaaaccaaacatatcgttgagtttacatagaaatacaattttcaaccagatcttcataaaaacgcactggagaaataaatgttcataattaatgaccagttatgtactatttcatcatgccagtagcagagttgattaccattaaaaattggtaaagtaacatatcttaaatgtgcaaataccatcttagtactccattgtgttaccattgataataaatggccactaaatatatacctattacataaatctttttaaagtacaataaaaatacaaattctatctgttaaaaaaagccacttatatggcttctaaacatccttattatacaaattccaaaatactatctgacaaacaaaattataaagactcttctttatgaaacatatattgccctctaattaaggtacaacttagcagataaaagaaactaaacaagaaggctcatatataccatataacattaaggaaaaacacacaaatatatattgcataagcatatttgatttcttttcctagtgaaaatgtacctttaacacttgaagaaaattccaatgagtaaatgataaatctatttttgagggctacccctactctaagtcacattttcattaatttaatttatttatcttataatgtgatgaaccaagttagaaattttgaccataaatttttgttttactgagtacaaattagtctgttaggtaaagggtaaaggtataggaaacaaatatttttaaaagtccaggttcatcagcacatcaataatgaaatgcaagagaattttattgctcatgttcaagactaaactgagcagtaactgggttttttttttttttttggaaaatgagatttttgactttaacaaaacaaatacagattgaatttaccaaatattgataattcatgtagaacgggtgccacagattttaaagtatcaaaaccaagagggcatcacaaa

SEQ ID NO: 471065 - DNA, 1000 bp, Homo Sapiens; identical to SEQ ID NO: 159524

SEQ ID NO: 471066 - DNA, 1000 bp, Homo Sapiens; identical to SEQ ID NO: 340497

SEQ ID NO: 471067 - DNA, 1000 bp, Homo Sapiens
tttttttttttttttttttacaaaggacaacaagaatgtttattcctggaggctgccacgcacacaacacagagaggtctgggggacccagggagcataggagatgctggccgaggtgcaggcacggggtagaagagcctcataggtggtgactggcagctaagttgtctcctgggagagctcaggttcacccaccaggtcccagccccactttgagcctgtttttctccaatgtggccaagaccccaggcagaggcagaacttctgcagccagaacccggcttggatgcccactttgtagcttctccttctccattctcaggcagaccccctgggatgaaggggagggcaggggtggaggcaccttgaggccaagccagcaggtgggggtgctgcttgctcactcttgcatccctagctaggtcagcaccagctcctctgggccccaggagagtctgtggagcctgctcctcacctgccctgggagcctagggtaccaagggtaccgaggaagccatgggtagtggggacaccatgggtactgagggtactgagggtcctgagggcttgaaggtggggtcctcagggatgtagacagtgctgttcccttcaggcatctcccagtagaccgcatcctcaaagcagttctcatctgaaggttgtccccagaatggtaatctcaaaatgagccccacaatgatgccacccatcagggccatggccagggtcaccaagagaccataaatctggaactttccctgtgttcttgcggtccagtccccgttgaaaccttgaaagtcaaaggaatggacaagcccttcttttccatagacttcaaggctggcggaggccgctgtcacagcacccacgatgccgcctatgatgccaggaatgccatgcagattgttaatgccacatgtgtcctggatgtgcagccgggactccaggaatggggtcaggtatacaaaacccagggtggagatgatgccgcagacgaagc

SEQ ID NO: 471068 - DNA, 1000 bp, Homo Sapiens; identical to SEQ ID NO: 159525

SEQ ID NO: 471069 - DNA, 1000 bp, Homo Sapiens
tttttttttttttttttttttttctttttttagtttttcggttattttatttttgaaaaatatttcccaaaagaggtaaggaatatgatgtaggcataggggtatccaagggagagaatacagtcacgggttctaaccggccagtaaaccctcttcttcatccctctttcctgcttatcactagagacagaaatgaaaaaccatggcttcaggctgctaaaagcctaaaacaaaacaaagtagagaaacaacaacaacaacaacaacaacaacgataacaacaacaaaataaggctgttggacaagcaagctggtcagccaaatcctctgttgttgttgatggcttcttgaagcgcttcttcaactgtttccattgtagaatatttagggaggaagaggacactgaaacatgtcagtgctcttatagggtctctttcattccaactttcaggacagcaaaatgttattttcatattatttaaatctttcatttgtagtctgtcagttcctgtaagaaatacaaggaattttttcttttcttccagagtcaatttgtggaaagccttccaaaacatcactatggtgggatgtgaactgttatatcctggttcataacgtgcattcttttcaaatgttttccaatcataatctgtatttccaacaatcacatccttcagttcttcggggtggaataatttgataatgtcttcgtcgcacattttataaaatcctctccgaaattcttcataaaccgcctttacagagtcgttgaaaatgtaattgatatacttagaaacatagtctctcttgttagtctggttgacagttatgctacttccattaggaattaagtttgtgtcgtttctgtcccagtgcacattaaaatggatgtaaaatacttcctcaaagttatcaccttcatcatccagaagtgtttgcaaattctttcccaaatcaggactgagttctttcaagtcttccaatgatggcatttggtcca

SEQ ID NO: 471070 - DNA, 1000 bp, Homo Sapiens; identical to SEQ ID NO: 340498

SEQ ID NO: 471071 - DNA, 1000 bp, Homo Sapiens; identical to SEQ ID NO: 340499

SEQ ID NO: 471072 - DNA, 1000 bp, Homo Sapiens; identical to SEQ ID NO: 340500

SEQ ID NO: 471073 - DNA, 1000 bp, Homo Sapiens; identical to SEQ ID NO: 159528

SEQ ID NO: 471074 - DNA, 1000 bp, Homo Sapiens; identical to SEQ ID NO: 340503

SEQ ID NO: 471075 - DNA, 1000 bp, Homo Sapiens; identical to SEQ ID NO: 340504

SEQ ID NO: 471076 - DNA, 1000 bp, Homo Sapiens
gattcatagactttatcggcttcttctccacccagcggtttctgcaatgacaaccgcgcctgtacaatacacatggttcactctgttaaagctgcagggcaacgggagggggctgggggtccctgggcaggcatcaaggctaggggtaagcagcagccaagactgggccagtgggtcccagtgtccgacccagagggtggtggcagctggagttccaaggctgttggaaggggtcaggaggaaggctgggaagccaggggctgcagggagaggacagtgcatcagcagtagcagggagggggcagggagcagaagggggcccatgggacactgtcagggcaagaaggcatgggacacagcacctcctatgtccatagaggatttttgctgcaggaacaagacagatcactgtataaaagggtctgtacaacattacctatgatacaatgttcacatatgatacaaggctctttccctctttgagttttaaaaaataaatgtacaattccagagctttgggtaaaaaatatatacaccctcatagcaggagcagcagctgcttttgctacggctgttgctgtctcttcaaaagggaaagagtggtgccagaaagaagggtgagtctgtgccaggaaacctcacccagtagctgccaggagcccctgcacccctcaggccttgaggctggtgatgggagagggagggagtaaaggtaataaaggccttgccagagtccagtggcgcctttacagtctctgccatccccctcccccactttggggctgcctgccccagtatagggatccaccccaccccagctctatggggaggacaaagggagagtctaagagagagggacggagaccatgttgttggtgtcagacacatgagccagaagggggatgtcaactccctccttagcagttagatatcccaaaaagcaggagtgtgggcagcagacaaccctagctcctgatactgctctacccgagcccactgc

SEQ ID NO: 471077 - DNA, 1000 bp, Homo Sapiens; identical to SEQ ID NO: 340505

SEQ ID NO: 471078 - DNA, 1000 bp, Homo Sapiens; identical to SEQ ID NO: 340506

SEQ ID NO: 471079 - DNA, 1000 bp, Homo Sapiens; identical to SEQ ID NO: 340507

SEQ ID NO: 471080 - DNA, 1000 bp, Homo Sapiens; identical to SEQ ID NO: 159531

SEQ ID NO: 471081 - DNA, 1000 bp, Homo Sapiens; identical to SEQ ID NO: 340509

SEQ ID NO: 471082 - DNA, 1000 bp, Homo Sapiens; identical to SEQ ID NO: 340510

SEQ ID NO: 471083 - DNA, 1000 bp, Homo Sapiens; identical to SEQ ID NO: 340511

SEQ ID NO: 471084 - DNA, 1000 bp, Homo Sapiens
ttttttttttttttttttttcgcaggcttaaataacaaaatatatttcgatatgcacagttttaactgaggacacacaagccttcctcaggctgcaggcccaccgccctcccagtgggattcacagcccctgcggagtttgtcctcacgcacaccacacacgatcgggtataaaacacattctataaacacgttctgatgcaaactgtgtgtccataaatatatatttatgcaagttcctcccacccactgcagggccgtacagctctggggacaggaggtcacagccgactttaaaccacaggttaagtagaaggttgcaggtcaaatagaagttcccgtgtgattgcatcacccaacggcactgttctgtcatcaggaaatgctgagtgcccgccgtggccgggtgggcgcgggcggtggtcagacgctgctctggagctggctatctgtggcactgtcaggggctgaggactggctgggcagacaagtttccaggccatctgaagactccgacaggggcttgtataagaagcaggctatggcaaagaagaggacgcccagcaccttgtacaggagccccatgatgagtatgtagcggctcatggccgaattctggtacaccaagcaggagccctgctggccacactggtcctgccacagcagacaggccttgtcgatcacccagccgaaggcgatgggccccgggatgccccctagtattctaactacaatccactggattcccagggcaaaggatctctgagggtcacggacacatcgtagagttgccgttagtgcaggaatgctgctgaggaatgtaaagaaaattacaacgaatatgaaaaccagaaggaggggctttctctgacaagttgaagtgcatttccctgcagtggcatggccaaaaccagaggaaagattctgagggatacagctacagtctcggtacaccttctggccgtccacattcgtctccgtggctgcagggcaccctgcgt

SEQ ID NO: 471085 - DNA, 1000 bp, Homo Sapiens
cattcaagagtttattgctttaagaaaatagtacatgctttcctattaccagttctttaaaattctacgccttcctagagaaaaattatttagaataaactgccttctaaacttataataaagcgtacaataagagtgatcctatttttcatcctttacaagtggcaattgtcttccagtgcaaattctcctctgtccgtcttatttaatatttctatatgacttttaaaacacatgcaataaaagtaagtaattatcctttagtagccatttaaagttatctggtctttccactaggcttctaatgttataattcgtaggtagtattcgaccatagtgtcacattatattcagcaataactatgtgcttatctttcaagtatgataacccttcatttttcttgcgatccatatactctctttttaaaaatcttctaagccacggcagcatagtccttgttttgttggttgttttcattttcttctggactggtaatttttacttctggccttggtggtctttgagggtctacatcagcctcatcttgtccactgccagctccttgagactttctttccttgtctaggaccagttgaagctcattattaacctgctgcagctcctcaccattctcctcatcggtgcctccatttacacgagcagggcgtgcctgctgctcactgtgatccagaatctcctcgacttgctcaggggcatctgtagcctccctacctccttcctcttcaaggtcaccattcattcctgaaaagtcttctttctgttctgcatccttgtttgccttctctccatcttcttcctcgtctactatttctgctggcctctgatcgactggaacctcaacctgagtatcttcatcttcttggacttctgctgccccccgtgtttcagacctctctgctccagctttgaaaatgccttcatcactatttggaatggtttcttgtgaattctttaattttacattttgtttcaatttcg

SEQ ID NO: 471086 - DNA, 1000 bp, Homo Sapiens; identical to SEQ ID NO: 340512

SEQ ID NO: 471087 - DNA, 1000 bp, Homo Sapiens
ctcggttttattggttttgttatattagcctctgaagcaggcaattattggtgtgaacatacatcttaaaaagcatcatattatggagtcgagtgtgcaagagtcaactcagtgcaagtgctgttggtgagcattacgtctgaggatgaaatcggaggcccgacaggcccaggaggcctcacgcccaggggacagcagaccacgcttcagaacggaaccgccttctccatgttaaacttttgacgttaaactttatgcttcagggtatctggcctcttctgctccgagagcctctccttccgcgtcccaaatttgggaatggcccggtcaggctcaggcccaggcggtggaggccccggcgtggcagcgccgggcttgtccatgttcccaggagtccaagttcagaagccccctctccggtgggttggcggcttcgcggtggccgcgctagtcttcctctggaaactcagtgaaaagagtcggcgccgtccgcctgagcgcgggttccctcctgggctcgggacccgcccgcctcaggcgcagaagggtttgccgccggccttgggcagggcgagcagctccctggcggcgcctgcagctggggcgtcctggggcacggcaggcggaaaggcgcgggccaggggtgcagtcagcacgttcgcgcccgcccccagcgagcgtcccagaggcccggggtccaggagggcgcccttggcggtggcccaggcctggttcaaagtgctgtgcctgaggatggggtcgtggaagaccccgtccacccagtttctgagactggttaccggggagtcctggtgcctgtccagggcgccagagtggggaagggccacagacggggacgtggcgggcgcggaggacacagccgcaggggccgcgggaccttggcgcttgagcatgcacgacggaaactcagtctggctcagggaggtggcggcggcggcggcggcggtggctgtgtgggccagggaccagatgcgcggct

SEQ ID NO: 471088 - DNA, 1000 bp, Homo Sapiens; identical to SEQ ID NO: 159532

SEQ ID NO: 471089 - DNA, 518 bp, Homo Sapiens; identical to SEQ ID NO: 159534

SEQ ID NO: 471090 - DNA, 1000 bp, Homo Sapiens; identical to SEQ ID NO: 340516

SEQ ID NO: 471091 - DNA, 986 bp, Homo Sapiens
ttttttttttttttttttttttttttttttttttttttttttttttttttttttttttttttgacagagacaaggccaggcggctttattgaaaaagtggtggtgggggtaaggcaggcaagggcactgcacacaggtgggatggggagaaaaggagggtccccgctagaggcgatgggcttcaaggaacatgctggtgggcagaggctgtggtccttgagtcctttatgctgcctccagcttctgtacaggctcaccgagacatcattcgcacaaactcttcgaagtcgaccagaccgtccccattgaggtccacgtcctggaggatctcgtccacctcccgctggctgaggcgctcccccagcagggccttgagggccgcccggagctcgcccacgctgatgcggccgtccccattggtgtcgaactcccggaaggcgtcccgtagctcccggacaccgatcatgtctgccgtctctgccagcagcttggggcccatcagctccacgaagtcttcaaagtccacctttccgccactgatttgctgtgagatctcgatgagctccatctcggtgggcatgtagcccagggtccgcatgcaggcacccagctcccggcagccaatgtagccgtcctggtctcggtcaaactcctggaaggcgacctgcagctcttcaatctcctcgggccgcagctcccggtcgagttgggtggcggcaatgctgggccgcaggaagatgcaggcaggccccaccaggctgttgagcaccgagtagccctggacgcctggcgcggggtccccctgctccttggggctggagctggggctggggcaggagccccttggtggggagccgagccactgcaaggggtccttagggccccggcgccagggccgcttggcacagttccccatgggccctgaaccatgccaggcctggaaccccgggggtggcccgggtgggcctcggcggatgctgctgcct

SEQ ID NO: 471092 - DNA, 1000 bp, Homo Sapiens; identical to SEQ ID NO: 340517

SEQ ID NO: 471093 - DNA, 1000 bp, Homo Sapiens; identical to SEQ ID NO: 157413

SEQ ID NO: 471094 - DNA, 1000 bp, Homo Sapiens
caaaactttttttttttttttttgctccttttcctttttattaaaaaatagatcaagaaaatatacacacttcagtccatccaccatggtggatgctttgaggaggccaaagcaccatggggatgggatggaggcattgggagagccagccctgccctcgtgccaagggtgcagagaaggagggtgccctcagccaaccttgccaagcatggccctggaaggaaagcctgggccatgtcactgagcagtatgagagcaggtgggaaggggaggagggtccccagtgagagcagagatggcaaaggggattgggagccccagggaggtggggcctccagactcatggtgggaacagggccacacagggctactgcccacagaacgtcccttgacctggtcctcctcccctggggactctgggcctgctggcctcctctctggcctgtcctccacaggccctggcagctgccctcaggcattgatggccttccagcgctcgctgtctgtgctgttgatgctgccagtgtggcagggcatggaagcgatgtcatccaggtaggccaccccgccggcagagtcgaactgcgtgctcgagtagctggcagctgaggccccagcagcccctgcagcctccaggccctcccgccgggccacagcgtagggctggggtaggtgtacatctggctcctctgtctcgtccacttggcatttgtaggagaagaggatcttgggctccgagccgaagaagccccggaggaaagccacgtagatgagcggagcgaagaagctgaagtacaggaaggttgtggcatctacacagcagagcccctcgatgatgtcgaagcacagcagcacactccccagcccctgcagtaggttgagcagtgccaggatgcccgcatacacgtagaagctcctccgagaaggcagggagatgcgctccttcagcggggtcttgggaaggatgaccaccagagagtagaccaggaagaagaagcag

SEQ ID NO: 471095 - DNA, 1000 bp, Homo Sapiens; identical to SEQ ID NO: 160347

SEQ ID NO: 471096 - DNA, 1000 bp, Homo Sapiens; identical to SEQ ID NO: 159535

SEQ ID NO: 471097 - DNA, 1000 bp, Homo Sapiens; identical to SEQ ID NO: 340519

SEQ ID NO: 471098 - DNA, 1000 bp, Homo Sapiens; identical to SEQ ID NO: 159536

SEQ ID NO: 471099 - DNA, 1000 bp, Homo Sapiens
tttttttttttttttttttggagaggatacataaatttaattcaggcaaggaattcagactgcatctgcatgatatcaccgttttatatgaaactcctatgttagatacagggtaggaaaattgaagaaccaggctttgtgcagtatcacctgttggggtctctgagtaagtcctctcccagttcacccttgtcgctttcctgggctcagccagagtcacagccctgctccccacagccttgttgaaatgtctggcctgacgactcagggaacccagcatagtgtctagattccaactgcctcattctcagccctcagctgcctgagccctcccttcaatgtgcatcctggggaacactcatcaggactcagaacttaaatagaacatggtttctgagaggcctcttcctctgggaagccacttctatgaagaagccaaatggatttctaacaatgcgtcttcataaatcaaacatcataccatggacaaagctggtctcaacaccccagttatcaggtcagcatgtgctctgggtgatttttctacttagagatgggcttgctttgcaccatctactctcccttcagcccactccccctggtggccaactggccagaggtaaaggtatgagatgcagggagaaagttttttctctgcaattgagtaaagcccaggccctggcccccacccacgtgcagaacctgccagccagttcacagccggacagtccaggctttcagaggagggctgtttcttcttcccctgagtcaccattatcattccttcctcttgctttggaagatgggcctgggccggcgagagtctagaaatgcagtcaacccagagaggggagaaaaggaaacaagtgacagcttgaaaatcaggtggagggaatctcgatgctaataacatcacttacataacactttctagattacaaatacttggaatgtggccttttgtgaacaacctaacccctccacccattcatgtctgatc

SEQ ID NO: 471100 - DNA, 1000 bp, Homo Sapiens; identical to SEQ ID NO: 159537

SEQ ID NO: 471101 - DNA, 1000 bp, Homo Sapiens; identical to SEQ ID NO: 158791

SEQ ID NO: 471102 - DNA, 1000 bp, Homo Sapiens; identical to SEQ ID NO: 159539

SEQ ID NO: 471103 - DNA, 1000 bp, Homo Sapiens; identical to SEQ ID NO: 340525

SEQ ID NO: 471104 - DNA, 1000 bp, Homo Sapiens; identical to SEQ ID NO: 340526

SEQ ID NO: 471105 - DNA, 1000 bp, Homo Sapiens
tttttttttttttttaatgatagaaactaaatgttacaatttattccatcttcaggattacagacattacagggcaggatgagtaaacaaggcaaatgaagcgagcaccttcagcttcccccctaccccgacatttaaccagatgcagcattttgacatttttaggatatgcaggttgacaattcactgacttgggttgagagctggcaatagcagatctttgcaatttaggttcttcctccacagctattccaagtatcttaattcctgaactgcacactgagagctctgaaatggtgttcactgcaacattcttgcagctttcacatcttaatctgacacctcttgtgaaggcagggaactgtgttaaaagctgtcttcctctttgctaatccaggccaccatcaatcttaaccattagttactatataaaaataaaagtgtgctcaaaagcactcactgaaactgttgtgcccagatcccttttcagagcattagttccctgagaggaaaaaaagaggtcctaaccaattgctttcataaatagtgaccccagtacagtgtatatgtcttttgcagcagaaatcaagaggtcaggcagctctgctcatcctgactagtttatcatcgtttgcatacaaggtatatttatgtaaagctgattccacgccaagtattgcaaccataatctcaaaaaaattgttcaattttagcacacagttcctgcaagataccacagcaggtgagaaatcatctcaaagagttcatcttttacaactgagaggaaaacatcgaaggaggaaataaaactcctctctcctaagttcctcatcaaatctgatggctatgttcacagagttagttgacaaaaatccagagtcctcaatttctggacttgcgaaatccttcaaggtgactgtcaaggtcaagaagaattttcaggcttttctttgccatggcccatgaactccagtccttcaataggaatctctttctcctt

SEQ ID NO: 471106 - DNA, 1000 bp, Homo Sapiens; identical to SEQ ID NO: 340528

SEQ ID NO: 471107 - DNA, 1000 bp, Homo Sapiens; identical to SEQ ID NO: 340529

SEQ ID NO: 471108 - DNA, 612 bp, Homo Sapiens; identical to SEQ ID NO: 159543

SEQ ID NO: 471109 - DNA, 1000 bp, Homo Sapiens; identical to SEQ ID NO: 340530

SEQ ID NO: 471110 - DNA, 1000 bp, Homo Sapiens; identical to SEQ ID NO: 159544

SEQ ID NO: 471111 - DNA, 1000 bp, Homo Sapiens
ttttttttttttttaaccttagtttaggtaaatttaatgactgtaaaagctgttcacatagcagctttaaagagacacgttttccactgacataaagttgcttcgccccttgcagcttatctccaccttcatgacctgtttcctcagtggcaggcaatgtctccccttcctgttggggaggattgcccaagtcagctctgaggccatcctctcaggtcagcaatatgcagaagagtccctcagagtggtcctgcagagaacatgtcccctaagtgtctgagaactggctgaggtgatcttcaccagcacatagtccccaggctgggctctgaccctgagcccagggttattgacatcctccatctctgcatcagggaagatcaccttaaggtttccatcattcctgccacacaggtcagtggcagagcgtttactgagcccttccactagcaccaactgggtacagcccacagaggtctgattggcttttgttgcttcttctcggaagatagtgatgagttcctccaaacgccttaattttacctcttccgggacatcatccttcagcctatgatatgcccgtgtcttctgtctcatgctgtaggcaaagaggaagcccatgttgtactgaacttcccggagcaaagagactgtctggacgtgatcttcctccgtctcaccacaaaagccagcaatgaaatcgctgctgaggctcacacctggaatagattctctaatatggtgaactaactccacataagcttctcttgaatatcccctccgcatggcctccaacacacggctgcttccactctgggctggcaggtggatctgtttacagatgttatctctctcatgaatcagctgcagaacctcatcaggaaaatccttggggtggggagaggtaaaacggatcctcatttcaggatctactctggagacctgatccagaagatgagcaaaacgaagtcctccttgcttggttttatagttggtggta

SEQ ID NO: 471112 - DNA, 1000 bp, Homo Sapiens; identical to SEQ ID NO: 340531

SEQ ID NO: 471113 - DNA, 1000 bp, Homo Sapiens; identical to SEQ ID NO: 159545

SEQ ID NO: 471114 - DNA, 1000 bp, Homo Sapiens; identical to SEQ ID NO: 159546

SEQ ID NO: 471115 - DNA, 1000 bp, Homo Sapiens
tttttttttttttcagagtcaataactttattagaaaaagattaatactaaaacttttcaatgacagagacaatcaactttgtaacagaaagtcagagatactttatttttacttctaaatccaaaggctaagtagagcagagttgtaaaaatgaaatcccacttagtctgattcacacgaatactaacgtttaatcctgttttcaaagtccaagattgaaaacttgcaattaaacactgagcaagccacatgtttaagtaatatttcttaaaaagtcttaaagaaaaaagtatgatacaggacctaagttttcagtggcatatatactattaacacatgttctgaaatctggtaggtcacatcagtcctgaattaacttttaataataataataataaaaaaactaactgagctttatactttttctatgccactatagctttctttcacctcattttttaaatgtcgatcttcactttatgccgttctcagtattcttccaaaaatcttcgaacagtagtcctacaacgcaaaatttggggaaaaatgataattagacaacatgtaaaaggccaatttttatgagaaagtgttggcccagtcactaactgctaattaacatgtgtacatggaatgcttgtattctttttaattatcaaggcatcagtgtggttcttaaagccatgtgcctgtgtatgcttgcctaagtgtgaatgacatacacagacataaccttacattgctttcccaaaaggggaatgccaccaacaaatcaactaattggtacttcctttcattaggaatattttgtcccacaccactagcccacagaatgaagtttacaggttttaagaacacttacagtacctaacttttaatatttctttaaaaacccaaattcgttctatatagtgcatcagttctttgatttcacaaattgaaggtgtctgtccttgctattcacactgctgctttaaatgtatcagccagtgagtgact

SEQ ID NO: 471116 - DNA, 1000 bp, Homo Sapiens; identical to SEQ ID NO: 159547

SEQ ID NO: 471117 - DNA, 1000 bp, Homo Sapiens; identical to SEQ ID NO: 159548

SEQ ID NO: 471118 - DNA, 875 bp, Homo Sapiens; identical to SEQ ID NO: 340536

SEQ ID NO: 471119 - DNA, 1000 bp, Homo Sapiens; identical to SEQ ID NO: 159550

SEQ ID NO: 471120 - DNA, 1000 bp, Homo Sapiens; identical to SEQ ID NO: 340538

SEQ ID NO: 471121 - DNA, 1000 bp, Homo Sapiens; identical to SEQ ID NO: 340539

SEQ ID NO: 471122 - DNA, 654 bp, Homo Sapiens; identical to SEQ ID NO: 340540

SEQ ID NO: 471123 - DNA, 1000 bp, Homo Sapiens; identical to SEQ ID NO: 159551

SEQ ID NO: 471124 - DNA, 1000 bp, Homo Sapiens; identical to SEQ ID NO: 340541

SEQ ID NO: 471125 - DNA, 1000 bp, Homo Sapiens; identical to SEQ ID NO: 159552

SEQ ID NO: 471126 - DNA, 1000 bp, Homo Sapiens; identical to SEQ ID NO: 159553

SEQ ID NO: 471127 - DNA, 1000 bp, Homo Sapiens; identical to SEQ ID NO: 340543

SEQ ID NO: 471128 - DNA, 1000 bp, Homo Sapiens
tttttttttttttttgcttcaacgcatttctttatgtgatatgaatagaaagattatccatacaaagttagaaaaattaagataaattatatattagtacaccttccaaccacattttatataaaaattcagaagtgtactattatttcaatctacaccataaaaatgcctggacttagcagataatcttctatctgtgatgtattttctcagtagaaggtttatttgttgcagtcactttttaagagtttaattttcattgttaaccttactgaatcatcagtaaacccagctgattgggacccactgtggttccattctcagtttctctatggcagtttgcagtttttcaaaggctttgtctagattatcatttatgatgatcaaatcaaaatagtggttgtatgctctctgaatccgtgcactttcatccactgttttcttcaagtcagagtcggtcagaagcttggtagtgattcctgcatccaccacagccttgtgcatggcacgtaacgtctctagctccggagccgcaataaataccacatagggcataaactctgatgtcctcaatactttcagtgcttgtgggttgacatccagaatgcaagtccgtccagtttggacaacctcaagaatagaatcaattttggttccatagagatttccttcatattccccatgttccaaatactttccagctttaatatctgcttccatctcagatcgtgacacaaacttatatgcctggccatctttttcatcttcccttggtttccgtgaagtaaatggcaccgtagttccaaatctagtgggattcaatactatgaacctgtttttcaagcttcttcggcctacaccttgagctcctatcaatactaatgtttttctctggaagggaggcattttggctacctcctcatatatctggatttcatgacgatcaaattctgcatttctggttgtgagatacatcatctttttcttttttttgctactt

SEQ ID NO: 471129 - DNA, 1000 bp, Homo Sapiens; identical to SEQ ID NO: 159554

SEQ ID NO: 471130 - DNA, 1000 bp, Homo Sapiens; identical to SEQ ID NO: 159555

SEQ ID NO: 471131 - DNA, 1000 bp, Homo Sapiens; identical to SEQ ID NO: 159557

SEQ ID NO: 471132 - DNA, 1000 bp, Homo Sapiens
tgctgagatcaaggccatggggccagagatgagtccgttttaattgctggggaaacagggaggggccttggaaatagctccccccaccccactccccacgtgtcccatccagtttgggcaggaagccactttccctagaacagttcattgctgggatcctgtgaagaaccgctgtggagggcagcagctggacgagggcacaggacctcagagaacactgatgcgctccgccagcccctgcatgtcgtggtcctgtggtggacaggccccaccgagatccctgtccgtgggcagcccagacccaggcagcggatgctctgctgcaaactgctcccagcgcgcgtcgtcactctcatgcgtgatgtatcgctctcccatcttcccctccagctctcggaggtccagccacgtctggtactcctgtaaccaggggtggctgagagatttgtccacgctgtagcgtttgcgcatcttcacctgcagcaggttgttgatgaggtcaatggctccagctgagatgtggctccaggggctggccgggtacatgaaggcggcgttctggatctggtcattgatgtcctcatcctcgttgaaagggaaggtgccgctgaggctgacgtacatgatcacgcccactgaccacatgtccagcgagcggttgtagccctggttgagcagcacctcgggtgccaggtaggccggcgtgcccaccactgagcggcggaacgacttctcgccgatgatgcgagcaaagccaaagtcacacagcttcacctgaggaaatgggtctgctgatgccagcaacacgttttctggtttcaagtcacagtggacaatgttcttgaagtgaaggtgtctcaaagccaccaggatctgggtgatgaggaacttggtgaggcgctcaggcagccggcccttctcactggacaggatcatctccaacatgtccccatgcagcttctccatcaccacaaacactttctcaggcgtctcgaacatg

SEQ ID NO: 471133 - DNA, 1000 bp, Homo Sapiens; identical to SEQ ID NO: 340545

SEQ ID NO: 471134 - DNA, 1000 bp, Homo Sapiens; identical to SEQ ID NO: 340546

SEQ ID NO: 471135 - DNA, 1000 bp, Homo Sapiens; identical to SEQ ID NO: 340547

SEQ ID NO: 471136 - DNA, 852 bp, Homo Sapiens; identical to SEQ ID NO: 159559

SEQ ID NO: 471137 - DNA, 1000 bp, Homo Sapiens
aatattacaccaacgaaaaattttattaaattatagatcaccagttatttaaaaatacacgggaaaagacagacatacaaaggtagtatcatataactgatttctaaactcaatacttttgagatacaaaacaatgatcattacccccaaaagtcagtttactgacacgaattgatgtttaagttggtctgtaactcttttcattcaattctgtttataaatgttactgaatttttaaattttgtcccatatctgaactttgttttttttgacatgtttacttctcaaagtagtatatagttatttcttgcaattaatgtcagcaactataagaagctttcctaagtcacaagaattcaatgtggttgctgttctggagacagttaccattttgggctatatatactaaaacccacgtattcaaaggcaaaatatgggggttgagagcaggaggactaagaaaagaaaatgttatcttttactgcagacctgccaaaaaaaagactccattacttactttggtactattgctagagacgttgtttctgccagaccacaggttggctatatggttgttccttttatatttcctttttcaaatgatgacaaactttcccaattaaattgttcaaccaaataagcagacacctttaaattaccatatattttttagttgcttgaaagaaattaattattttcttaattggtttagcagccttgtgtctggaaaagcagtaaaacctgctttgttccaaaattagaacacttgactcagaggctgcttgtaagacacttggctatcttttatcaccaatcagtcacaaaggtgaacctccatgaactctgtaacgtaataaatgtaaaaatggcctcattgaccaatacacaatattaagccagcaaaaccaaaaaagtaccctcataagtgggaactggcttgtataaaacaagaggatatacatccgcttacataaaacaagagaaatatgtacggtaataa

SEQ ID NO: 471138 - DNA, 710 bp, Homo Sapiens
acccccctagggaaagctcgccactttttttttttttggagcagtattcacattttttatttcgaggtgtaaaatatacgtggccaacattgtttactttcatccacagatggaatagctgggaagtataaaaacctgtacatgacctttagtgaagattatttgtcatcaaattacccatatccaagtttccatgggcctggaatttcctttccacttgatagaagtatatattaggaagtcccagttaatagtatttttatttaaaaaaaaaaaaaggaaaaaagaatcagcagagtcaagttgtcttagtcttaaggctttctggatttcttccttggaggaggtcaggatcttcccaaggcctgggtcctcgaatattcttccagtcatcaaacttggagtctttgattttctcatattccgactctaaagatattttattctctttcagttttttttcaagctcaggatccattttactcttcacagcatcatatcggatttgagaaaactcacgaagaccaaaagaacctccaacaatcagcaacaacatggggactccatagccgagagtcttgttcttgcgaaaagcacgcatcaccgcgggtgcaaacatgagtgaactcttccatcggctcagaactccaagcgggcctagcgcagactcccaaatctcagcagctcacgctctcaccaagacgagtacc

SEQ ID NO: 471139 - DNA, 1000 bp, Homo Sapiens
tttttttttttttttttttttttttttttttttttttttttttttcatactaactcaaaatgagtaaacagaattttattcaaactttacaaatatcatttacatttagcctgagattaaacatgagaaagttcaacctgaagttagacttcattgcccagttaagcatctgaaaataaagctgagaatgaacatacatcatcaaacaaagcattccaatgaagtctggcaatgaattgtgacacaaactgaactttaatttgctctggtccacatgatcttcagagcctaaaagttcctgttttttaataatgatggaaaaatatctgcaaatgataaatgcatgaaggtatgaccagatgcaaaattttagttcaacatttctatagcagctgctttaggtgaccattaaaaaacaactccccaatccttactgttcaacatgtacttgaaaacatgcagcagcatggtacagtttattaaatttataaatatcagtacctgtaataaaatataaaatactgactattcctttttcaaatattaagtctctgaatgcttcattcatcctttggtttcaaacccatacaatgcactcatattacattgtagatttcgaatggagacagaacactgtacatctgttggggaaggtggggtgctgtaggaataccaaagcactacatcatagaaagtaaacgttgaagcaaaaatactttctgaatatatactgtacattatgtaaacacacattcagaataagaatcaacacaggccaaaatattgttttctaggaaaccagaatcttctttcttttaaatcacacactgaagatgcttttttgttaagaaaaagaatgaagtctgttcctgtatttgcttatgtgcttagatatcttggaaatgagtaattattacattcatttgctaacggtttatcctctgcttagttggctggctgttgcaaacacggaatacagaactatttcagtccctgtttt

SEQ ID NO: 471140 - DNA, 1000 bp, Homo Sapiens; identical to SEQ ID NO: 340549

SEQ ID NO: 471141 - DNA, 1000 bp, Homo Sapiens; identical to SEQ ID NO: 340550

SEQ ID NO: 471142 - DNA, 1000 bp, Homo Sapiens; identical to SEQ ID NO: 159560

SEQ ID NO: 471143 - DNA, 1000 bp, Homo Sapiens; identical to SEQ ID NO: 340552

SEQ ID NO: 471144 - DNA, 1000 bp, Homo Sapiens; identical to SEQ ID NO: 340553

SEQ ID NO: 471145 - DNA, 1000 bp, Homo Sapiens; identical to SEQ ID NO: 159561

SEQ ID NO: 471146 - DNA, 1000 bp, Homo Sapiens; identical to SEQ ID NO: 340555

SEQ ID NO: 471147 - DNA, 1000 bp, Homo Sapiens; identical to SEQ ID NO: 159562

SEQ ID NO: 471148 - DNA, 1000 bp, Homo Sapiens; identical to SEQ ID NO: 159563

SEQ ID NO: 471149 - DNA, 923 bp, Homo Sapiens
tttttttttggtttttttttttttttttccacaaacgctaagagaactttattttaataaaaatgtcctatttttcaggtgaccccttcctttaccactagaaagcagctctattgctaaaaagcaatccatttatttagacattctcttcttaggcaactttaaacttttccaccgccgtaacaccactctgtatttttcactttcagtcttctcttcaaacacttttttcaagagaatccgcataactgtctctgttcctgcttctttatcctctccaatgagaagatccaatgtatctcccactttcaccgttctgcttttcttccataatttttcctcattcagcctgagttcacctttgtagaaagcatcttccactttgtttctcccaatatctagccccgtcttcaggacaacatcataccgaaaagactgaactgctttttccaggtctttatagtttttgactacagtaggatcatcctcaagctcctcttcctgctcactcatctcatcatgatggctttcttcatcagagtcctcttcatctactttttgcagagactttttagtagattttgtagaccttatattacttttgagtcttacggaaaaaggaaaaatacattctggagatagtaaaagccctgggagtctcagtgagaaaatattataaaaaagtgttttataatttggtgcacgtaacttggtactagaaaaatacaagtatcgattccaggaagtacagagtttgtatgatgaaggtgtccctcggagaacaccccagagtccaatccaggcatctggctttcttaaaacaccggcaagcaatttaacactagccatagccatggcgcttataatctgtacgtcaggccctctcgtccctccccggccgcgcggactgcagcctccaggct

SEQ ID NO: 471150 - DNA, 1000 bp, Homo Sapiens; identical to SEQ ID NO: 340557

SEQ ID NO: 471151 - DNA, 1000 bp, Homo Sapiens; identical to SEQ ID NO: 340561

SEQ ID NO: 471152 - DNA, 676 bp, Homo Sapiens; identical to SEQ ID NO: 159565

SEQ ID NO: 471153 - DNA, 649 bp, Homo Sapiens
tttttttttttttttttttttttttttttagttttttaaaaagtttttttcagaacattaacgaaaaaagaaaaatgcatttagaattacactaggcaatacattttaaaaagagctgagaagaaacaacaaaccttatcaaatgcttaactactttcaattttgcattcactgaagggatattcttgtgaacttgaggggtatgtgctttttctaatccaagcatctttattatatctttttcccaatatggacgtcttcttgtactttttattctggtaacaatatgcagtttatgagggttctgtggatccccaccgtatttttcatgatcttcaggtgaggcctgaaacactttttctggaattcttgatctggtgaatttgtgacgaatccaatctgtacaaataagagactccacaccttttgtcacagtctgtagtctgcctgggggccattgaactactaagcgcaaaatcccagccataagtgtagtgattgctctctttagaggcggcacccgctaaaccttcagcctgaaattttcctccgaagggaagcagagcagaggaagaactaccaagtgctacactcaaagcctgccgtcgcagtgagcgcgacctccaaactgaggcatttttgttccggc

SEQ ID NO: 471154 - DNA, 728 bp, Homo Sapiens
ttttttttttttttttttttttttttgtccctaaatagcatgcgttcatgacgctggctcactttatttttggccccaggtcaggtctcccaaagggtttcccagcagtcacttcagagtctcctgcagagtcaccatcaagcagacctcttcctcgggaggccgtgtcgccaccccaacccttgacttctggtatcaccatctcctgtcacctgggctccagtctctgtccgatggcctcaacaggacatcaaagcatagctaccagtttgaaggtgccctcaggcttggcaggaaccacgtggacaaaagtcttgtagagcacagcacccttgggcagcctggtgatcagatccacagcctccgtgtttctgggatgaggcacgtagacctccttagtgtagcggactatcccctcttccagggcatacagacatttattcttcccaacacccacatgggcacctgggtgccagcggaaatggcgctgtgttgcaatgatgttcccagcatgaacatagtgaccttccattttcttaatgccttggcgtctgcctgatgactttccaccgaggtttttggagctaccacccgacttcttggatgcgtatctgacagcaagagctgtagccggagtggggcttagcaaggatgtaacggctgtccgggtcctcagcgccaacaccaccgacgccatgctttcgatcactcacttccggtctcgaaaa

SEQ ID NO: 471155 - DNA, 1000 bp, Homo Sapiens; identical to SEQ ID NO: 159566

SEQ ID NO: 471156 - DNA, 1000 bp, Homo Sapiens
cccttcaaaaacttttatttgtatcaacagttcctagctcttgacttagcttagagcttttaaaagagcagacaccttatatatttgagattgaaaaagtttctgctattaatcagaaataatcatttctattttctggcttaccccttggaataagccaaaaataaaaccaaagttacatttcctgacagatggctaagaaaacaatagaaggaacatcctgaattctagagttgactcttgctggtgaagtacaccttcagcttagtccattctcctaagtaaagcctgaaggaaaactcttaacacctaattctttgtggaaaaatgatcaactagccatttcacaggctatagaacaaaagtacaattgggcatctttccttatgtcctgggatcaggggtgcttacatttaacattgatcaggtaaagaggagaggctgtgcctaaggtctgagaaaaggcttgctctaagcaagctgtggtgaggcacaggatgactagggaatggcagagaacaggctggcctactgtcagttcaagcaaccagctgagcagcagcagtctaaaaagccccaaacagaacacctccatggattcagggaagggctgaggcactgcctttctagtatgtgccaaaaaaaacataactctgaattggggcccaggggactttgagtttgtatggggagggaaaaggagtgagcagttctcctcccctccccacagccttaggccaacacaaactgcaaattggtaagcagcaccttaatacctcttgtgacagttatggctgaagtggcagggtcaagcttgtaggtgttggcatccccctttttatatcggtcccggaagacatagatgctcccgttacagctggcaatcttccagagggatggggcagagctccaggcctcaggaaggcaaagccgggtgaagctgtctagcaagggattgtagcacaccagggagtccccttcagccacgatgaacaccaga

SEQ ID NO: 471157 - DNA, 1000 bp, Homo Sapiens; identical to SEQ ID NO: 340563

SEQ ID NO: 471158 - DNA, 1000 bp, Homo Sapiens; identical to SEQ ID NO: 340564

SEQ ID NO: 471159 - DNA, 1000 bp, Homo Sapiens
ttttttttttttttcacagtatttacatttattattattaaatcttcagtacctgaaaggtataaatatgggtcaatggaagaaaataggaactgaaactattacaggtgcagatgaagaggctcacttttttctggtctttaatctctctgaagggaatatcggggacggtagttctgatatgaaacggagatggggatatatttctttcctgggagaaattcctatggaggggagacaattatcagagtcttaatggacacaggaaggaatgcttataaggcattgagatttgagattctcatatcaagtgacatccctgttgggaaacggcatggacaaggcagatggggtctttactgatggattgggaagggactagtatgaactgaaacaaacaaaaagaattccttgtgtatttgctggtacaatctgggaagtgactgccaatttctgatggactacttgactgtcagagaaaaggatgttacctcaatgtatttcctctacttcaaaaagtttcttattccaccaagtgtaaggaagacatgaaaacagggaggtgatattagacattgagaagaaagagagctaaaagttatctctaagccaagaaggcagatgacattatgggtttctgaggttggttggtggcatgtaaataagacttcttgtgactgttaaatacgtgcataaacccaagctcagaaatgctggtgatcctgaacaggaaacacgagaacccattttgtactagtcagagagatagtctttcctgattatgttccatttcccaatgtctcaactagcccttgctttggcaccgcctggctcactctgctatttgtagttgcagagggcgaatcagtcaccttcgcctaatgtttcaggggggacatggaggctctctggcttcaccattcctgcccttctctcacagacacaacgcttcaattctttgcagtcctttgagaagatcatcccattaaggatggccaca

SEQ ID NO: 471160 - DNA, 1000 bp, Homo Sapiens; identical to SEQ ID NO: 246517

SEQ ID NO: 471161 - DNA, 1000 bp, Homo Sapiens; identical to SEQ ID NO: 159568

SEQ ID NO: 471162 - DNA, 1000 bp, Homo Sapiens
tttttttttttttttttttttttttcagtgagaaaaattctttatttaaaataggctagattttttatactagattaaataaaatactctataaatgagaattttaaattaaattataccaaacccagtaataccagtcaggagttttccaccaatccccatttaataaagtttaaatgaattagcttagaattatgaggatatttgcctttgcttagagaaaaaagcagtgccatgtttcctgaatataatagtgtcatgctggtaagagaaattctataatgcttaagacagctaagaaaaagtgatgatcaaatgctgagacccttagaaccttgctctgatgttattaatagtgtttctaaatcacagagacaattgacacattttatttcaacaagatattgaaagcaagaaggggacctacactatttctagccacttgcatttattaatatatgcttagcgcttttaatgcctttgctgcagaagggtaataagtgttttagcaaaaaggtacactgtggggacaaagctgggaagcttgtgcatacagaaagtagctaatatcttagagctgtcagggctcttggaaatgccatgcgtcatgcatcatctcgggctcctgggctttgtttcctggcatggatgtttgcagagagtttggggccatcgtggtatccatggttgcttcttcctggaaatccacggatgtggtcatgtcagcatcgtaggtcctataaacatcagctaattcaggggtcatcagtgggtcagcagctgctggggtgacgctggggagtcccttcatcttccctgaagggctccttggcaggccgggaatgtcatccttagggagagcaaggagccctgcgtggggagcaggttctagctctgtaaggaaagctgggttttctagattgtctgggttggcctccggcataggggagccttgtgcacctccttcttcgttctcagggcctttggtggcagccactgg

SEQ ID NO: 471163 - DNA, 1000 bp, Homo Sapiens; identical to SEQ ID NO: 159569

SEQ ID NO: 471164 - DNA, 1000 bp, Homo Sapiens; identical to SEQ ID NO: 159571

SEQ ID NO: 471165 - DNA, 1000 bp, Homo Sapiens; identical to SEQ ID NO: 340572

SEQ ID NO: 471166 - DNA, 1000 bp, Homo Sapiens
atatgcagaaaggctatgtttcttttctttctttacagaacgagaagggcggtggaagaaggaatttttcgcatctgtatctgagtctgcagtggaacaaggaaaggcgcgggtttgggttggctgcccatcggccgccatgcactgagtggtgtggccagccatgcagcaggtgtgggggtgaggggcgcctggacacggcggcaggactgggccgagtgcacctggagagggtgcggaagactcttccagggcatcagttggtttgccctgctggaaatgtggctaagaggttcaaataaatgttctcaggttgaccaccccgatagagaattttgtgatttcactgcaatcaagaagtttatgccaattttacacacaaaacaggaatcaaagcaggagagcaacctgcctacagtgaagtctgcatgtggcccgttggacttaacctctgagttaactcaacaggaagcaagtgtgccctgctccaattacacaggatgggcctctcacgcaacataaaactcctttccctttctcccaggacaactagtactgatgtttaaatattggtgaaacataatgtttttaatttcacacctcacagagcacagttgaatgcttcataacgacataaacaaaagttaggctaagcactgcagacgagttgggagggcaaagatagcttcccctgtggtctgcactccaggtttgcgagggaatatgtaactaacaaactgcttggctaaggccacagaaatgtgtttcctggtgttttggctgctgacgccagtcttctctgacaaagatgtgttaacactgggtgcaacaaactgaatctctttcctaagatcagtcaggaaaattcatgtcttatttcttcctggatttctttttggtggtgtcataagcacggatgacttcttcctgactaacagctccgtgttcttcttgagaaaaagcatacccatgcgggacgccctgctgcagggagctgccc

SEQ ID NO: 471167 - DNA, 1000 bp, Homo Sapiens; identical to SEQ ID NO: 246518

SEQ ID NO: 471168 - DNA, 1000 bp, Homo Sapiens; identical to SEQ ID NO: 159572

SEQ ID NO: 471169 - DNA, 1000 bp, Homo Sapiens; identical to SEQ ID NO: 340576

SEQ ID NO: 471170 - DNA, 1000 bp, Homo Sapiens; identical to SEQ ID NO: 159573

SEQ ID NO: 471171 - DNA, 1000 bp, Homo Sapiens; identical to SEQ ID NO: 340577

SEQ ID NO: 471172 - DNA, 1000 bp, Homo Sapiens; identical to SEQ ID NO: 340578

SEQ ID NO: 471173 - DNA, 1000 bp, Homo Sapiens; identical to SEQ ID NO: 340580

SEQ ID NO: 471174 - DNA, 1000 bp, Homo Sapiens; identical to SEQ ID NO: 340581

SEQ ID NO: 471175 - DNA, 1000 bp, Homo Sapiens; identical to SEQ ID NO: 340582

SEQ ID NO: 471176 - DNA, 1000 bp, Homo Sapiens; identical to SEQ ID NO: 159575

SEQ ID NO: 471177 - DNA, 1000 bp, Homo Sapiens
ttttttttttttttttttttttttttttttttttgcttcaaaatatttaatacgtgttagacacgtagaagttacatttttatacaaaaatcaatacaacgaaggagaaaatactgtacaaaaaccttatcagctcccccaacctttatacaacaaagactggagtcaccatatctacaaaaccataaggtctttccacttcgggcttctgtctgtaaactctcattaaacactttttaaaagcactgtgtagtacttctgacctagagcttttaaaaatatatcttttctctataaactccattatttccaagcttgaactcttctgtgaagttcgtcaagctttttctcccctgcggggaagcaaaggaccgttaatacgcccctttcctagagtaatcacaggatataaacgtttcttcattgggagagaaaggtggggagggacagaaggaatccaagtctgtgctcttggctaaatccctctcgtcttaggaaatcctgtgcggaaacgccactcctggccctgaagcgggtctagctttccggtgaggggtaggtgtaaagtccctccctccccggagaacgaatggggaactccccggcccaaaccttttagccgcttccttctccacgcagccggcagaggaaagtccctgtctgcccccaatctcttaaaccctggggaaggagtggtgcattccagaagagcaaaatagtcttaatgccacaagacaaacttacatacacagacatacacaaacacaaaagttaacgatcgtcctcttccaatgagcctcaagctcccaggtctccagataagccagatgcgcccgggggcagtttgcgatgcccagaggcaaccagtctgcccaacgcgctcagcgcccgcggtctctgggcgtcctcgcagccgggaagggcctggccctcacttcggggacgcccgctgctccacctcctccccgcaggggggccaagggctcagaaggccacgatg

SEQ ID NO: 471178 - DNA, 1000 bp, Homo Sapiens; identical to SEQ ID NO: 159576

SEQ ID NO: 471179 - DNA, 1000 bp, Homo Sapiens
ttttataagttgaacagaacattttatttctcagcaattctatgcgtacaaattaaacatgagatgaatagagactttattgagaaagcaagagaaaattcctatcaaccccaaggaggactcaaagtgaggctggaagaggacttagaagagtatgaaagtactctaagattttatctaagttgccttttctgggtgggaaagtttaaccttagtgactaaggacatcacatatgaagaatgtttaagttggaggtggcaacgtgaattgcaaacagggcctgcttcagtgactgtgtgcctgtagtcccagctactcgggagtctgtgtgaggccaggggtgccagcgcaccagctagatgctctgtaacttctaggccccattttcccctctgaaaataagagggttggatcaaacgatctctggggccttagcatctcaaatcctgtggatcctcctacttaccccttagagagccttactgggaagtcagtcattaatgatgtggccagttatttgcaagtggtaagagcctatttaccataaataatactaagaaccaactcaagtcaaaccttaatgccattgttattgtgaattaggattaagtagtaattttcaaaattcacattaacttgattttaaaatcagttttgtgagtcatttaccacaagctaaatgtgtacactatgataaaaacaaccattgtattcctgtttttctaaacagtcctaatttctaacactgtatatatccttcgacatcaatgaactttgttttcttttactccagtaataaagtaggcacagatctgtccacaacaaacttgccctctcatgccttgcctctcaccatgctctgctccaggtcagcccccttttggcctgtttgttttgtcaaaaacctaatctgcttcttgcttttcttggtaatatatatttagggaagatgttgctttgcccacacacgaagcaaagtaaataaagaccacaaatgtt

SEQ ID NO: 471180 - DNA, 1000 bp, Homo Sapiens; identical to SEQ ID NO: 340586

SEQ ID NO: 471181 - DNA, 1000 bp, Homo Sapiens
ttttttttttgactgtcaaaatcaccccgtggggccaatttattgcgaggtcgcaagggagacactgctacaaagcatgaccccaaaggtgcagaaatgcctgcattaggctggaagattccctgaggtggctcaggcaggtaagaaacccacacagtcctgggtcctccccaagcctcggacgtgcagctgctgcttcactggaattcttctctcctcctggaaacttgctccagttgtgtcacgatggccaccaggtccccgcagtccttcttgtggaactcggtccaggccttggtcttgcagtacttgctgcaggtcaggatcccgtagcagcgagggcagggcaagaggcggaccccgatggagcggccacactggtagcagaacttgaagaagggaatttgcccctgctccttcacatccaggcccctgggcaggctggggcccttcttcttcatcctgtggctggggatcagctccgctctcttgcacaggtacagccacgtggggtcccactggctctccttggcaaagacagcctgccgtagctgcaagcccatgtactccaggagccgcttccgcgccaggaacgtctcgcgctctgctggcatcagcgtgtggaaggggcagcgggcaatcctccggtcctggaagaatctgaagtagccatagtccacggctgtgcccactgcctccttttctccctgcctgagcattacaggcttcaggatgtcggccccgtgactgatgagtcggtcaatcagggccagcttgctgtccatgttcctctggtgctcgtaggtcaggtcacaggcaacacacagggcactgcccaagcctttggtcaggggcaggttggggtcagctccctgggtcaggagctccttcacaaccagctcattcccactggcaatggacagggagagcggggagtggccactccacagcaggttaggatttgctccgtgggatagaaggagccggactatgtccctgg

SEQ ID NO: 471182 - DNA, 1000 bp, Homo Sapiens; identical to SEQ ID NO: 340590

SEQ ID NO: 471183 - DNA, 1000 bp, Homo Sapiens; identical to SEQ ID NO: 340591

SEQ ID NO: 471184 - DNA, 1000 bp, Homo Sapiens; identical to SEQ ID NO: 159579

SEQ ID NO: 471185 - DNA, 1000 bp, Homo Sapiens
tttttagcccgttttttttttttattaacaatgtgacctgatcacaattctttaaagtctagactagttttccgtatgttttccacattttattctgacatcatatcttttaaaaacaaaaggatgcgaacatttgcacttctcaatgtttttttttttcccatagatgtagtttcacttatttccttcaggctttttatcagcaagaagcaatgtctgattttgataccacccatttgctatgaaaatataagaaggcgtcatcttcaaagcaacactccagttgggcttcttcatcgtttagctgcatgatttcttctacgacatttgtaacagacacaacgtatatagaatttcagtttgggtttttttatccttttttttcttttttaaaataagtatgttttctgcttatttgtgttttcttttctttgaatatattgcacaatattttattattaaaaaaaggttttatgtctcaggcaaaaagtttttctccttcaatcgggaggtgttaatgtgtattattttctaaaagaggtaagtggttgtctgtgtggccatcctcaaaaggaacagaattgacaggtttataggatccaagtctgaaacgacagcaaattatttcaactataaattttccaattccatgtaacatgcctgttgttgaaaagattcctccaacaataccacagagtcttacaaaaaactgccagaatggcatgtgctcctcagtaactgtcaccataagagaactgagatcatatttcataaatatcccagagactccatggctgcctgcagcatggttaatgatacgttccctttctgtcacagaaaactgatgggtgtctgctgatattttatatgtatgtagttttgttggcacaactgtaataaaatattggaacatctggttgtgatctatagcaattttttcagttccatctaaaggattaataattgctggaacaagctctccaaaagacaaatgatctat

SEQ ID NO: 471186 - DNA, 1000 bp, Homo Sapiens
tttttttttttttttttttagtcatttaaattttgctttctaatgcttaagtcttttttttcttaatgtgcgaatatatttattgccacccaaaattggatattcttatccaggtcaacatacacataggaaatgactgacaagatctggtaagtttgcatattatagcttcaccacaactttgttgtttgtttctgttatcagaatcttctcagcagtcctacttcatctgtcaaatattccatggacaaaaaaaaaagtcaaaagcattcgtaatcttgttattgttgctgttgttaattacaaaagttcagtctttttgttttggtagattagctttaagtaacaattacatgtctaaaggagtagttgtgagctctattctaaataaaatactctaagaatttatttctctctgcagctatttcttcattctccaactcatatttcttcatggcaacaaaatatcgaataaaggtttctcctagagcctgtctctggcattgatcttcttccagtgccacaagggcatcttctagttttaaagggatctcagaaggttccacttggtaaaagtctgtgctctcatctggaccagccaagacctcattactgctatgaagtccatctaagccggcagcaacagttgcagccagcaccaagtaagggtttgctgttgctgagcctagtttattttctatccgggtgcctttctctccatgacatttgatattaaatatacagctgttgtcattgtatccccatgttgtaggcacactcttcttcaggtctttcctgtccttggaataacgctttcggcagctaacagaaggcgccatcaggcagctgagcgcagcagagtgcttcaagagtcctgccaaccattttttcccagtgatcgtgagctgctcagttccagaagtgctgcagaacatgtttttcttcctatcgacatcccagagactatgagacaaaatccctgaatcacaaaatccagtct

SEQ ID NO: 471187 - DNA, 1000 bp, Homo Sapiens
ttataggacacagtttattagaggccatcagacctcaggcaccaccagcatgtggagtctgagctgcccacctcctccaggaaggtcacttcgagtccgtgaaggaggcaggcaggtgtgggggagtgaccacaaccaaagtagcaaaagcacccctgtcccaggtgtcagagactagggtggaccccaaggatctcataacctgcactgaccctgagtattgaccctgagtgacctctgagcccgagtggccctgatgcttggcagtgacctgtgtctagtggggggactctgggacattatccccaaaagggttttaggcctcccctaggtcatgtattaaatagtttttccttataggaaccctctggacctctcccagcattgaactcctggcggggtgtttggccactaggtggtgggaggtagggatatatgggtccgtgttcacaatctgggcctcttccttatttaaggtgccagggtggtcagagatggtcctcggcttcctcaggctggacgtccgggcagcaggtggccctgggcacagcctcgctgtccaatttcgagagtagccgggctgtctcctgggtaatctcaaaatgcttgggcagcggggtgcggcgcagggggctgccctcaggggaggcagctgcagggctgggcccccgcccccgcaaactccctctgggcactgatgtgatgggggtctcctcgcacagcttggaagccaccagggccagactggacagctggtgggttacaggcctcacaccgccccggggatacttacatggctggcggctgaagtggccacgagactgtgtccccaggagtgagtcctctgggccttggctggacacttcccctcccccatctttggtgtcttcagccacgtcctctctctggtcactctgtggagttggaatctcggtaggtgtggccgtgggatgctgctccagggtactgtggtgctgggggtctgggccggggtctgagg

SEQ ID NO: 471188 - DNA, 1000 bp, Homo Sapiens; identical to SEQ ID NO: 159580

SEQ ID NO: 471189 - DNA, 1000 bp, Homo Sapiens; identical to SEQ ID NO: 340594

SEQ ID NO: 471190 - DNA, 1000 bp, Homo Sapiens; identical to SEQ ID NO: 340595

SEQ ID NO: 471191 - DNA, 1000 bp, Homo Sapiens
tttttttttttttttttttttttttttttgaatcactgcttttcctttattgataggtcagagagcatttcctggcacccccagggtacagccccctgactcctgctacccaagaaggccaccctttcctgcctgtgatactccgtggcatctgttctgccagaggactgaccctttgtgctccacatatgttttgccaggaaacacttatctcagccacaaaccgtccctgtcctccaaaagactcagagctgcttacaaggggctgctttggtcagtcagctgttagtcctggggctcttgcctcctctgtgggggtagcatcagtcaccctaaagttctcaggccgccgctagctagtgagttacaagattttagaaaccagctcttgtccacagatcctcaggcccctggttcttggatccagaggcgtctgaggtatgttcacaggcacctgctgctgctgctgctgcctctgctcttgccctcagtccccgtctttccacctgggtccccttgcactttcatgcctgaggctgcactggtggccaagtctaaactgagggtcctcccgcagaccgagagccgccgcagcgcctcggaggcggcctccacgggcatgctggagcgctgttccagcagcatctccagcagtgagctcatctccgagacaaaggtgctggccagcctcgtgcctgttgggctcagctctggtgcctctgccttgccgaacgtctggaaggtccttggctcctccgtggctgcagcatccggggagatcacattgtcacggtagttggtggtgaggggcaaagagagtctcgccatccaggccgggtcaggggcgctcagccggtccagggccagacctgtgctggggtccagcagacttgacagctcttcttctagcagttgcttcacagagaggtcctcttcaggatccaaaggcccttcctcctgttctgggtctgtctggcctccagcccttgcacttgggcca

SEQ ID NO: 471192 - DNA, 1000 bp, Homo Sapiens
ttttttttagccacaaaaataagactttattgaaaaaagtacataattcaatataaatacaataaataatcctccccaaactgtccccaggaggataaataatccccaaatttcccttcccatctaataaatactcaaccttatcataggtcagcatcacatgtcagtcagtattggtaattttcaacatatgcaggtcccactaaaattaatggactaattaacctgttggctcacaggtgcctggggtggtagatttatcttggccttgctgggccatggagatctgagtgccatccttgagctgctgcctttagggactcagggttgctgctccatgggcaaagacccgggcggctacagccacaaaggcctggaggctgcgaaggattttgaagcggagaaggagacgctgccatggctggctgggactgaggcttggaatctgctgagtctcccagtggtgaccctcaggctgcaggagttggctgaggcccagtagggaggcatgaagctggcccacagggctatcagggagcagagaaggctcccctgtgaaaatatccgatcctagcagcttctcataaaaaatcagaccctggtggatcctttgcaagcagaactgactgttgtccctgagtccttgggggtcacagccatctccacactggatatggggaacatcatttgtagtctcttcatctccctcttctcttagatccatgtgtcccactagtggatgtgcactccaggccagtgtgcagagcttctgtgaaagctgctggcactgagtccaggcagggctgctgcccccaggcacagctctgccctgagctgtccagggcagcagcaacagcagcattacagctctgctccccagcatctttttgccttcttctcaaatctggctggctctgcgccttgcaccagtcctggtggaatctctgcccacttccacttgctttgagcctgattctctctgttcagcgcgtctctggtt

SEQ ID NO: 471193 - DNA, 1000 bp, Homo Sapiens
tttttttttttttaaagctggatctattgtttatttacatgaatactgacatcttaaagattaagaaaaacaagttcatacacatgcatttaaaattcatttcagtcaataaatttttgttgaatgcttattatatgcaaagtactgatttaaactaataaactggttaacatcaatgttacaaatataaagtccgtttaaagtatcaatatcaaaataaatcttccttccggtggtccacaaaagaaaaaagatgtaccagcacttgtaaattaagtttttcaatttccaaaatacctcctttaaaacagaagggaataaattccaacaatgctattttcaatgcattcattatttcaaaacttactggaatatttgaagattacttgctgcaagctggactcatgtgaaaataaaccttgacttcacagagaagtctacattgataaatatatatccgttgaattaataacagtgtaagttacacatatgtatacaaaaaagtaaaatgacaaggacgagaggagtttttcatggaaggtggtgggttgccatggattctgcttctcttgattttctgaggagggcttgtttgagggcactaattttctcatcaagttcagccagtgaatagttctgttgaggtggttgaacttttcttctttttccagaaaagcttacagactgaaaatattcaggagagatgccttccaattcaaggattttatcctcaagttttttaattctctgataaatgtctcttggcactggaccacctgtctgtaaccgcaagtgggcctcaatattttgtagtcgttcttctacagcctgattaccacagtctcgaagcatgctgttaggtttatgacctgaccctggaattccttcaggtctagtctgtggtccgtatgtattcacaactctagaaacttttacgtgacttttaaatccggggtaaggggtaaaaatcgcatcagttcttgcacaactattttcttga

SEQ ID NO: 471194 - DNA, 1000 bp, Homo Sapiens; identical to SEQ ID NO: 340597

SEQ ID NO: 471195 - DNA, 1000 bp, Homo Sapiens
tttttgttgaatttgtattttatttcaagtgtcaaagaaatcatctttgtttatttagatgaaaccaaacactacacatttacactcacactgcttccaggacccaagggtttcacagaccatttgcctacctggttctttcctctcctctttccagtgatttctagaataccctttcaaaggaccacatgaatatacgaactgtaaaattcaactttaatcttttgcgaaatgttttatttactgcttaaaatctaggtgggtggatatattcatgtatgcatatattgatagattaatacaaacataagtatgtatttaaatttaaggataagtaaagtgagagtacaacagccccattcttagttaaaaagaaaagaaaaagacaagagcaagccactgccaccacaggtaccagcacttaaatttgtcagcaggctgaccaaagagtggcctgtctgttggcattcatcggacatggcagctcccttcagctctccagtgagtttcaagttcagagcactttcagtccttgtcttgtttatctattactgaagggtttctaggaaggtttagcagtgcttcaattttcttagcatcattctcaggttcatcttcctgtaaactactttcaattttctcagggaggtgctcagtaacttgtagtctgcctttccactcttccagttttagctcatggagtgcctttcgatccttctgttttctttcctgaacagtctcaccagagtacttctgaaatgccatcagcaggcctcctacaggagtgcccagcaaggctccaattatgccaccagccaccaggccacgcaggcctacgtttatcctaaaaagacttcccgtgacagctcctgcaattacaaaatggcttaaggcatctttatttcggtatacattcagactagtgttcactgtgttgaatatagtcacaaacactgcagttctccaaccccagcgccagccataacgaatgaagcctcgt

SEQ ID NO: 471196 - DNA, 1000 bp, Homo Sapiens
ttttttttttttagtatcatgatttttaatttgaattaaagcatttttttttgctttgttaagatgaggcaggccttcttgctgacattttaaaaagcaactatttttctttcagtttacactatgaggcattggctccaactgtcagcattgaaactgtcagcagttccctaccaggaaactggttccaaggtctagggtttccttaggtagaggctggcactgtgaaaataatggggctctttatccatgtcacctggaatggagttaataccctgccagtcttagttgatttgacatactaacaggatgggtctgaacgttttctatagtttactcatgagtgactttctttggcttacgtaaatggcaaggccagacaaattagcttatggacctagcaatcattcttggcccagattttgagacacttttcaatcaaccatagttgctctaatacctgagatttgctgacagtgcttggttcagaaaaaggttcagtttcctgagcaatttttcttttattgggatcatcttaattcttgtttgcggggttaagatgaaggaaatatgagcaaggactgcactcagctatttgggtgacccttgtataccatgagcttcttagatagggcctgatgtgatcaccagaaaacattaattgatcgtgatgacaggagatagtctctctagccagaacctgctaatacaagtcctgatgaattgagaatgatgcctgaaggaagcagactgacgtggtgcattagtaattttaggcaaaagaagataatggtactagtatgtatattttttagtttccttttccattgctttgttttgcacaggctgaagaaaataaatgtaaacagcatattatggtggctcagggtggataataatgggacatcacttcctttgtttcagtgtgaggttgcccctgctatgtgacagctccaaggactaaagatttcaatccccagaaaaatgtcgagtcccagta

SEQ ID NO: 471197 - DNA, 1000 bp, Homo Sapiens; identical to SEQ ID NO: 340598

SEQ ID NO: 471198 - DNA, 727 bp, Homo Sapiens; identical to SEQ ID NO: 340599

SEQ ID NO: 471199 - DNA, 1000 bp, Homo Sapiens; identical to SEQ ID NO: 159583

SEQ ID NO: 471200 - DNA, 1000 bp, Homo Sapiens
ttttttttttttttttttttttttttttaatatgcctaatttttattttttaaagattaaaatgaacaaaaaatggcatgatgggagcctcattgatagtttatcacagatgccaacattatcattttaaaacaggtaaacaccaaaacttataaataaaattaagatatcttaagacatctttaaaaatatacaaattctctacaataatatatataaatataatactttgtcattgttactttctgggggttatattttcataagcaaatttttaaaatttttctacttaacaagtctagatgatgattaaaacagtcaccaacttccacactacaaacacagattttttttgtaaacatgtaatgttgcaacttggtattttcattactacacacagtccttcttcctatctcctaaactttatctgatagttttcctattgatgagacatttcttctctgctataaacatctatcacagaagtcttaactgaattgaaatgggaggaattgatactgatttctataagttatatgtcatatgcttcttcaattatattttaagatataactataactttatattagtttgtgtcttttatgtcaatatattacatatattacgatagatatgtgctacattgctttcagatactttcatgccctttgtttttgtttgtgtcctaaagcatgtactccccagttacttgaggatcttaacagaatttaaagatttagcaaagaaagctgccaattcaaattacttactctttccttctctcacaaacatgaatgtatttatatgtatattacggtgtactttatttgttcttactcttctaagaatgcacacataaagttgaacataatcaatgcacagcattgggatttgtgaaacttgaattctgggcacaccttggtccttaaaactatggtactatgacgtcccttgagtcattctcagtctccttgacttaatgctaaatgaatataataac

SEQ ID NO: 471201 - DNA, 1000 bp, Homo Sapiens; identical to SEQ ID NO: 340602

SEQ ID NO: 471202 - DNA, 1000 bp, Homo Sapiens; identical to SEQ ID NO: 159584

SEQ ID NO: 471203 - DNA, 1000 bp, Homo Sapiens; identical to SEQ ID NO: 340604

SEQ ID NO: 471204 - DNA, 1000 bp, Homo Sapiens
tttttttttttttttttttaaatgaggtgccagagtttggtttattggctcatccagtgccaaaggtccaatgggcaccctcttcccaaggaaccgggagccccgcggctcctgcatttctctttctccttcacgtgttcctcctggccctgactgaagccgtggcagaagctggggcgggtgtgagcagaggctgggttctgccaggggtcttagggcccagtctgcttggtacaggatggggaccctgggcaagaggggatggaccccaggggcagaggagaggggcccactcagcaggggcctgtaccagacagagcaggggtgggccctgaggagcatgggagtccagcccaggggcacggtggcaatggggtgacctaaaagggagcaaggtcataggagcaggtgagaggccccccagatccccgttctctcatgggctgggtcctctgaggctcagagcctaggatggagggttgagcagggaaagggccagatgactgtggggctcagggtgggaggaggcgactgctggagggacagtccttgacccaaactaccccgagccctagacccagaaagacacactcacacagccctggacccccctttttaatgtgggaacatgtggcactcagccccacccaatgaccaggaaaagagcccccagctgcagctctggcctggccatcctggtcgctgaagcacaggccaatccctgtcttccatccacagctgcacctggaggccccacccagggtccccaacgtcctccccgtgtgctccctttcccccatgtgccttcaggcccgtccttggtccatctgggctaggacttccccctccctgctcccaaaccaaggcgagcagtggaaacacgataggacctctgagaagcggattgctatgggcttcagcaaggcactgggtgggtggggcagggcggggctgcagcggaacagcggtggaggccgagcagtccccacctccttgggtg

SEQ ID NO: 471205 - DNA, 1000 bp, Homo Sapiens; identical to SEQ ID NO: 340605

SEQ ID NO: 471206 - DNA, 1000 bp, Homo Sapiens
ccaaatgtctttattgaaacagaatgatagagcaagaaataatgaggtctgggtggatgtctttgggcgcaggatggagcccagacccagtggttacagtgtggagctctctccctgtcccctgactctggccaaggaagtgaatgcaaagcagcagggaggaggcagggtggggacggccctctgagctctccgcgatggctggcgtgaggtgcctctgagacttctgggcagccctgccttccctactcagtcttcccgatcttcttgccacctttctgtgtgggccagcctcccgccagggtactcagaggccgctcagagggcagggttgggggtggcaagcagcgggacgtggtcacagcgggtagggggtggctgccgcagcagggaaggccggcgacacagctccccgtcccggagcacctcgggcaggagcttgcgcttggtctccggcagcagcataatgctgagaatgcagaggagggcgcaggccgccagcaccacgtgctgcaggaaggctccatggcccatgtggaggcgctgggccgggccgctcagtcctccaagcgcccctagagccatgatcaggcccaggccacggccccggacagtggtggggatgacctcagcagcaaggagggtgctgaggatggcggcagcttgggaggagaagagcccaaggacagagaaagtggtgatggcagcctcgttcagataatcccacaggcccagcaggaccagggaagcaatgccggtaagggtcatggagagaagaaggatgccccggcggccaaatcggtccacggtgacccccaggaagacacaggccagggctgcggtgccgctggccagcagagagcacaggtagaagtccgatgggctccctcctcctcccacaggctggtagcagtggcgaatggcatgggcaatgaagttggtgaagcccaggataagcagatttttccagatgttgcggtagttgaggagggaagcaaag

SEQ ID NO: 471207 - DNA, 1000 bp, Homo Sapiens; identical to SEQ ID NO: 340606

SEQ ID NO: 471208 - DNA, 1000 bp, Homo Sapiens
tttttttttttttttttttttttttttttttttttttttcatgcatcgactcttttatttctttaggactcaaattccactcggatggggtcaggcttgggtctggggaccgggctggcacggggctggttcgggtcgctgctcgagcccaaggtggcgtttttaattcacgtacagcctcttgctccggcgcttcttgagcccttcgatgtatcgctgcagctccttagtcaggaagtggtccctgccgatccctaactggtagctccggagggctttggtgaggatttccagagcttcattctccatgagttccatcaggggcagtggcagcctgctctgctgctctgcccagtaggctcgatggggcatgtgcttcgcaatattgagtgatgacattgaggaagacttttcggcctcgatctgggatgcagtgtccttctcccccagattgatttccatggagctgccgcggtgcaactccagctccaccagcgcgtgctcgtccagttcctccggcttgtggctggccttgtacccctcgtccaacgagccccgccccgggctgtgccacccgcgggtcttgctaatgttgcggccctcctcgtcgaagccctcgcagacctcggacagcggcatgttcagctgtgcctgggacagcgtggtcgtggtccacaggtcccgagtgtcgctatgcacgctctcctcgtccgagccttggcggtcggaagacttgagcgacactttcgaaggcttttcctccatggttctgccccaacggacccagacgccacaggcctcgagacgagaagggagtcaacgctccaggaagggggcggggcagggtctctcgcgctgggagagttcaaacgacagccctccacgcgagatgccattctctctcccctgcctctccctccctgcaccccacccgccaatgtgtgtgcagaggctggagacgcgcagcccatcccggctgatccccacgccggaccctaca

SEQ ID NO: 471209 - DNA, 1000 bp, Homo Sapiens; identical to SEQ ID NO: 340607

SEQ ID NO: 471210 - DNA, 1000 bp, Homo Sapiens; identical to SEQ ID NO: 159585

SEQ ID NO: 471211 - DNA, 1000 bp, Homo Sapiens; identical to SEQ ID NO: 340610

SEQ ID NO: 471212 - DNA, 1000 bp, Homo Sapiens
tttttttttttttttttttttttttttttttttttttttttggttggggaatacatttttattgttattatgcatagccattcatttttgtatcttgagttttcctccaaagcatgtttttcttattattcctcccaggaagctgtgccaaatggttgtatattgacgtgaacatatgtattatcttctcaaagttttcacagtatatactttagttttcctcaggatcctcaaagagtctattaacaacctcttttgcttcataggcgttagatgctccatggacaatgtttttcaatttacttattccaaactgggctcggatggagtcaggggaaagtaattttgcttcttctgggtctgttgggcccatcaatcgtctccattctgcaacagcattccacttggtcagaatcatgaccatagatggacccacagataacatttccaataaatctttataaaagtcttttcctgttacttttggataaattttctcagtttgctcaggagttaggaacattttcttcacctgtgtcagatcaaatccagcctccttaactatcttcaggatctgctctctttgttcacttgttgcatgaggtttaatcaagcctaaagtgctttgaagaggaaagaaatgctgtatttccctttcagcggtttctaatgaatcgctgccatacaactggttgaccggcaaactgtccatcgcaaactgtgcacataaactctctggaaaatattcaatggcttcttcaacagttcttggtcccagtaattgtttccagtattgcaagccattgtctctcaataaaacaagggctagagatggaccactggtcatgttttctataagtttattaaaatagtcttcattttcatattccttgcacagtgcttgtgcttctttttccgataatactacttgtctttgctccagtattttgaagtcttcatctttaataatacgcaaaacatcatctttcctttcatgaaa

SEQ ID NO: 471213 - DNA, 1000 bp, Homo Sapiens; identical to SEQ ID NO: 159589

SEQ ID NO: 471214 - DNA, 1000 bp, Homo Sapiens; identical to SEQ ID NO: 340614

SEQ ID NO: 471215 - DNA, 1000 bp, Homo Sapiens; identical to SEQ ID NO: 340615

SEQ ID NO: 471216 - DNA, 1000 bp, Homo Sapiens; identical to SEQ ID NO: 340616

SEQ ID NO: 471217 - DNA, 1000 bp, Homo Sapiens; identical to SEQ ID NO: 340617

SEQ ID NO: 471218 - DNA, 1000 bp, Homo Sapiens; identical to SEQ ID NO: 340618

SEQ ID NO: 471219 - DNA, 1000 bp, Homo Sapiens; identical to SEQ ID NO: 340619

SEQ ID NO: 471220 - DNA, 1000 bp, Homo Sapiens
gaggcgctgagaccatctgttattactgctgagaagggccatgtcattctaggctcttggctgtacatgacaagggctggtacagagctcgctcatcagtgttcttcctccgaagagcacattctctgcacacgtctgcgtctacctgtgctcagagtcaccccttccaagcaaggaggaggccacatgggcctggggtagccctggccttgcccacctgctctgccgtaacacgtctcctcttcacccagacaggaatgcagggggaggccaggcaatggctgtttcctgccacatggtaggacccatctaaccagaaggaactgtctattccagaagctgggcctggggaactgggttgaagcagccacgggaaggagcccttttgcctgtagctgagtcttattctggtcccttagatgtgtcctcgcttgtgcccctgaagtttggtgttgcactggggttcacctcagggatcagacctgagtagacatccaggccgggcatccttggtcgtgcactcattcagagagctgacaggtttggctttgagttttgggctcagactctgggctgcagtgctgcccagggctcgccaccagctctcagcctgctcttcggacggtgctgcaaacaggatctctgccccactggtcagccttaaggagaatgtgtgtttcctgccgtggcggccccgcagcctctcacaccgggctcccgtgaggtcaaggagggctatggaagctactttctccgctgccatcctctcatccaggaacaggctcagagagctgccctgcaaggtcccgcggcagctgtcccaggagctcgagctaggctgcctcccgccaggcagcaggtgctgcttgaactccaaagacccctccatggtgggggtaccctttgcatcctgggggtccctcgtctcagccagctgtgctcctagcccctggtgtccagagggcctccactgaaaggatgtcagcgagctgccagctct

SEQ ID NO: 471221 - DNA, 1000 bp, Homo Sapiens
ttttttttttttttttttaatagatgggggtctcactttgttctccaggctgatctcaaactcttgacttcaagagatcctcctgcctccgcctcccaaagtgctggagattacaggcatgagctgctaggtccaatcgctttgagatttttttggtttggtttggtttgttgttttttgtttgtttgaggcagtcttcctctgttgcccaggccggagtgcaatggcactatctcggttcattgcaacctctgtctcccaggttcaagtgattctcatgcctcagccccctcagtagctgggattacaggcgcccgccaccacacccagttaatttttgtatttttagtagagaccgggtttcaccatgttggccaggctggtatcgaactcctaacctcaagtgatctgctagcctcgccctcccaaagtgctgggattacaggcgtgagtcactgtgcgccgggctgggtaagcttacataacaaagcagttaaaacctttaacgtagtgttattacagttttctctccttcactagactgagatctgagggtcgtgccttgctcactggagctctgccgaatgcagtgcgtgtctgatcgtgaacatagtatatttatgggccctttcaggtctaaggttatgaggacgtaaccaagggccaagtgtgcgatcacctccaaccaacacaaaccgaggtgccgggaaccccttttaggtttacatccccatttggttccttgacaactcacttggcacctgagcctggagaaccccaactttcttcctctcccacccacctcactcacaggcacgggtggggtgaggatataatactttattcactaacacgggccgagggaatgtagtgatgtggggtgggcactgtttccagggaccccggcaggggattctccctgtctcccagttccagggcagccgggcctgccgtcccctcaatttcccagacccggaggccggggcgaggaggagcctgg

SEQ ID NO: 471222 - DNA, 1000 bp, Homo Sapiens
ttttttttttttttttttttttgactgctacattttactttattttgttgtaaggaaaaccaattgactaagttgtccccaaaatgttagtgttcactgatcaagaaggaaatgaggtcagaaggcaaacttttcacttcttctcaaacataaattgcaagtatcacagaaaattgtaacaacacatgcaacacgggatggctttcaacacacagagagcctaagcaagaagagtgagtactgaaggtctacagaggtcagactgggagcactaccacaggaagtttgaatctatccacgcagctctttcctcccacagtccaggctcaacacctcttcctattccaaggtggcttatccatatgcagaaatccaggctgttccatatacattaatacttgcccagctgtgtttcacgaggcatctccataagccaagccccgactcaaattctgtacaggaagttcccgttgctgtcaaagaactctcggcccctctgcactactttgctgctgaagttatctggctcctctgccttcaactcctccagcttctgaccacttggcaacgcaccactgccagttcctctggggctctcagaatcactggagtacttctgcagctctcttggatgacctaggggtgcagcaacaggcacaaagctctcctccaggtcctggatttctttatttcttcccttccttctccttggtgtatttgtcctgtgagtgtctgactctatcactttcaaagctgtgctgtgatttgggtctttagatgaggcttcatgccctggcataagcaaagagcctgatacagagtggcctgcagggagcagctttgaggtatttccagagccccggaggtgctgcagcgagtgggcaagcccagctttcttaaggactttttgatcctgcttcagcttctgctccaatgtgggtaaaaacttgctttttaaaactcttcggatcacatcagtgctgacatcaaagccttcagc

SEQ ID NO: 471223 - DNA, 1000 bp, Homo Sapiens; identical to SEQ ID NO: 340621

SEQ ID NO: 471224 - DNA, 1000 bp, Homo Sapiens; identical to SEQ ID NO: 159591

SEQ ID NO: 471225 - DNA, 1000 bp, Homo Sapiens
ttttttttttttttttttacaggtgtaaacatctggttttatacccaaataacaaacttaacagcagtaaaacaaatggtttattactgcatatgttatattaaatttacacaatgatatataaaaacacatactgtttatattatatagtaatttaacatcaacaggagtatcaacacaagtactactcatgcacaaaacatgcatatattggtatacaaaaagcaattttacacaatactgtttaccaaaaattttttcttaaaaaacagcccttccacataggatcaaaggtccaatctggactggattgcactaatatgttcaggtcaacgcttcggtggcatagcgctcagtgagcaattctgggattggagtcatgcccaagggttacttcattaatagtgaatgtctctgtgcccaaggaccaaaattttatcccaaaactaaatcctccaaggaatgaaaggttggactggctacaaattagggagggaaaagaaggcatctaaatgttggataaacggccctagaaggggttattaggaacagggcctaggcaccaagtgtggcaaaagtttttgtgaatccttttaaggtccctatcgaggctgctatctctggatttaaggtttggcctccaagtcatgagtctagtaacagttctgagaataaaaccgaatggggatacatctgagaaatgtagactacataaaaaaactatagaatacaatgactgcccctcatacctacttcacactattgtatgtggtgcccctcaacaggaaaaccctcatggagacactgccctgaagactcaaggaacaaatataaatccaaaaattccatccacctgaccttgggatcaaaagatcttatcccaataaaacttgaacatcaaaacctgtaccttgccggatgctcagaaagtttaaaataaaaaacagctggtgccacaaaactcactatcaccaccattaaaacctcaatatgtacttct

SEQ ID NO: 471226 - DNA, 1000 bp, Homo Sapiens; identical to SEQ ID NO: 161066

SEQ ID NO: 471227 - DNA, 1000 bp, Homo Sapiens; identical to SEQ ID NO: 340625

SEQ ID NO: 471228 - DNA, 1000 bp, Homo Sapiens
gcggtgtctggtttattcaaagtggctgtcagaggcccgaccatggagcaggaaccaaatagttgggagctgtggggctgaacagggcagggatttccaggtatcagaaggtaaaaggaggtcagctgagcagccacagcagcattagggccaggctaagcaggaaaggccaggctgcccagggcccagccccactcatggctgcagcatagaacctcgccacctcctcattggggttgccctgggctgggtcgaaccacatctggatgcagcggccactccctcggctgtagttgctgaccttgtaggagtgagtccagatttcattgcacagaacagtgggtgtggggaagtagaaatggaaaggttggcaggcagctcccactgcgcacttgttaaaccctgaagtccagttccagcccttgtgccagttgctcttgcaggtgtaggaggtgcgacaatcttcccaccattgctcacagtcctctttgcacaggggcacgttcagtacccgctctttgcgccagctctgatccacctgctggatccagggccccaagttgggggagcactcgtagaggcaggtgtcctggatgaaatgccgtttgcaggcaggtgccatctctccacagtggttccagttgaatctatataggtaggaaacatccttatgggcttcctggctggtgttggtagaacagcaggcattcttcctccagggtcgacactgctcatgcaacttgtcctcggggcctggcttttccttgtggtgcttggcgttcatgcagacattgagaagctcagtcctggcccatgcaatccttgtctgagcctcccctactacagccacccacactagaaggagcagcagctgtgttgtcatccgctgagccatgtctgtcccttgagggccacgccggagaaatctgtactctcagggaataccaggtgatcctttgggttcagttcctgcgggaacaaaccctaactgtttagagca

SEQ ID NO: 471229 - DNA, 1000 bp, Homo Sapiens; identical to SEQ ID NO: 246520

SEQ ID NO: 471230 - DNA, 1000 bp, Homo Sapiens; identical to SEQ ID NO: 340627

SEQ ID NO: 471231 - DNA, 1000 bp, Homo Sapiens
tttttttttttaaatggtatttgctttatttttattgttattgataatacattagacattaccctcccatcaggtgcacagaagaaagtcaaggctggaatttcattctcttatctaaatctctctgttctctctcagggaatattttcagagaataggtggaatgaagtgaggctgtggagaatgttatctatgataggatagagggcatagaaggccaggagtcaggagacctgggttctgtcctggattatacaccagctcactgaggagctttgtcctctctggatcaagagtcccacctgaaaatgaaggaactggtccagataacactggagccctttcccccaagatgcactggcattcagaggatggtgcaggtccagtcctcttctgcctgtggggtggatgctgcctggagtgtgctgggtctatgagagaaatgagggtactcatgtgttccaatgtaaccatatttctgatacctcctgggatcgtcggtctcatcgtctgcactgttgctttcagccagcagaatccaggagctcactggggacccatcccaattcttaaagcatgggtaattcagccaggcctcagcctcttgtgccagctgcctccaaccctttgggtctccaccacccaagtttcctgtagggtccgccgggtccaggatcacaggcctgggtttcgtgagctgccttctcaggtacttttcaataatggggtttttaaagtcataatactttgtccagtagatgcagagttgctggtagtttatgactaattccaagaccgtccgaaatccctgggctgtgttgaaatgtgttttcatgctccctcgctcccaagcatagaccgtcaggagctccagggcatactgaggtggcagcttcccaagcttcttcttacaattttggtaccagtgcttgactaggcggatgaggctcttgagcttggtggggcgctgcttcaggaagtctctctgtagttctgtgaa

SEQ ID NO: 471232 - DNA, 1000 bp, Homo Sapiens
tgctctacttacaatcaccattttattataaagaatacaaatgaagagccagacaaagagtatgtagggtggcaagcactggaagggcccagagctcaggagcctttgtccctgtggaatcaagatgcgctaccttcctagtacattggaatgtctgccaatcaggaagctccccaagcctcactgtccagagtttttattggggtttctttacataggcagcattgcttaaatcactggccatgttaaaattgaactcaatttccagccccatcacctccttggagattgggggtgggatggggctgaaaattccaatgctttaaccacatgcttggtctttctggcttggccaactccttccttgaaactaagggcccaccatgggtaaccttgttagcataaacccaggcatgggtgaaaagggcttgttatgaatacaaaagacactcctatcaggaaactctagaatttttgaagctgtgtgctaggaactaggcacaaaatccagatacattctttattgtatcacaactggtatatgcaacagtgataaaagtttaagtgagggtatgtgaggttaaagcacctagaccttcaagtatctttaaggctaaagcccaaggaaaaagtcttttgatttggcaagaggatactcctgggtgggggggagaaaggcaggctcagaaggaaaagacaacagcctcatataaatatgacaacagttataatctgagcctttggagagcttgaagttctaatgaaagggttggctggctgctggcatagaggatgtctgtgtcagcaggggcagaaagggttttgtatacagaggaaacagacaggacgtggatgagttggaagcaccgagagcaagatcacagagttatgagaaccaaggggaaagtaaagagctttgctttgaagacacagaggattccttttttagactggaaggaaaaaggaggagctaattggaaaaatacaagaaaaaaaatac

SEQ ID NO: 471233 - DNA, 1000 bp, Homo Sapiens; identical to SEQ ID NO: 345877

SEQ ID NO: 471234 - DNA, 1000 bp, Homo Sapiens; identical to SEQ ID NO: 159592

SEQ ID NO: 471235 - DNA, 1000 bp, Homo Sapiens; identical to SEQ ID NO: 340630

SEQ ID NO: 471236 - DNA, 1000 bp, Homo Sapiens; identical to SEQ ID NO: 468738

SEQ ID NO: 471237 - DNA, 1000 bp, Homo Sapiens
ttttttttttttttttcattaaaaacatacagcacagaacattagtcttacgtctttcttagtcttaaaaaatataaatatagagggataatttgtacaggatgtataggtatgtacacctttaatatgcatatgagaaattcagaaccaagtttatgaaacttgaccttaaaggaagccttccttttgaagcttttgaagaaggctctgagccacaggcagctgtcccagttccagcagccccgattctagtccactccaggtcctcctgacctggtgcgcagtgccgggagcagtgctggccatgtcactgcttcctctccactggctgctggagacacagctcactccctgcagagacaatgggcaggctgctttctaggtggtggttgatgaggtggctgatactgtcaaagactctgtcctttgtctggatcgtgccttctgggtccacgagcagcaggtgcttggcctggccattgtgcatgcccgtgaggacaaaggagcccgggttggtggtgctcttcctgaccaggaagtctccgtctttctccagcagcccctctgcctccttcctgctcatctctccttggtaccaagtctcggcttgcagttcctccagcatcttggcatctggggctctaggtgacacagggctgatgcactccacggaggctgccttgcttaacacgggccccaagggctggttcttgagagcatcttcaaaaggtttcatgtcaaagaggtctttccttgggctgctctcagcactgctgaccgcagccggccaggcctgtggtgggatctgctgagtgttgacgtaggtgggtgcttctcccgtgggggccacgtgcagtttcccttctggcgtgctgtagatgtccgaggacccttgccttaaaggtgtttgctgccagtcttcgccaaaagtgtctcctaagtgtcttccctggtaataagtctgctcttttcctgcaaactgggctgtgtcaggagcatg

SEQ ID NO: 471238 - DNA, 1000 bp, Homo Sapiens
tttttttttttttttttttttttttttttttcagcttcaatgaatttttaattttgttcaatcttgcatttgttcaaccaaaaacaatttaaagaggaacacgacaatcagccttagattgagcaagttcagctcctcactagggagttcttgaatccaccatgaaaatcaacagtgtgcatctaacagttttcttttaatttgagaactgaaaagtgaatcatcacatcaaatattcttcagggtctctttggtttccagattaaacatgtaatgtgacggtcatcttgccacattctcacatttccattttaaataatcataaataagaaaaccttactattctttggcataacacagctgattgattccgctgagtttcaaagtcttagaaattgcactcattccttctttagagtcctgcttcatggcaaaagttttcagctgaaagactctttattgtattcaaatcttgtcccatatgagttgttctggttactcagtttatgaagagtcttggatagtgaattgggtccacaacagaaaacaccaactgtttttcctctgttatattttgctatttcatcaaacaaaagtttccaccgaggacgtcctataaacagtcttgaattcagtgcatgatatttttctccaattatcttctgtatcccatctgtttgactgaggtacagctggatgttgacatagtcaggtctgttctcttgccaaaacttgttatgcaacatacagagtaaatctgcaaaccaacggaaggactggatatctctgcatacccaaataaagtatagtcttctaagcttgtatggtttccagtcatccaacagggtgttgagtattgatgcaaatggagttactccaatgcctccagccacgcagaggctgacctcatagttcagtgattcctcaaatggacttccaaaaggaccatcaatatacagcttgggataatttctagattgaatgaagggcagaatttcgg

SEQ ID NO: 471239 - DNA, 1000 bp, Homo Sapiens
ttttttttttttttttttatttatgatttctaattttattataaaataaaagcagaaatatttcccgaagaacattcacatgagggcattacggggagacggcaagtcggcggctcggggggcgcgctcagccgggagcgctgtagtcacagtcccgggaggaagagcgcggtgtggcggggcctcgccaagagagaaggaggaggggcgtatgacgaggcggcgtttaggggcttctgtggcgctgccctttctctctcacttaagttactagacgaaaagctgacacctgcagctcccactgacccacatgggcgagggaaaaggcctcaggagatggcctaggttcaaagtccctgtcttttctctcctcttccctctcccaccccctactccggtaaagcgagggccagaggtaggggcagatagaccaccagtcaggaggagaaagacaggggtacatacggagggaccaggacacagagtacaagagactggcaggagagaagagaggagaaacagagaaggagagagaaagggagagacagaaggagagaatgaacggtggcaagctagaaatctagaaggaaagcaatacaaggagagggagaaagacagaaagcagaaaaaagaaaagagaaggaagggaaaggaagaggaaagggggaaaaggcaagacaagagagggtaaaaggaagagacagagggagagagagaatgacagtggtgtataatttattcccttctgtggttcaagactcagtctccagccccaaaaggatcctaaaagtaacttgttgaaaataaatcccaaacaagaaccaacatagacagctatctgccctacccggctgttctacccgctcagcctgcgggtctttcagtacctggtggggccgcaggggcggggcgcccctggacaccgccactccacgtccccagtgtcaagtcacaaaaggcaagctcatcaaggcaaatgggttctaggagcccaggtcca

SEQ ID NO: 471240 - DNA, 1000 bp, Homo Sapiens; identical to SEQ ID NO: 159595

SEQ ID NO: 471241 - DNA, 1000 bp, Homo Sapiens; identical to SEQ ID NO: 159596

SEQ ID NO: 471242 - DNA, 1000 bp, Homo Sapiens; identical to SEQ ID NO: 159597

SEQ ID NO: 471243 - DNA, 1000 bp, Homo Sapiens
ggcaaacaaatcatgttattaaagaatcttttaaaaaatctgcatgagactgccatccaaattaaaatacacattggggagaacaactaaatttttaactttcagaatccatggttttccatacttgccattttgtaaaatgtcctrttagatccagaataatttcwtaggtaaaaacaccactattaatgtaaacacaattgaggactctacaattgtcactttgtttttcttgccatgtggtatctctctgttatcctgactcatctaggtctagcaagatgctactttggaaatgcaattaaagcatgcatatttttcctaaatccttaagacccaggtcattaaaaatttatttattttaaatttcacttagaattatctttcaraaaattaacatgtacgatcccaagcactagctgtcattttgcttatggaagatttacaaagtttgttctcgtgaaaaayttattatagtagcacttcaaaactttattttgtctgactagactgcatatgtattttctttttgtgtaaggaatataaaaactcaaagcaaatgattcttatttaaacataaagttctataactttagctgcaatttttcaaataattatacaaaatatatgtgaggtttagaatcattttgttattggggaagaagataattttaaataggctatcatttttgtaaatattagaaatgtagaatttattgatttcaactgtcatcaatcaaatgtatacatcatggtcatcaccaccatcatcatcatccccttcatcttcatcatcatcttcaatttcatcttcatcattcataatatcgtcttcatcatcctcatcatcagtccattcatgaaaatcgccactagcaaaatctccggagatctcaaaatctatagcacaatctgcaacaccatttattctggatcccatgacttcatttccatatctgtcaacacaccagcactgtccaacactgccatgacactgtgt

SEQ ID NO: 471244 - DNA, 1000 bp, Homo Sapiens; identical to SEQ ID NO: 340636

SEQ ID NO: 471245 - DNA, 1000 bp, Homo Sapiens; identical to SEQ ID NO: 340637

SEQ ID NO: 471246 - DNA, 1000 bp, Homo Sapiens; identical to SEQ ID NO: 340638

SEQ ID NO: 471247 - DNA, 1000 bp, Homo Sapiens
ttttttttttttttttttttttttttttttttttttttttttttttttttttttttttttgaggattatgattctggaaatttattaggtttttttttctccattaaggaagctacatgcaaaagatacaacatacagaatatctttaaataacacaactcccagacagggacaggacaatatttgggggggggggcattctgtctttgctttgctatgttctatttttaatttttttgttcctctggatgaaatttctgagatgttactagatgggggatgtgggggtgctaggaggggtgggagaaaagcagaaagcagtacaaatacgagacttcaagcagattcttagagcgactgggaggtaaagacatggagagggtttggtggaggctctgggtgctacgacaaacacacgaacactagccgaactttccaaaacgtctattagtctaaggaggaaatgcagcaaggaaggaacgattctgcctgtgctctgcgagattacagaccctctctggttaatttttttcctttttttcccctacaagcggatggattcgatcttaactttgcatggagaacagaatgctgtgtgtgagtgcgtgggtgagtgagggcttgacacacacaccagccacactcccacccccatctatgagggcacacaccacaccccacatcccggcaccccatttctcatgctttaagtggaagcatcttcgcagcacgaaccacaggtcccttggaaggagagtctgaggtctttgccttttttgcagtcgcattgcatttatactcagggaggaaaaaaaaatatatcaccaggcacaaagggaggaggggcggggagaggaaggagcgggaagggaggaggagaggccgcgctctcaggtgaaattaaaattggaggtcagttcccggatccgattctctcggttcattttcttgagtttcattctgcgattttgaaaccagattttgacttgtctgtctgtaa

SEQ ID NO: 471248 - DNA, 1000 bp, Homo Sapiens
ttttttttttttttttttttttttttttttttttttttttcaaggcaaaaaaagatattttattttaaaaacatgtttgtgggtttttttcctttttgcattcagtacattgtcattcagacatcacaatactatatacagatacacaacattttttaaaaaagcctattcctgatgaacatttcaaaagaacactgttttgtaatgcaccagtgggaagggaagaggcaaggggcccccacagcaccaaggtggcctttgaggagggaactgttaggcagcatctacatctagctaattgagggccagatcttcttgcctcttgaactagatcctctagctttcctctggaaatcagtaaaggtgaaagtgtgaggagtcattcctgggctagtgccctgatggaaaggtgactggacagggactttgttgagggacccactctccatccccttggaagagatgtttatccttagaaaaaagttctgcttctgtacctggactaatccccaaccttaccacctagagagagagagaggagagaggagccctatttagcagcgtggctggagtctttgtcctccttggatttccacatgttgactgagagagcagaacaggggaggcagtggggcaaaggcagctcccacctggccccaggaaatgcagtttcttggttgggatggagtgtaggggctgcgtcaatgcttttacggaattccagcttttacggaaacatccatactccaatcacgctgccaggtccctaataattatcatgagtattaacacgacttttaaaatacgcacagaaaatctttactgggaaatcttgcctaaggagtgcgggagggacagcgaaggaaagtatgagctggacagatcctgctccgaagctgcgcccttagggaaggtcctctaaaagcctggtcataggatgaggcaagaattggggccattcgggattccccaaccctgctttggttggaatgattgggct

SEQ ID NO: 471249 - DNA, 1000 bp, Homo Sapiens; identical to SEQ ID NO: 159599

SEQ ID NO: 471250 - DNA, 1000 bp, Homo Sapiens; identical to SEQ ID NO: 340640

SEQ ID NO: 471251 - DNA, 1000 bp, Homo Sapiens; identical to SEQ ID NO: 340641

SEQ ID NO: 471252 - DNA, 1000 bp, Homo Sapiens; identical to SEQ ID NO: 340642

SEQ ID NO: 471253 - DNA, 1000 bp, Homo Sapiens; identical to SEQ ID NO: 340643

SEQ ID NO: 471254 - DNA, 1000 bp, Homo Sapiens; identical to SEQ ID NO: 159600

SEQ ID NO: 471255 - DNA, 854 bp, Homo Sapiens
ttttggaactcggcagtcctttatttagatcaatgcggggctgaggggccctcattccactgcagggcaaagggggaccaggcccaaggaggcctccttctgcccaaggtctggaggcagagaggggctcgcaggcggcccgagggcgccgcatccaggccccggagcgcaaagccttcctcccagggggaggcagtttcccatccaccgaccaggtttccccggagagtcccagcacaaaagcagcagcgggcggtggccctgaaggctcagagcgcagccagggggacacaggcggggagcctcactcctgggcgagcatcctcgcgaactcctcgtagttcacccgcccgtcctggtccacgtcggcctcgcggatcatggcgtccagctcctcctgcggcagcggctgccccagccccgccatggcccgcctgagctcgtccacggtgatgtggccgtcgccatcctggtcgaaggcgcggaaggcgacctgcaggtcctccaggccggccctggccttccttgccgccgtcaggaactcctggaagctgatttcgccgtcgccgtcgctgtcaacctcggagatgagtttccttagctgggcctccgagaggttcttgcccgtggccttcagcgccgcgcccagctcctgggcattgatggtgccgtttccatccgtgtcaaccgcggagaaagcctttttgtactgggcctcctcctcaggagtcagctcaccggccatgcctgcgtctcctgcacctcgcggagcctccgagctgctgcccaccggccctcaacctgctgctctcagagctcgtggtccagagtgcaggcagccgcagggatccggg

SEQ ID NO: 471256 - DNA, 1000 bp, Homo Sapiens; identical to SEQ ID NO: 340644

SEQ ID NO: 471257 - DNA, 1000 bp, Homo Sapiens
tttttttttttttttttttcagactttaaagtttttattattttatattacgccatgacttgcatggaatgaccacaaagtggcataaccttcctggtcatgtaacttaactcatcaggcctggctagaaagtgagaactcccagatacacaatttagtccaccagaaacatgggagggagcaaaggaaagagaaagagacagaggaaggcacaatgataaataattatctgcctcttctctaataggttagtggctcgttctaaaaatgatgataatgtcattgaatacaatctctgattcatggtcaaggtctttttgttaaaggaaaggaggtttcttagaaggactggatctaatcaatacatatttgatgttcaaatgtttgactttcaaacaaaatttttacagccaaaataaaatgaaagaaatgatactgacaagctctcttgccatgcccttgtcaaagcacccacagaaagaataagtgcaaaaggtaacaaaggccctcccctccatccaaagaaacatatccatggagttctgacagccgagctcccctcccctacccaaaccccaacaccatcaggtcagaggagccccgtggcagtcggaagccctgtcccgctgttcctcagaagcggcctgcttttttgtgtcccagtccatgtctgtaatgaataatccatggagatccatgtgcatatcgacatcaacagaggcacgggccaattccgtaaagcttttggcatccagaatgagcagaaaaggcagcttttggggatcagtagagacaatggctgataagattactccgtcatcctcatccttggcacctggcgcgggcacaaacaggggttccgctggccagcagtcgtcctctctccattttaaggatgactttgtgagaatgtcatattttattatcttggttgggattggactccactgaactcctgtagcaaagacatatcggtattgctttccattgtgagcataat

SEQ ID NO: 471258 - DNA, 1000 bp, Homo Sapiens; identical to SEQ ID NO: 340646

SEQ ID NO: 471259 - DNA, 1000 bp, Homo Sapiens
ttttttttttttttttttttggtttttaaaaggctttattggggaaacgtagaggggtggggaccgtccttggaggcctcaggacaccatcctccatgttgctgggcagttgaagtccccaggggcccctgctcagaagcgtgtcacctgggggcaggggtacagtgggggctgctggccacaggctcccaagcacagtctctgcgggggcctcatctgtgactcctggaggggcccagcccggggtaaccactacccccccatccctcgttgctgttgctcctgctccaggttccgctgcaggacctgctgctggttggcaatgacacgccggatgccgttgacaaagttgccctggtcatgggggatgaggccaatgaagattttcttctctgaagagtacaggagcataagcacgcggatctcacacgatgctttgtaggaaaagtgcacgcagccggcgaagccattgtccatgatccggcacaggctcttcagtgtctccaggtccttggtgaagtggaactggaccaggcgcgagttccggaacagcggcactagggtggtcagcagctgctgcgggatgagctgcatgtacagcttccttggccactgctcggtcctcaggatctccccctggttcacgtagacgtgggatggcagccacctcttggaccgactgttgggctcaggcctgggctcctgccactccatgacaccactccatgccagaaacttgttgttgacgatctggactgggcctgagttgacaccaccaggtcccactgcctgcttgcgggtggtgatgacctgccggatggcactgacgaagccgctctggtcgtaggggatgaggcccatgaagatcttcttcttggacgagtacaggagcatgagcacgcgcacctcacagggggagatgtgggggaacagcatgcagcccgcgaagccgttgcccatgatgcggcagagccccttgagcgagtcgcagtctctgttg

SEQ ID NO: 471260 - DNA, 1000 bp, Homo Sapiens; identical to SEQ ID NO: 340647

SEQ ID NO: 471261 - DNA, 1000 bp, Homo Sapiens
ttttttttttttttttaaggcagaaaagtgatttatttggaagggagactactggagcagggagaagagggctgaggagcattgcatacataggtattgggccagggtctgatgaaagaacgtgcttaaaaccttgggtgaaattagttgtggtgttagactggggtgccgagtgggtttctgtaaatggcttgccatgggtccagcctctacctcctgcaaggcatttgccagcccgtctgacagtggggagcccagaagaggaggaggtatgggagtagggagggttctaagatgccagcatccatgctcccactgcatccttacactcaccgccccaacacacatacagacatgcacacacatagtacttgtcaggtcagcttgtcttctgagatttgtttctgaagtctggaagcagaggtttcactttgccccaaatcagtagctcccctacttctcactctagtccctagacactgcccccccaccatttctccaggctgagacacatcctggtcctgggggtccctgagcccacacatggtgactgactatggccacctggaacaaggttgggaggtgggaaatcagagaaggctgaggcagccagaaataggaagaacagaggtgaggtgtgggctcaaacctctgctcaactgggcagtgggcagaacccccgggcaggggcctagaagttctcataatggtgggagaagtgagtccggtcctgcctgttgatgagctgacaggccttttccacattcttggtcatgccaggggggccacagctaaacaccccgatcttccggacctgggggtggacctcctgcagggagttgaagaagggctcaaaggggggacggccaaagtgggtgatggagcgcaggcctgtgaatagactccggttcagaaccttctggaagtgccgctcacagatgtacagcatagtggtcctgaggtcgaacttctcagccagctgggtgatgtagatgtgcac

SEQ ID NO: 471262 - DNA, 1000 bp, Homo Sapiens
tttttttttttttttttcctgttgtaacacctacatttatgggagactttcagaaattcacctttcaaacatgttttaggaacacgtcgtgtataagtaggaagttgcttacatatattaaagtggggcagtattatatttaacaatagttttaaattcattgaattcataaaagaacaataattgggcatgttaacatcaattttattactttacaaccatagtcacttatagcgccacacaaaaagcacatgtaaattaatagtaggagagctattaattcaaaattctaatccccaatataatttgctgctacacatttctatataaattattgtatttcaaggaaaaggaggagcttaaaatgaaatcttcctctccatgttctgctccatcctaagatcattattaaaatacacagatgaagacagctatgggagaaaatactataggagtaatacttgaaggaacccaaggtatgagttaattgttagcagtatttgcttactctagacacattacacagttcagaaattactttaaatataaccatgtgtgacaatagagacaattgttcttctaggagtacagctaatatatatcaatgagcacaaagcaaaataaagtgaaataagtaaatgatataaaataatttatataaattaaaaagttcaaaattagttttatcatctgcatcttccattatatatttcagtatattatcagttatattacctaatgcctaggaccaaaacaaagtagacattttttgaaaggagaaagaaattacaaatttagagctcttttgattacaatttatttgtttgcaaaatgtcaaccaattagaagacatgacttccagtcatcatgtttctaaagttgagtttccttgcctggccagtagttgggttgtagcagatgatcacttgtagtgtaattttccttttggaatcttgtagacaccattgttctttctctcttggttataaaacttctgtgt

SEQ ID NO: 471263 - DNA, 1000 bp, Homo Sapiens; identical to SEQ ID NO: 340648

SEQ ID NO: 471264 - DNA, 1000 bp, Homo Sapiens; identical to SEQ ID NO: 246522

SEQ ID NO: 471265 - DNA, 1000 bp, Homo Sapiens; identical to SEQ ID NO: 157482

SEQ ID NO: 471266 - DNA, 1000 bp, Homo Sapiens; identical to SEQ ID NO: 159601

SEQ ID NO: 471267 - DNA, 1000 bp, Homo Sapiens; identical to SEQ ID NO: 340652

SEQ ID NO: 471268 - DNA, 1000 bp, Homo Sapiens; identical to SEQ ID NO: 246523

SEQ ID NO: 471269 - DNA, 1000 bp, Homo Sapiens; identical to SEQ ID NO: 340654

SEQ ID NO: 471270 - DNA, 1000 bp, Homo Sapiens; identical to SEQ ID NO: 340655

SEQ ID NO: 471271 - DNA, 1000 bp, Homo Sapiens; identical to SEQ ID NO: 340656

SEQ ID NO: 471272 - DNA, 1000 bp, Homo Sapiens; identical to SEQ ID NO: 340657

SEQ ID NO: 471273 - DNA, 1000 bp, Homo Sapiens; identical to SEQ ID NO: 340658

SEQ ID NO: 471274 - DNA, 1000 bp, Homo Sapiens; identical to SEQ ID NO: 159602

SEQ ID NO: 471275 - DNA, 1000 bp, Homo Sapiens
ttttcacattggaaattgggtgtaattgcatctcaagataggcataagcagagcttagactggggccccccagtggtatagtggtacaagtggttgactcacacacagcacctccactatgttttggccattagtcttcctcgttgactctggaacaacattgcctccacagcaaaggacttcatagtaaatttggtttataatgcagctgtattcaaaaatgggagagctagggaactaggatatgggaaaaaggcacagaggaaaacgtatggtttgaatgaataaggctcctacgactgtctcagcttctccacagcagcatccacgtcgccccccgtagcaatgagggcctgaagattggcttcacgattcagaaagcccatggaccgcagttgctccagctgcacctgaaagtgagcctcaggctgcagctgctggggatttgtactaactaaatcttgcagcatatggagaaagggaggggaaaggaagcccagctctgcagagtccagtgctgggaacacctcaggaggtggatttgggagaggatcctcagacataaggggatcttctctagactctatacctcctgccacactacccgtccctgctaggcaaggcatgaaccagagtaggaggcgaggtgcttcagtagctaggacctgtagaccctgctcaatctgccgcagggcttgcagggcacgggggtttgccatggctgcctgaaggtgcatcagcagtggcagctgtggttgtatctcatcctgtaactgtggagctggattcatgccatctggcctcagagatcttggataagccggggatggcagccagggaggctcagggattccaggaatggctgccgtgggggaaaaagataagggagcaaatggaaccctgttggcagaatctcccagccccgagacaagatcaggcaagtttgtgctatgtccagtagagcttttccctgcaccatcttggtctccaccttgtccag

SEQ ID NO: 471276 - DNA, 1000 bp, Homo Sapiens
gccctgcagagaggaacatttcctgtatttccccaatttttactgctaaggaaaatgcatgcccattgctaccttgcaaggagcagcagtgatttcaaacacatgccagaattctgaacttcaccccttttgctaagcactagacaaaacactgttctatctcaagcacaaaaacaattacaatactttctaactcaatgtgggtttgtgtgggtaatattgtcccttcccatcctgtaggagcatgggtcctgtctatataccccttctctatgggtacatgatcatctttccagagctctggttggatgatgtcataccaggctagaggctcagagactctcagggctgggcacacctggggcacctgggagtctccagccccaagcctatgagtccccacttcacggggtagtaaggaggacagagtggagttccatggcaggaggtacggaagccggccgcatcactcctgcaggcaggctgggctcgtgttctccagcccagtgcccacaggggccatcagacattgtcctccctggtcctcacagcacccctgtgaggttggcctccatttgcagcaagagcaaaggcacccaagatcacaggggaaggtgggtatgaggatcaggggtcctgcaacccagccccaggcacaagaccccgaaggcaaggcaaacacgtttccccgccagtcaggggcagcctctgctctaccgggcttcggctcttctcggcaatgacgctcgccaggagctgggactgaggccccgctgacttcacatcttgtcggttttgttctcgaatcttgttcctcatctccagtacttcctgggggtcagtatagagaggcacaaattggtttgggttttcgatgcgaatcggcatgccactgctggatttctccacctcgtcagccttcatccacgtggtcttgggtcgggggctgcccatgctcctctggacctcatcggccacattgacccgcaggtaggtgttg

SEQ ID NO: 471277 - DNA, 1000 bp, Homo Sapiens; identical to SEQ ID NO: 340661

SEQ ID NO: 471278 - DNA, 1000 bp, Homo Sapiens; identical to SEQ ID NO: 159603

SEQ ID NO: 471279 - DNA, 1000 bp, Homo Sapiens
tctttttggtaataaaaaatttcttggtttaggcgaaatactctgtgcaaccgcagtaccgagggggagccctgcccccccatccaccctccccttcctttgcctccagtaggggagaggagaagggggaatctctgggcaggggtgaatgtgggagaaaactgagaagggccagggaggggagaagtgccagcagggagacacaccaatccatcgctgcagtctcgcccaggtggggcggcgcacggccggcagcccgtccagctggcccgcccccgccgcccccgctcctggcagcctgttaaagcttcagctcgttggctattttggaggcaatgtttttgaaggccatggaggtgcccgatatccgcttaaatcgaaccccgttgagagagagccgcggcagtttgcacacctccatctcccactgcacgaagtcctcgtggcccggcgtgccgtgcatgcacagcagcatgtacttctcatgcagctcgctctggcagctgttcgcgtccagcaccttgcggatctcccgcatcatctcgttgggctccatggagctcgtggtcttcatactccacgtgaagcggagggagcggggcttggcctcccgaaattcttccttttctttgtcgttgccgccactgcccaccacgtgaggtctgagcgtctccactcggtctttgctttcaggttcattcaggttcctgcgtacaaacttggaggtgaacttgctgaagatgctcccagaggccccccgccggccctggctgtggccagagggagaggctggggtcacaccgtagggcaaattctgctggtcccgcacctgtcggagctgcccagcatggaaggtgcttcggctggacacaccccgggggaagttagttcggtctggggctccaccactgctgctgatgttgtgggcggatggggaggcaacagggacacgctggggggctgtgctgggccgcggcacctcacagttactctccgtggg

SEQ ID NO: 471280 - DNA, 1000 bp, Homo Sapiens
ttttttttttttttttttgaagagaaaagatatttaattatttctcaggctaatctcttaaagcgctcaaagtgttttcacaagtgcaaggggagggattgttctcagccaacatttaccagtgattccgacacacgcaaaaacactcccaatcacggtgctttatacttacttttaatttctgcactgaaaaagaaaaggaaggtaaaaacaatgacagattagtttacagtgacttcatctttgtccttaaattaacctttgctcttgagagcagaagagggaaagacaggggaacatcaaagcatgatggtgaaacggtgaccaggacacctcggtctggctaacaagggttctaaaaacttggacacggtgccgtcaacgcactagtttgtaaacactgacaggcaacagttaagatacattaaaaaaaaaggaaagatacccacaattccattcttaaaatcaagcacaaaatctgacaatgaaacatatccaggggttgtgtgtccccatctgatctggaggtggcgctctgaaggcagccacaaggtgtgagtcacacactagggagacagacatctgttcaacacagaattccggctttgctgaactgcaatgcatattccctcttctcactagtacagaaatgttctgcaggcaggaacatgagccccccggctcattcacctgtacaacctcccctgacagatagtgagagccgcggcggggccaggggctctgtgtgctttggaggctactgcctctggaatgtttcgcattctcaaggtttggttgggctgtgggttttagttatgctccacacattgtttaggtgctcgctttatttttcatgtgcaaactgttactgtctaaagctttcagaagaacgtgtacagacaccctgcagagacgagggtcatgactgggccctcctgcctcttgtggtggggtgggggcatgggggcgcgtcacagaaatagagaaatgacatgttccg

SEQ ID NO: 471281 - DNA, 1000 bp, Homo Sapiens; identical to SEQ ID NO: 345278

SEQ ID NO: 471282 - DNA, 847 bp, Homo Sapiens; identical to SEQ ID NO: 340663

SEQ ID NO: 471283 - DNA, 1000 bp, Homo Sapiens; identical to SEQ ID NO: 340664

SEQ ID NO: 471284 - DNA, 1000 bp, Homo Sapiens
tttttttttttttttttttttttttttttttttgttgcacgactatttttattctgctaatttatgacaagtgttaaacagaacaaggaattattccaacaagttatgcaacatgttgcttattttcaaattacagtttaatgtctaggtgccagcccttgatatagctatttttgtaagaacatcctcctggactttgggttagttaaatctaaacttatttaaggattaagtaggataacgtgcattgatttgctaaaagaatcaagtaataattacttagctgattcctgagggtggtatgacttctagctgaactcatcttgatcggtaggattttttaaatccatttttgtaaaactatttccaagaaattttaagccctttcacttcagaaagaaaaaagttgttggggctgagcacttaattttcttgagcaggaaggagtttcttccaaacttcaccatctggatactggtgtttctttacagattcctccttcatttctgttgagtagccgggatccttgggaggcatgtaggaagcccgctggatcatcacgggatacttgaaatgctcatgcaggtggtcaacatactcacacaccctattttcaaggcttgcagaaactgatatgtagtcaaatataatcaggtgctgcaccagttcacagaggccaactccaccagcatgggggcaaacaggaatttcaaactttttggccatcagcaatactgagaggttctcattgacactgcccagtctgcaactgtcaatctggaggaactgcagggccttcgcctgtaggagttgcttaaatatcactctattgtggcactgttctcctgtggcaatgccaattcctaatgggaccagtgccttggaaatggtggcgtgccccagaatgtcatcaggggaggttggctcctcaatccacaatggcttgaacttggccagcttggacatccactccaccgcctcaggcacatcccagcgctgg

SEQ ID NO: 471285 - DNA, 1000 bp, Homo Sapiens
ttttttttttttttttttggcatttccccaacatttaatcaggaaaaaacattccatgaacaaagaaaaactcatgcaactaaagaggagagaacggggggtctgggactgtcagacagggccagattcctcagaggaggcagaagacacagagtagtaaggcacggccgccttggccccacagggcgggcactggacggagcgggcgctgaatggggcggctgaaggagtcggagcaggtgcagacaacactgaggacgtttggcagtaggctcaggaggaggagtgttctagggcccccaggcccaagtcaggccctggcacaagcctgagtccagccctccaggtgctcagagagaatagggccccgagatgcttgagggggaccctgtggtccagcgtggcacagccacaattctgaggaagctttggaggcctcaccccaagtgctgctggtaccgtgaccccgccttggaatgggtggggtcagccatggcaagggtgaggtgccagaggccagaccgaggctgataatgctacacaaaggagcccagacgggtggcagggcccaggacagctcaagaagaggcaggtgagtgagggtggcgacatccggtggggggacacatatttacagatggagacagaggcgaagttcgattcaataaataggcagagggatataaatagcagggagggtgggactgtcccaacacctgggcacagggcaggagggtgggggtattgctgctgctggggtgggggctcgccctgtcacccctccccctgcagggcccaaagcaaggcactaatgaagggggcctgggtgtgccgggggcatcgtggccagggtgacctgccccacgatacccaatccagggctcagcccggggacccaggcttgagccagccactcccctggatgggaggacggcacaggactgagaagccccctcctcaccgattccaccaccttagctgtcgctggacacgaggctga

SEQ ID NO: 471286 - DNA, 1000 bp, Homo Sapiens; identical to SEQ ID NO: 159604

SEQ ID NO: 471287 - DNA, 1000 bp, Homo Sapiens; identical to SEQ ID NO: 340666

SEQ ID NO: 471288 - DNA, 1000 bp, Homo Sapiens; identical to SEQ ID NO: 159605

SEQ ID NO: 471289 - DNA, 1000 bp, Homo Sapiens; identical to SEQ ID NO: 159606

SEQ ID NO: 471290 - DNA, 1000 bp, Homo Sapiens; identical to SEQ ID NO: 340669

SEQ ID NO: 471291 - DNA, 1000 bp, Homo Sapiens; identical to SEQ ID NO: 246524

SEQ ID NO: 471292 - DNA, 1000 bp, Homo Sapiens; identical to SEQ ID NO: 340670

SEQ ID NO: 471293 - DNA, 1000 bp, Homo Sapiens
tttatttccttgatatacaggacagtgacaaagaacttcacatttcgtgcatttctttggtcacattttctttcattagaatgaattactcttcacttatgacttttgtgtgaacctcccgactcttcactctcagcttgttgacttgggactcagcaatgtcagcccgttcctcggcctcctccagctcgtgctggagcttgcggaacttggcaaggttgacattggattgttcctcagcctcttcagcttgtctcttgtaagctttgactttggtttgcaatttgtccaccaagtcctgcagcctgagaatattcttgcggtcctcctcagtctggtaagtgagttccttcactcttctctcatgtttgcgaagacccttgacagcctcaacattgtgcttctgttcactttccacctcactttcaagctctctcaccctggcctccagtttctggatctgcttcttcccacccttcagcgccagctgctcagcctcacccagacggagctgcagatccttcacggtctgctccatgttcttcttcatccgctccaggtgggcgctggtgtcctgttccttcttcagctcctcagccatcatggcagcatcagtgatggccttcttggccttctcctctgcattgcgggcttcctggacgatgtcctccatctctccctggatttgggaaatgtctgtttccagcttcttcttggtgttgatcaggctggtgttctgagtgtgcagaagttgcacacgttcactggcatccagaagctcttgctctgccattttcctgcctctctcagtccgttccagggatgccctgagctcttcaacttcagcctgcatcaggttagctctgcgctcaaccattgccaattgttccttaaggtcatcttggcctctgatggcatcatccaaatgtagctgagtgtccttcagtattccttgtgtgtttctaagattccttagtgcctcagcagcctggcggttggc

SEQ ID NO: 471294 - DNA, 1000 bp, Homo Sapiens
tttttttttttttttttgtttgcaaactaccctatgctttatttcctttgcaacagggtagaatacacaataattacagagggaaatgaccaaagatgtcacattttgtgcctgtcttcagtcattccatggcatcaggacatgatcactcttcacttatgacttttgtgtgaacctcccggctcttcacccgcagtttgttcacctgggactcagcaatgtcagcccgttcctcggcctcctccagctcatgctggagcttgcggaatttagctagattggtgttggattgttcctcagcctcctcagcttgtctcttataagatttcacttttgcctgaagtttatctaccaaatcttgaagcctgagaatattctttctatcttcttccgtctggtaagtgagttccttcactcgcctctcatgtttgcgcagacctttgacagcctcagcattacgcttttgctcactctcaacctctccttccagctcccgtaccctggcctccagtttctggatctgcttcttcccacccttcagggccagctgctcagcctcatccagacggagctgcagatccttcacggtctgctccatgttcttcttcatccgctccaggtgggcgctggtgtcctgctccttcttcagctcctcagccatcatggcggcatcagtgatggccttcttggccttttcttctgcattgcgggcttcctggagaatgtcctccatctctccttgcatttgggaaatatctgtctccagcttcttcttggtgttgatcaggctggtgttctgggtgtgcagtagctgaacacgctcactggcatccaggagctcctgttctgcgatttttctgctcctctctgtctgttccagagtggcccgcagctcctcgatctcagcctgcagcaggttggctctgcgctccaccatggccagctgttccttcaggtcctcctggctccggagagcatcatccaggtggatctgggtatc

SEQ ID NO: 471295 - DNA, 1000 bp, Homo Sapiens; identical to SEQ ID NO: 340671

SEQ ID NO: 471296 - DNA, 1000 bp, Homo Sapiens; identical to SEQ ID NO: 340672

SEQ ID NO: 471297 - DNA, 1000 bp, Homo Sapiens
ttttttttttttttttttttttttttttttttcaactttggctcctttttattcaggaagcatacactaattctttttatacattttttttttttacattccagaaataagcgaaaatagcagttttaaatatgttacaaagttggcttttcaggcttaataagctttttgagagagggaccagccaactgaccttttcatcaaagcaccaatgtatcttcagtcttttaccaagctctaccacagctgtggttgccttggatgtgctgcacatccaaaccgtgtgaaagctataatggagagttgctgtgagtctctctgcaaggcaccaagaacaaacagttcaagcttcctttcttcagattgaaccaaagtttttgaaactttcaactgctctctcaagtagtgctctctcagcgtgaagactagaatttgttaaaacccatatatcacaagatacagtaaatcacttccaatagtctggaaatcacatggtagaagttataaataaatgaacactaaaattactttaagaaagttttacatcatttagttggtaaggacatttacgtgtacagcacaatttattgtcaaacattctataactggcttcacacaaagatgaaaatagattaatacaaaatgatctgacattttcagtaaatctggaattaagactggatttttattgtagtcaatatcaactttacatattgttgcagattgctgtgctatgccctttaaaatgataatttctcagggtaaaattccatttggatatgtgttcttgcttgtcaaactactaaaatctgagggacacagcaatatcaaagacacaaacagtaactgcacaatatcatctgctggattaagctaatacaagtggacagaattctttaggttccaatatctaataaaccactatgtgaaatgaacaaggtgagacatcttatgaatatactctgcaaccggaacatgtagcatttctttaattcaaaaa

SEQ ID NO: 471298 - DNA, 1000 bp, Homo Sapiens; identical to SEQ ID NO: 159607

SEQ ID NO: 471299 - DNA, 1000 bp, Homo Sapiens; identical to SEQ ID NO: 340677

SEQ ID NO: 471300 - DNA, 1000 bp, Homo Sapiens; identical to SEQ ID NO: 340678

SEQ ID NO: 471301 - DNA, 1000 bp, Homo Sapiens; identical to SEQ ID NO: 159609

SEQ ID NO: 471302 - DNA, 1000 bp, Homo Sapiens; identical to SEQ ID NO: 340681

SEQ ID NO: 471303 - DNA, 1000 bp, Homo Sapiens; identical to SEQ ID NO: 159610

SEQ ID NO: 471304 - DNA, 1000 bp, Homo Sapiens
ttgctgaagataaatgtggctcttttattaatgcataaaaagaagatgttttgaaatgtgagttgcagtcaggctggaaagaaaggaacagggatgtcccaatacctgaataggagaggcagcccagagtgtcgatataaacaccctttttgaatgaatattaaattcatcctgctaagtgttaataggagaatttgctttggctaaaaactgggtgtttttctaccagagacttgctggctggtcactgtggaccctgggcatgagaacctcctttaagattgggttcacagtagctacagaaacaaattgaagactgagcagagctgcaccccgaaagcaacggatgctactatggtaactcaggattgtacacaatccttgagaaaccatatccttcctcagataaatgtcaagggactttcctaagaaatagatacagtagagatttatttaggaaaaaacaatagcttccaaatgtgctatccccttaccctgggagtagcagaatagccttcgagtatcacatcaattgcctggcctgggtacagctccatgctggcggggtggagatgaaacacggggctctgtggatccctgggctcctgagagccactgggctggggttggacatgagcatgtcccttcttaacccggcccttcttactcagcttggcctggggtcggaagctatcattcatccagaacaactgttggatccgacgtcccttgttgatcaacttaaagtggtaatagtgggtatccaggctaaaatgtgcccccaaattgagttctggagcaaagggcttatctgaaacaatagtggaaccagttccggaagcctgaacaggaatccgataggtactgctattttcaatgtccaaaataacacagtccttgaatgtcagtgtgtcattcaggttggcggtcagtgccagttgaacatcagtttctggaggaaccatgccttcattgggttcaatcgtccaaagggattttt

SEQ ID NO: 471305 - DNA, 1000 bp, Homo Sapiens; identical to SEQ ID NO: 340684

SEQ ID NO: 471306 - DNA, 1000 bp, Homo Sapiens; identical to SEQ ID NO: 340685

SEQ ID NO: 471307 - DNA, 1000 bp, Homo Sapiens
tttttttttttttttcttgtttcaagtccaatttatttcacacaacacacaggctgctgagggaatccacctgcactgcactcagttgaacttccggcccagtgccgcgtcagagactaaaccatgggagaaagttcacaccctggcctgggccacccaccttcagctctctcctgtgcgtcaggacgcacgctggccccaagagcttcactcaacacggctgggtcctgggcggacgtgggcacagcacttgccaggcgcccctggcaggggctcttctcagtcctccgcaccgctctcctctccgctgtcttcgtcgtcgaccccaccctcggcgccctcaacctcctcactgtcctcttccgagtccgtctcctccagccactcctgagtttctgggtccatctccaccaaggccttccacgcctccatcctgtgcaggtccaggcagtgcaggtcgctgagggtgacctggcggtcgccggcctcaaacatgcccccatagacgtagagcaccccatgcttcacagccagcatggcgttggagcgtggacacggcccaggtgcggggctgccggcctcctcaaggctgtcttcgtcctcagaccggggctgccccgccgagcctggcgcggtgagcacctgcttaatggtgaccacggtgccatcctcggccaccacctccttgaccagctgcacaggcccctgggtgccagctcccccacacgccggcctgctaccaccttcgggctcctcttttctgccccgcctgcgtttcttcttttcagacttgggtcccttcagctgtccctcaaaccaacggttcctggtggcgtcgtagaagtacagatcgttgaagaactcgcccgacaggctctcctcctcttcctcgtcacagacacccccgaagaacagtgtctggtgattcggggccatggccacggaaaagccagaccgtggggtgggcttgacccccgaagggttcatccgagtccaaacc

SEQ ID NO: 471308 - DNA, 1000 bp, Homo Sapiens
ggcttaattccggttttttttttttgtgtgaatctctttattgtttctctccagagcccctgcagcaggggaggggagggcgtggggaggtgggcgcccctcccaccagcctgagaccgctctctgcctctctcctctcctctcttctccagcatctcacccactttctctccttctcaatctcctgctcccacctccagcaccttcggggattccctcttgtagcccctgctttctaagtccaccctgggctggggaaaggaaagtaagagaccacggggacaatttcaagccccccagtctccacaggggctagtccccctggctacctgcctggctttctctctcctgggctaggggctggggaggtctttttttttgttaaaccatttccctgtttttatttaaaaatgataaggttgtgcttctgtataaagtttgtacatctagcaatgtaaaatactgacacattaaaaaaaacaaaaagtagaaactcaattcttttgattcagtgctcttgtgtttttaaaaaaggaacaaaaagtaatgcaagactcaaaattttggagtggttggcgtgcctctcttcattttactttttgactggctgcctgtatgccgatgatgatgtagctgagctgtttgtgctgctgctgctgccatagccatttgatgctgcaagaatcgcaactgcagctgcctgtgactgcataaaacttcctactccagtaaggttaataacagcagcttgctgagcagataaggcctgttcttgactggttgaaccttgctcagaaccctgctcccctggctgttgaggactacaagttgtgggctgctgaggttgttgtggtgtaaactgggagagctgctgttgctgctgctgcagagtgttaaaaataagtgaaccacctggaagctggagtagatttaagggcctgagacttgaagtattttttaaaccaaatggaacacctgcttgagaagctgcctgcattgc

SEQ ID NO: 471309 - DNA, 1000 bp, Homo Sapiens; identical to SEQ ID NO: 340686

SEQ ID NO: 471310 - DNA, 1000 bp, Homo Sapiens
ttttttttttttttttttcaccttctaagcaacctttatttgcaaactctgaggttggacgcggtgcccgaggcggacagtgtcacgtttctctccctccactttcccctggcttttggggtgctccagcctctccccccagcccactcccgcccaaacccaaaatgcagaggagacttctctctctctctctcccgccaggcttcggggttccacggggcccatccctggcaggccaggcgtcgggtgctggtgctcgctcctctggggccagcctggggaggcagcatggcagcagtgcctgtcagggacccaggcgggggcaaggtcgctttctgagctgacaacttcaggttccagctggcagccagacctggggtttggtgggggtggccctggcacgggagagccaggcgtatagtgggaggtccatggacatgccgcagaggacggggcctccgagggtcacggccaggaggctcagcaccatggccgaggctgggcagcggtggtggggacaggcggcagctctaagccgggggcggctgtcgggggtggtgggtcccatgcaggagccctgctgctggtccagcgtggaggatgggggacaggaggtgcagtccctcggggagccgccgcggcaggtgtagcaggaggcatggcagctggagcagaccctcagcgcgggcgccgccgtgtgcccaggcccagcggtcaccagccttgtgtggttgaagaaccgcggggggcagtaggccaggcagagctgtcccaggatgtaggcggggccgtcacacgcctggcacagcccctctgtgtcccgctgcacacacgcgctgctggtcacctgggggcctgtaggccgcgctgtcatgtcctcggccgtcccatagagcagcagcgtgtagcggtacaacgtccccgtgttgaaatagtagcccttgttctctaggcccagggtccacacgccctgtgggttctcatcccagaagtgggtgga

SEQ ID NO: 471311 - DNA, 1000 bp, Homo Sapiens; identical to SEQ ID NO: 159611

SEQ ID NO: 471312 - DNA, 1000 bp, Homo Sapiens; identical to SEQ ID NO: 159612

SEQ ID NO: 471313 - DNA, 1000 bp, Homo Sapiens; identical to SEQ ID NO: 159613

SEQ ID NO: 471314 - DNA, 1000 bp, Homo Sapiens; identical to SEQ ID NO: 159614

SEQ ID NO: 471315 - DNA, 1000 bp, Homo Sapiens
ttttttttttttttttttcgcgagccacggccacgctttattgcttaagacgcacacagaacacagaggaacaaacaagaaggaaagggcgccacacacagcccagaccaggcaggagcggcccagccgccggaagagacgttccttgcaaggcagggcccctgctggacagcacgccccctgggcgacagggtcagggaccccaggactgcacagctgcagacttgctgggaacctgggacaggtgacacgcccactctcgcctgtggcccagggccttccacctctgcatccagccatgcacccaccatttccccacagggtacaggggcagccttccttgatccacagccaacccttctcctgctgtctctggctgtcagtgagacccctctggaaagggcagaagcaggcaagccaggcagaagggggcccggggtcccactacctgggtaggaatgagcagagggcgggcagagcccttgctccttgtgggaggtagacaggtctcactgcatacatgggacagatgtgtgcacccacacacatatacatacacacacacacacacacacacacacagccctttgaacccagcactggcctgaggaaggtggccccggaggaaccctgaaggcacatgtccaccaggctataatgcccctgccaccctggggctcagctggccagactcccaggggtgggatgctgctgacccaggagcccaccaagtccccagggcagtactgggcagggcccagaaaaccccacgcccagcccaccagcctgccactcctggcctcagatgccactcccggcctcagatgccactcccagcctcagacgcagatgggcccgagaggtgttcctgggaaacagttcacttagcaagacccagtacctgcgctccagaagctcagcgcaggcccagcctggggttggccccagatggaatatcttccacacccgcccgcttctgccaagccccacctgggctaag

SEQ ID NO: 471316 - DNA, 1000 bp, Homo Sapiens; identical to SEQ ID NO: 340693

SEQ ID NO: 471317 - DNA, 1000 bp, Homo Sapiens; identical to SEQ ID NO: 340694

SEQ ID NO: 471318 - DNA, 1000 bp, Homo Sapiens; identical to SEQ ID NO: 340695

SEQ ID NO: 471319 - DNA, 1000 bp, Homo Sapiens; identical to SEQ ID NO: 159617

SEQ ID NO: 471320 - DNA, 1000 bp, Homo Sapiens; identical to SEQ ID NO: 159618

SEQ ID NO: 471321 - DNA, 1000 bp, Homo Sapiens; identical to SEQ ID NO: 159619

SEQ ID NO: 471322 - DNA, 1000 bp, Homo Sapiens; identical to SEQ ID NO: 159620

SEQ ID NO: 471323 - DNA, 1000 bp, Homo Sapiens; identical to SEQ ID NO: 340700

SEQ ID NO: 471324 - DNA, 1000 bp, Homo Sapiens; identical to SEQ ID NO: 340701

SEQ ID NO: 471325 - DNA, 1000 bp, Homo Sapiens; identical to SEQ ID NO: 340702

SEQ ID NO: 471326 - DNA, 1000 bp, Homo Sapiens; identical to SEQ ID NO: 159621

SEQ ID NO: 471327 - DNA, 1000 bp, Homo Sapiens
tttttttttttttttcaccatcagtatcatttttattgcaaatcagttaacaaaaaagatgaaaaaaatacatcatctacagttcctcatgtagatcacttttaaagtctttttctgtaaactacactctattttataaaacacagtaaaaatcaacatcttgggacgcatctggtcatgccccctggggatggcaccacgcggcccccgtagagccgggggaggctgccctgaggagtgcaggcggcacggcagcggagcgtccccagtgcatgggcggctaaggctccccgagctgagccaagtctgacgtccctcactggcatgacacacaacagactcattcattaagattttttaaacaaaatccacctttaaaaacatatttacagacattttttctgccataggctatacttggtattgcaaaaatctgctcctcccaaactaggaggggtggcccaagggcagcccccgcctccctccagcccctgcccgaccgcatgccccctgccagggctgcggggacaggaccaaaggacgcagcccacggcgttgcacagctcaatgtgcccggctctggcaagtctcctacaaaacacgggagcccacggggggtcgggtcccgcgagctggggcccaggctgtgttgctggagcatcttcttcggaacctgggggacactgtgcaggctgaggtgctggggccgccaccggggtcagcccaggcagtgtctttccccagaaaagggtaggatgcctccgtgtgtgacccaggcaagtgccacagtccacacatctcatgtttgacatgcatgatgcctacatttcaagaacgggcagggggccggggtggttctggagggaccaagaacttgtataaccaacgaacaactacataatactgaacctgaaacaaagattcatgattggtaccatgggtgcactcttggcatacacactccgagaacacattttcacaagcatgcttgcaagaaacc

SEQ ID NO: 471328 - DNA, 1000 bp, Homo Sapiens; identical to SEQ ID NO: 159622

SEQ ID NO: 471329 - DNA, 1000 bp, Homo Sapiens; identical to SEQ ID NO: 340706

SEQ ID NO: 471330 - DNA, 1000 bp, Homo Sapiens; identical to SEQ ID NO: 340707

SEQ ID NO: 471331 - DNA, 1000 bp, Homo Sapiens; identical to SEQ ID NO: 340708

SEQ ID NO: 471332 - DNA, 1000 bp, Homo Sapiens; identical to SEQ ID NO: 340709

SEQ ID NO: 471333 - DNA, 1000 bp, Homo Sapiens; identical to SEQ ID NO: 159623

SEQ ID NO: 471334 - DNA, 1000 bp, Homo Sapiens
ttttttttcctctgaaatggctttatttccccagtgtgaggaatctgtgagtggtgaggggtctgtggtccctgttaccccaaggaccctgcagcctccagatggataacggcccgggatccaggccttgatcctcccaggctgggactggttctgggaggagccgggcatgctgtggtttgtaaggatgacactcccaaaggtggtcctgacagtggcccagatggacatggggctcacctcaaggacaaggccaccaggtgcgggggccgaggcccagatgagccttactctaggagcaaaatcccctgtgggggcttctccttgaagtccgccagcagggctcagtctttggacccaggcaggtcagggggtggcggcccacctgggggcagcaaggcagagcggctcagggcctcggccacccaccccaggacgcggctacactgctggacctcccgctccagcactttcaggcgctgttcgtactcgcggatgtgtcccagctgtttcagtgccaagtccaccttctgggacgtgcgcttcagacgctcggagtcgctctcccgcttgtccctagcgcgtgccagcagaaagttctccttatgcaccgattcccacgttagcagcttccgctcggcttccttagaaaggtaaacccggaaatgctcgagggccggggaggacggctgggggctccggggtcgcctgcacaattgcctgagcaggaggcgcaagtgggagatgacgataaagggcggggccagcgcgggccgagagtggaattcccggatgaggcggtaacgctgcgccttccagtagagatcgctgttgccctgtactttgccgaatgtgtaactgaacatggcaatgagcaagttgaccagcaggatgttggccacgagcaggaagatgacgaggagcagcaccaccagccagttggcatactgggagacgcaggtgcccgcctgggccccaggagggtgtgcccagaagccgg

SEQ ID NO: 471335 - DNA, 1000 bp, Homo Sapiens; identical to SEQ ID NO: 159624

SEQ ID NO: 471336 - DNA, 1000 bp, Homo Sapiens; identical to SEQ ID NO: 340714

SEQ ID NO: 471337 - DNA, 1000 bp, Homo Sapiens; identical to SEQ ID NO: 340716

SEQ ID NO: 471338 - DNA, 1000 bp, Homo Sapiens; identical to SEQ ID NO: 340717

SEQ ID NO: 471339 - DNA, 1000 bp, Homo Sapiens; identical to SEQ ID NO: 159625

SEQ ID NO: 471340 - DNA, 1000 bp, Homo Sapiens; identical to SEQ ID NO: 340719

SEQ ID NO: 471341 - DNA, 1000 bp, Homo Sapiens; identical to SEQ ID NO: 159626

SEQ ID NO: 471342 - DNA, 1000 bp, Homo Sapiens; identical to SEQ ID NO: 340721

SEQ ID NO: 471343 - DNA, 1000 bp, Homo Sapiens; identical to SEQ ID NO: 159627

SEQ ID NO: 471344 - DNA, 1000 bp, Homo Sapiens; identical to SEQ ID NO: 340723

SEQ ID NO: 471345 - DNA, 1000 bp, Homo Sapiens
ttttttttttttttttttgaatagcaggtttttacatttattattgttgtgtatttcctcccctttttgcaatactatctacgctgagttatctattgccaactagcaccaattctccaaatcaaagtgtgtgaggaaaacacactcgtgcaatcctctttaacagaagatacaccaagtaacctgtctgtctacttctgttacccagaaataaaagaacttgaagggctgcttggctggaggggtccgggtgggagagcatcctgccctcagtcggaatccatggtgaacagctggatgtcctgtggattccagtacaggccgactgctgagttgtagacaagagaccagacataggggataaaaaactcctcgggctgctcctcttccacatatttgaatttcaattctggaaatttcttcagtctgtctttgggcagcgcaacgacgccttgcttaatgatttccaggacccgttccactgacagctcagctccagcttgcagcaaccttgagctaaagaaggagatcaccagatcaatattttgcattatatcctgaaatgaaggatgagttcgaaattgttcaaagagatcgcgtttgtaaagcagggcgtataccaagtttgggttgtggtgaagggaatttgtcaggcaggagttgatgatctctaacatcattcgaatcacttcttcaatgacatttaggtcttgtgcataatctggtagaggaacatcattagaactcagcgaacctctcaaggactgtgtggcttgttccagaactttgttgtgttttttagacagcaaagaaaataaactgatgatcctctgggcagcatactgatggagagaacgaaactgtgccgacatatttgctaaagctgccaaacaatttgtgtgaaggtacttgtctcgtgtcctagtcatgttgtattgaatggttcttattaccaccaggatcaggagactccccaaggagatttcagttaaaactcgtt

SEQ ID NO: 471346 - DNA, 1000 bp, Homo Sapiens; identical to SEQ ID NO: 340724

SEQ ID NO: 471347 - DNA, 1000 bp, Homo Sapiens
ttttttttttttttttctagtgctgataaatttattttgttgttgttgtttaaacgagaacgtttctatgggcctcctaagtcatcttatgcctaaaaataacagctctttttttgtgtctttccaagagaggtaatattaagaattaataggtatttcagaacctccaaaacgaactcactaaacaagtaccaacaagttacaacctgagctggattttattttcaaatgataagcaacagcaataaggcagtccatattctataagctacttttgttacacattaatgactaaaacagcttctgtgcagatttcaaattaatcggacaaagaatatcagctttatggcattaaactcatttgaaaaaggagtggatggcaatacaactaaagttttaccagaaaacaagagttatctaagcaataatccagcaagaaaagagaactacttctgatttcctagaatacatccctaacaggttattatttctgattaccatggcagcacacagcattttccatctaacactttacaaagatgcttggtcatgccatgctctgctgtattaaatgatctttgttgaaaccattcatttccatttctcttacacctacgaaatgtcaaataagagtgataagacagtcatttactctcaattttctctataatttagagtgtattagaactctaaaataatagactaatatattttctcaattctcccttcctcctttctttccactggaaggaaatctatttctgatagcatttcttctaaagtttagggaactaaaaagtgctgctgtttaaccaaaaaaaaaaaaaaaaaaaaagttctaaagcatagttattttgagtaaatatctttccaaaaactctacaaaaaaatataaaatcttccctggagtgcttataaaaggtaacataaaagtggctatgagtgaaaaaaagaaataatgttttaaggactgaaaaaaaaatcaaatgcaagtagttct

SEQ ID NO: 471348 - DNA, 1000 bp, Homo Sapiens; identical to SEQ ID NO: 340725

SEQ ID NO: 471349 - DNA, 1000 bp, Homo Sapiens; identical to SEQ ID NO: 340726

SEQ ID NO: 471350 - DNA, 1000 bp, Homo Sapiens; identical to SEQ ID NO: 340727

SEQ ID NO: 471351 - DNA, 1000 bp, Homo Sapiens; identical to SEQ ID NO: 340728

SEQ ID NO: 471352 - DNA, 1000 bp, Homo Sapiens; identical to SEQ ID NO: 340729

SEQ ID NO: 471353 - DNA, 1000 bp, Homo Sapiens; identical to SEQ ID NO: 340730

SEQ ID NO: 471354 - DNA, 1000 bp, Homo Sapiens; identical to SEQ ID NO: 159629

SEQ ID NO: 471355 - DNA, 1000 bp, Homo Sapiens; identical to SEQ ID NO: 340732

SEQ ID NO: 471356 - DNA, 1000 bp, Homo Sapiens; identical to SEQ ID NO: 159630

SEQ ID NO: 471357 - DNA, 1000 bp, Homo Sapiens; identical to SEQ ID NO: 340734

SEQ ID NO: 471358 - DNA, 1000 bp, Homo Sapiens; identical to SEQ ID NO: 340735

SEQ ID NO: 471359 - DNA, 1000 bp, Homo Sapiens; identical to SEQ ID NO: 340737

SEQ ID NO: 471360 - DNA, 1000 bp, Homo Sapiens; identical to SEQ ID NO: 340738

SEQ ID NO: 471361 - DNA, 1000 bp, Homo Sapiens; identical to SEQ ID NO: 340739

SEQ ID NO: 471362 - DNA, 1000 bp, Homo Sapiens; identical to SEQ ID NO: 340740

SEQ ID NO: 471363 - DNA, 1000 bp, Homo Sapiens
tttttttttttttttaaaattttctttcaatttattctgcaattcacagttacctgctgtataccatctctccataccctcaaaagggtcattattgaccattgtgacaatatttccacttcactttcacattactgcagtgaggatagaaaatagggcaggtcgataattaaggaaaacagacagtagaaccagcttaatatgtgtctcagctgagaggcaacatttctatagttaaatcccattttagaacaataacatattctttctcttgcctacactctgtactgcttaatatgaacatattggtcacttaatcagtaaagtaattcccttccagacttaagtggggagaggggtgccctggcttcacccacttaaaccaattggaaaagcagcatagccctctctgggacaagaatcattgtagctgctgtaggtatacctagcatggaagatgagtaactaactcactgatgcttggagtagtctgcctccttggtgctggccttggagatgcctgtgtcccccaagatgcccatgtccccagagaaacccctggcctcagaaatacccaagtttccagagatgccagtggcctcagagatgtccatggccccacagattcctaagtctttggagaagcccgtagcctcaaaggtgcacatgtctccagagatgcccatggcctcagagatgcccacatccccagagatatttatggccctaaggctgcccacaatctcacaacagttatggtggaggtctgcaccctggctttttacttgatccatctgagctcggaggcctccttccctggatagggtgccattctccatcagggtattcaggtctccattgatacccataaagccaagaggattggtcaaaggacttcccagatgctgggataatatgtttcctaattgagagcaggtacagatctcttctggtggctcatcacggacttttagtttcttttctagttcatgcacatctg

SEQ ID NO: 471364 - DNA, 1000 bp, Homo Sapiens; identical to SEQ ID NO: 340742

SEQ ID NO: 471365 - DNA, 1000 bp, Homo Sapiens; identical to SEQ ID NO: 340743

SEQ ID NO: 471366 - DNA, 1000 bp, Homo Sapiens; identical to SEQ ID NO: 340744

SEQ ID NO: 471367 - DNA, 1000 bp, Homo Sapiens; identical to SEQ ID NO: 159632

SEQ ID NO: 471368 - DNA, 1000 bp, Homo Sapiens; identical to SEQ ID NO: 340746

SEQ ID NO: 471369 - DNA, 1000 bp, Homo Sapiens; identical to SEQ ID NO: 159633

SEQ ID NO: 471370 - DNA, 1000 bp, Homo Sapiens; identical to SEQ ID NO: 340748

SEQ ID NO: 471371 - DNA, 1000 bp, Homo Sapiens
ttttttttttttttttttttttttttttttaaaaatggtattcatttttatttcaacatgtcaactgtgcatttccaaaacagcaggcttttcaaaggaataaatcagaactgtaaacacaagatacagtacaagtttttgacttcctacagtcagtttcacaaatccacatactgtacattcataggtgaggttaagcctgtcacccatttctttatttctataattacacaagcataataaatacatctgattttaaaggtcacttaaaatgagtcataatttacagtacagtacgtttcagttcaagtgcaaaaaataactatttgctgaattctatttctttcagttattttatttttaagctgtgttttattgtgaagcgagacatccaagtgtagaatttcttatcccaaatgcagtattgggcagaactatggtgtcatggagaagccctcactttacaattgatcctgtctaatcagggtcagagggtaaggtgagttgctcatttcgactgttcttttctttcctctctctcctgtgctcatccacagctattataaattatataattcacctttattcagctaaaacagttttcccttttccacactccccccaggtttcctgttaacctctgctttgatttttagtggcaagctttacgtgcgatccacccagccattgttctggctgcagttgtaacgtttgcagttgcatacattacattgtccagtgtctgactgtgtcttcatgagaacgaatatactgagattttctttctttagtcattggaaagtatagttgctacttattgccatccttcccattcatggtttcctatttaccaccttttcctcaccaaaaacaaaacaaaactgacccaatatgtaatttctaaaaattgtatccttcccccaggcacttaaatcttatactgtgatttgtaactagtactgcttatttaaggaactcttaggaattcagtgatttttgt

SEQ ID NO: 471372 - DNA, 1000 bp, Homo Sapiens; identical to SEQ ID NO: 159634

SEQ ID NO: 471373 - DNA, 1000 bp, Homo Sapiens; identical to SEQ ID NO: 340750

SEQ ID NO: 471374 - DNA, 1000 bp, Homo Sapiens; identical to SEQ ID NO: 340751

SEQ ID NO: 471375 - DNA, 1000 bp, Homo Sapiens; identical to SEQ ID NO: 340752

SEQ ID NO: 471376 - DNA, 1000 bp, Homo Sapiens; identical to SEQ ID NO: 159636

SEQ ID NO: 471377 - DNA, 1000 bp, Homo Sapiens
aactgaccccccaatcctttattagagatgagtgaaataacaagtctgagatgaatgaaaccagacactgggggctcaaaagacaaccctgttcctgtgggaaccacagaccagtcaggtctccaggggaaacagcacagcctccccagccaggcagctgtgttggccattggtgctctctagtctcccctgcttggcttggcccattcctgccagggcccagcacccagcaactggcaagttgagatgttagtggttgatgatggcttaggtgtatctgctttctcattggggctgagcaatgatagaatttctagggctgggaagcagaacccttaagtctctgccctcccaattctattactctcccttctttctttgcctctccattccctcagactaaaaggctcctgagttgaccaagagaaagagaagagaagtgggcatccatcaaccccgactattcctttccttcctgctaaatcaaggacacaggcaaatgtgggtgcatctgactctacaatttggctggggaatataggagaatgcctagggaaggctgtgctgtccctcaaaaggagtgacattcagaatatttttatttaacagccagtacagcatgcatgttgaccagccagaatggatgtgatctgtagacaactgtaatggtcatataggtataaaccagctgagtccagagccatgccctggaatctgaccctgcctattcccaagcccaacccttaagaccagctttccaccaaaggaccacccctgcagggcccttgtcttactcgtgtggtatctgaagtgcctaacacaggtccagacatagagttggaatttagtgaaggaatattagactaataaatggctggctgagaagacagtccctacttggcagggtccctgatctggaagtcagtgatggagggctctcctgcccttgtgaagcccccagactgacgggggaaatagagtctcgatctgatgagggact

SEQ ID NO: 471378 - DNA, 1000 bp, Homo Sapiens; identical to SEQ ID NO: 340754

SEQ ID NO: 471379 - DNA, 1000 bp, Homo Sapiens; identical to SEQ ID NO: 340755

SEQ ID NO: 471380 - DNA, 1000 bp, Homo Sapiens; identical to SEQ ID NO: 340756

SEQ ID NO: 471381 - DNA, 1000 bp, Homo Sapiens; identical to SEQ ID NO: 340757

SEQ ID NO: 471382 - DNA, 1000 bp, Homo Sapiens; identical to SEQ ID NO: 340758

SEQ ID NO: 471383 - DNA, 1000 bp, Homo Sapiens
tttttttttttttttttttttttttttgagtgtggccctggctattttattccatgtgctggccctggggacccagctgggccaggtcgacgcccctggggagacagtgtggctcggccagcctcagtggcttctttggggtgcaggagggctttggggttaaggctggggaggaacaggaagtaaagtgcttgcaggggccctcggggcttggccccagccaccctccctgctccggggcgggccagaggccggacacccctgggctgtgcaaacaggactctccagggcccagccaggcctgggtgaggggcacatactggctggcaggcatggttcccaacacccgcagccacggaggctctggcggggctgggggcccggatgaggggtgagtccagaaccgattgtccgctgattgtctgcttgtctggttcgtggctgtgtcggctcttcccggtatcggggcctgctgcccgctttctgggggttgcccgccccatgggctcctcacctgcggagccgctgcagctcactctctaccagattccgcctatagagcgcctcctttgcagcatccctgctgccatcgttgcccaggcgccgggcagcctccgtgtagaactgcagctgccgctccagctgggctgcgtattcccgtcggatgcccacacccccctgctccagctgtgccctctgccactggctgcgttgcatgatgtcctggtactgctgggccacttctgggggcaccggccgccgcgcctgcctgagggccaggatcttccgctccagacgctcttggtcaaacgccagcacactgaggctatgcaggggccgggctgatctgttccctgactcccttgcaggggcaggcacaggaggggccttccctttgggcccagcaactgtgggcacagctgccggcacagggtcaatgaccagccacctctctgtcgtcgtctccaactgctgggctgtcagtggctcccgaatccgg

SEQ ID NO: 471384 - DNA, 1000 bp, Homo Sapiens; identical to SEQ ID NO: 159637

SEQ ID NO: 471385 - DNA, 1000 bp, Homo Sapiens; identical to SEQ ID NO: 159638

SEQ ID NO: 471386 - DNA, 1000 bp, Homo Sapiens
ttttttttttttttttatctctaggctaggagcgcaagctcatgtttattcattcatttggtagcgctagaaactggcaactgtgggctaaatctagcccatagacctaaatttatgtttttcttaaccttcacaatatttagaaatcagagcacttcacataggtctacattttcagcttcttttagcaggaatgctccttcaaagggtatctgcattcctgttcccacagcccccagcattccttgtcctttagctgcctggcttctctaggcacctgagttcatggtcctgggttagaagctgcagaaaggactgtgctgactccctcaactaaggggtggtactaccgcttgctcctctcagcagctgacgtcccagagatcagtttcctttctgggagggactcctcattgaggggggtgcagaagacctgcagacctgcatcaaccctggtctttgaggcttcaactcctgaaaatcaatcaattgagccctacctttaccagacctttagtctctcttcttctgtttctttttggctttctggacagtgctgactccagctctttccttcttgggatgctgctgcctcttcctcttacctctgctgcttgagccagtgtgtgctctgctctctgcttccctagccccgccatccttctcatcccttacatccaagatgtcctcctcctcttgatgctgctgtcttttcttcttgcttttcctgcttcttccatcactgcatgctctgctctctgcttccctggttccaccacctaaaagtttcctcacctctatcttctaggttcaagtcctcctcctcctgttgctgcctcttctttcttcggctgcatgggtcagcatatgccctgctctctacctcctctgtcctgacactgcctgcagcctccttgccttttcctccttcctccaagacccccatcttctcctcttcatggtgccacctcttctttttcttccctttcctgagggactg

SEQ ID NO: 471387 - DNA, 1000 bp, Homo Sapiens; identical to SEQ ID NO: 159640

SEQ ID NO: 471388 - DNA, 1000 bp, Homo Sapiens; identical to SEQ ID NO: 340763

SEQ ID NO: 471389 - DNA, 1000 bp, Homo Sapiens; identical to SEQ ID NO: 159641

SEQ ID NO: 471390 - DNA, 1000 bp, Homo Sapiens; identical to SEQ ID NO: 345495

SEQ ID NO: 471391 - DNA, 1000 bp, Homo Sapiens
ttttttttttttttttttcaaagtctgggacagtctttattggagcttggaatgtcatagcaattcgccctcatcagaggcagactgtgagaaagagcagcgatgtggtggacccccagcagggggaaggcggggctacatgagggagccctgcttgcctgcaagcagggcacaggcgcacacgcatacactctcctacatgaacttacactcacacctgcgcactcgctgccggtgggtcagaggacaggtgccttgggctgctcccctcctcatggagaggcctcctccactctgggggatccgctgagctgagacgggagggaaccgcttgaggatcagggacgaaggagctggaagctgcaggcattttgcagttagggagaagggatccaggacaggagggatggccagggactaaccaaagggagctggagaaggccctgcagggccagggaaggggaagaagatgctggagatgggcagaagggcagtgaggcggggagcccggcctcacccatgtgtccatggtagggggtggaggcaggaggagtgaggaaccagagcctcctgcccccggggccagggctaccagagcacggccccatccatgttcccatagcctggctcggcccgcagcctccagtaggtattgttggtcacccaccactctttcccgctgctatccgtctgccgcctgaagaagcgagcctggtgtacgatgttgttttcctccatgactttgcgcctgtctcgctgcagctgctcgatccttctcttctgggcctcagcggcctgtatgttcccctcctccaggtacctctggtctggccggagtctcgtgtcggtggaaggcagcgaccgtttcagctctgctgtcagctcattcagctccaaggcaaactgggtgaagccgaagtttcgctcatggtcggggggcattgagttgggtttccagatgcactggccacctggcgtgggtccccggtacagcccctcg

SEQ ID NO: 471392 - DNA, 1000 bp, Homo Sapiens; identical to SEQ ID NO: 159642

SEQ ID NO: 471393 - DNA, 1000 bp, Homo Sapiens; identical to SEQ ID NO: 340766

SEQ ID NO: 471394 - DNA, 1000 bp, Homo Sapiens
tttttttttttttttttttttttttttttttttttttttttttttttttttttttttttttttttttttttaagtcataaaacaaatttattttaaaaatcaatatcttgcatttcagatatacagatgtatcttttaacagcaggtgaaagcaccttttccagaatctgcttccagcagaatcaatactgatttcgaaactggttgcttaggtcttggagctctgtcactaaggtgtccatagctgttatgtcatcagctaattccctggacatttctccagttgccacatctgtaaaaagttgctttgctttagataacaagccccgtaaattgagtcgaacagaagaaagcatttgtacagcttcttgggaactggatttgtttttactgcattttatggccacatgtgcaagtcctaaggctctttgaacaacttccttaaatgatgtaatatctttctcccaacaattggactgggtgtcacacttgtatgcctttgagaggcactggaatgccttttcattttcatcaggcttttcactctgcccatttccatatacgtgggcatacagcctccagatttctccatcatttgtcactcttgaagtcactctgccaaataactcctgcagctttcctttgaggccagttgcaacatctccacttcgatcagtcatcccatcaatcactgccctgactagaattttaaggacctgaacatctttgtatttgtcacgtaagtccaagagccggtgataagctttaatggcttctgaaaattccccaacgtcagtgctggtgaggatgtagttttcccaaatctgccagtgttcatagttacacttgagagcttcttgtaaagttctaaaagcttttactttttgttttaatcggatataggaagttgacaaattgttccaagcttcagcattatcgggttctagagtcacacagcgctgaaatgcctttgctgaaccttgatagtcttccaaggcca

SEQ ID NO: 471395 - DNA, 1000 bp, Homo Sapiens; identical to SEQ ID NO: 340767

SEQ ID NO: 471396 - DNA, 1000 bp, Homo Sapiens; identical to SEQ ID NO: 340768

SEQ ID NO: 471397 - DNA, 1000 bp, Homo Sapiens; identical to SEQ ID NO: 159643

SEQ ID NO: 471398 - DNA, 1000 bp, Homo Sapiens; identical to SEQ ID NO: 159644

SEQ ID NO: 471399 - DNA, 1000 bp, Homo Sapiens; identical to SEQ ID NO: 340771

SEQ ID NO: 471400 - DNA, 1000 bp, Homo Sapiens; identical to SEQ ID NO: 159645

SEQ ID NO: 471401 - DNA, 1000 bp, Homo Sapiens; identical to SEQ ID NO: 340772

SEQ ID NO: 471402 - DNA, 1000 bp, Homo Sapiens; identical to SEQ ID NO: 340773

SEQ ID NO: 471403 - DNA, 1000 bp, Homo Sapiens; identical to SEQ ID NO: 159646

SEQ ID NO: 471404 - DNA, 1000 bp, Homo Sapiens; identical to SEQ ID NO: 340775

SEQ ID NO: 471405 - DNA, 1000 bp, Homo Sapiens
cttttttttttttttttttttgaggggcatgtcatcattttaatgatgtgatctttggtgtttccctcattagctgtagactatcccctctcctcccaccacaatgtttctatgatgagttacaaacagaaaggaaatcacattttcatactaaaaacaaaatgatcagagccttgatttctccactagaaactacacgtacagttaagagtccacatgcaacaccttaaatcacagactgagacctcacattctgacctggagtctcctccccttccccagccttgggctagctttggcctaggctcaggtaatactgacacccacaggcgctgctctgagggccttgcggggagaagactggtggacaagccctgggggctggccagcctacaccccccactcctgagtgaggacctgcccactgtcccttgaccccatcctgtatcaggcaagcaggcgcccccttaccccacagtagtcccccattagtaaatgccgaagtccctgtcctcaagaatctgggagcctggcccgatccctgttggtttcagtggggtaagacgacgaagagaggctgaagctctggaaggctcagagttggaggtggtgtctgggttcctggtggctctgcccacccaacaggtggacagggcaaagctgcctcgcgggcctctgtccaggatgattggcccagatctggaagactgttcactctctggaggctctctgtccagggctgagtcccctgagcccatgttactaggagaaagtggggtgcctggcagagatacccacttgttcctctattcacattaagcccacagtgtggctctcccgggctccagatcctggaaggttctagttccccgaggcaggccttgcccatttgactgtcttgtgcccactgactgatcttcctctccaccctgaccctcttcctcctcctgttccctgatgcagccagcagctcttccacatgtccagttcccagtcagct

SEQ ID NO: 471406 - DNA, 1000 bp, Homo Sapiens
aaagcaatggaatcaataaatttattaatgttacattaacacgaactacaaagagacctttcgtatgtctgataccaaagacataactgaaaagtcatttttccaaaccttgagcttgcattcacctacctgtctaaccctcacatgtgctaattaactgcaaatgccatttctgggcttcacacacattccgtggctttcccttttctgatgtgacttccctcccttaccccacacctccctgcactgtcccctgctgtgcccttggctggaatgccctgcagcctgcttcagcccagcaaagtattcatcttaccagtccatgccctgactcctgatgtcacccttccctgcatcacccttccctgtgtatttggtggataaggcttgattgaggctcaggtactgagtccctgctggcacattgagaaccagctgccaccccgatgataaggaagacagacccgggacttccatatgaattggatatgatcatctgacatgcaccctactaactgatggatcctgctgttaccccaaagctccagaaccacactggccagacacaggcatttcctgtcccctgaagagccactgaacccagcacaaaagagatctagagctctccaaacctatggaatggcaaccaaaaccatgcccaggttttgagttaagcctcattagtctcccttttcccttgacagtgtagaactgtgcagcgtagcactaaatgaatgagagcagaagcctcaggacagaactgaacccaccaggttgagctgacaacactgccaggggttctatccacagatggaatattcgctttgatcactgagttaggaggcatgggtgagggatgcagagcgccgctcgtcatgagacatcaagctatccaagtcaatatcctattagtagggatggcatgttataaaaggcgtaaagatctcacctgccccagctggaagcagtgattccattgccccagattcggaattgtgat

SEQ ID NO: 471407 - DNA, 1000 bp, Homo Sapiens; identical to SEQ ID NO: 340777

SEQ ID NO: 471408 - DNA, 1000 bp, Homo Sapiens; identical to SEQ ID NO: 340778

SEQ ID NO: 471409 - DNA, 1000 bp, Homo Sapiens; identical to SEQ ID NO: 340779

SEQ ID NO: 471410 - DNA, 1000 bp, Homo Sapiens
ttttttttttttttttcttttttcaaatcacaagcattttttaagaaaaaaaattaaaattttagcaattagtcaacatatgaagatttaacaactactctcatttcaggtcaactatgctttaaatatttactattattaactttacagtcatcaaataattactctgtcagatttccttttttgataaaatacagttgaaaagtcctgttttcatagttgagtgggatcaaactggaatgtacttttctataggtcttgaagcagatactatcacatactctactccattacaataaatcatggtaatgtacaaatagcattataactgctgtgatcacatgaaatcctgttagaaacaagttttcacagtttctgtcccttaccagcatgcaggtaagcgaggtccgggttttcgatgtcaggatgctgttccttcaaatggttccggaactccaccgggacgttggtcccgtagtcacacttgggacagttgtacatcttgactccttcatgtttgccagtatgcagaatgtgtttgcggatattttcagcacagtttgacctgtagtcacaccaggggcatctgtagggcttttctccagtgtggacacgtttatgccgagtcaaatgggactgagttgtggaggcaaagttacactcatcgcacttgaaaggtttttctcctgtgtgctgtctgcgatgcttggtgagggcgtggcgggtcccgccggcaaagccgcagaggtcacacagaaacgacttctcgcctgtgtgcgtcctgtagtggtctttcattgcggaggctgtgaggaatgagtaatggcacgtgggccaggtacatttaaacggcttttctcccgtgtggagtttcatgtggttgttcagggcccacttctctgtgaaacttctatcacataagtggcatgtaaatttcctttcttttggggtgccaactccatgcttgcctagtagatgagtatttaagtgcttcttcatt

SEQ ID NO: 471411 - DNA, 1000 bp, Homo Sapiens
aaacatgatcacaattacgaatggaatcctggcctcactgtggtgtttagcagttggtgctaggtcagaatcttgacctgccacacaccatttgctgtctcttatacaggaactcaattaataagatcattctatctagaaccacctatgtaaaaacctggcaacagaatggaaagcactgatctgaatactaggaaatagtaaagggcactggtattctgaggtatcttccacttctaggacttgctgctaaaaatcaatcctatccagtcactgtgctgaaccactaaggaaaccactggggcggagtgggcctgccaggagggaatgagcaccagtgctaaggagcacatgtgaacactgtagcgaggtccactgcagggccactcattgaactgggaaggggggtgcccctctgatccccatctgttatatcttctttaggaaaaggggagaggggtgctaaagaggaaacaaagatagaaaacactgggttccccacctgcctgcaaacacacagacaccctcagttaggggagggaaagggagaagatgcattattggtacttgtagctgtggcacctgttactgtgaagcctgtaggaggggctatagagctgtggctgggctgcaggtccttaggaatgccactgtgagaactcagctggtggccaaaggctgcgctgaactgagggagttgctgcttgggagaggtggaggccattagttcagcagaaggccccatgccactgaagctggtctgtggtaaccccggaagcacactggagctgccatattatcaccagagtacgatgttgtgtggggagaggtgatatggtcactgtagggagacggcacatgctcactatcataatggcttccatggggtgaggagtgtgagtgatcactgctgtattgctgtcgtgaggtgattaggtcatctgccttgctcagcagctgggcaggatgtggcctctgggaggcatggctgccgtcatga

SEQ ID NO: 471412 - DNA, 1000 bp, Homo Sapiens; identical to SEQ ID NO: 340780

SEQ ID NO: 471413 - DNA, 1000 bp, Homo Sapiens; identical to SEQ ID NO: 159647

SEQ ID NO: 471414 - DNA, 1000 bp, Homo Sapiens; identical to SEQ ID NO: 340782

SEQ ID NO: 471415 - DNA, 1000 bp, Homo Sapiens
tttttttttttttttttttttttgacaagcaaatatagccattgtttatttaccaggcacttactgtgtgccaggtgctgggacacgagcctccgtgctcatcttgatcacggctatgttctgaggcagacagtattactggtctcatgggatgaagaaacggcttcggacatctgctcaagtcacaaggctcagtggctggggcacacttggagctcagtgtgcaggacacaaagtctgtgctccccgtcacctgcctccagcatcagaatgtcaccagctccttcaacagggctccagggacccaggccaccaagttcttccagccccaacagtttgaatcctccttggggcgctggaatgaggcctccaagggagaggagactcaggtttggatgagctgcaggccaggtgctctctgaaggtaggggctgtatcgcctccatcacacagggcactccccagggggaggggccatgtcttccccatcagattggaggcctcctgaggaaggaaccatagctcctgcctgaaagtgctatcaccccaaaagctggtgtttcccaggaggaagggattatgtcaccccatcagagaagggcctccaagcaggggctatgttatcccatctcactcttccccacccggccccagttcaggaccacacttggggctcatgtggctatactgtgcccccagatcttcaggctggaagggcacctactggtcccaggtaactggtgtggagccaggtcccagacccaggtggagcgagacatctagctggcacctgaggcaggcacaggccagggcaagctggggcttcgggcctgggggtaacttatcctgaaatctcggcagggccagaggctcagcaaagtcgctattcaggatggtgagaagggagcctgggtccagcagggttcgggccactcctgagggtgaagctgaactgccacaagccatgggcccccagcaaggatggaggaaggggacacgg

SEQ ID NO: 471416 - DNA, 1000 bp, Homo Sapiens; identical to SEQ ID NO: 340783

SEQ ID NO: 471417 - DNA, 1000 bp, Homo Sapiens
gaaaaatgtaacttttattctgaacatgtagtatttatctttattagcaatttttttcataatataagcatgcctcaatcatccaaaagctatctacctatctatataaattgatatacatgctactgaattgacttcttaatagaatcatatggtaagtgttataatgactaatcaacctacttctgataattttggtgtaaacaaaaatgatatttaatttttattaaatcaagtttacctatcaaattcccttttagaaaaacactgcaagtttagtcttaccaagattgcaagtaaattttaaaattatggtgctgtaaataaaaaggttttaagttgaaatgtgtactgagattagccatatcacaaaagtcctatcatgggtaatgaaaagtcttatttttaatatatttttgtttcctttttcttttgacatgtggcccaagataagaaggtcttattttttaaatgccaaagaacagtattcaacaaaattcgatttaattttatatctaacaaaaacatagaaactggctagtcatattcaagtcaattggtcacattgtatggaatacaaaaataaatgagaaaaaaaaccagttctacaaaaatgctttgttattataatactgaaccacattaaataaaaattcatttttgaaaaaactgcttgctataagaaaatgaaagttagcaggataaatcataagcaaaacatttagaacaaatgtatgaacacattgtggttatcaccattacaaatgtacacaacaccttacaaaaatcttaaataaaaatgtaaaaatatttactggcagtgaatatggcccaggctaattataccaacgggtaggtgatactgggaaactacaagatcaattacaataatcaccttttaagatgatactaaaacaaatgttacatcctccttagaattaaccagggttaataatacatgacaagggttataaagcaactccatgttaagtaggaattc

SEQ ID NO: 471418 - DNA, 1000 bp, Homo Sapiens
acctttagtggcataaacacatttatttatttataaaacattgttataaatgtcacgctttttggttaatctggcagtctttaaaagggggggaaataggctgacatataaacgatcacctagcataatacctggcatagtgtaggtactgggatatgtttatgaattagaagagataatggtcaaaatcagaacttgaaaactaagtctcttcaagacaatccaaattttcctaaaccacagataatatacattcaagtaattcatcattaaatgggttatgttttgtattgcattacttgaagcatgaaactttgtattgcattacttgaaccataaaaactagtttaatagcttattttaaagtaacaatgcagtacatgataatcactatataaaagaattacatgtttataatgtaatgattttgttctgatcattttcttataatgactgaatgctaaaggcacagtcactgaaaaaacttacctaatatactccccttgacttagtatttagcactgaatacaaaagttccaatagcttccatataattaggggaaaaatttacaaatgcataaaatagaaaccaaggtgaattctcatgctggtaatcaatcaaaggctttttacttaacccaaacaaaaaaagtcacttcctcaaattacagaaactaaaaattacaaagtataaaattgtaagtttctggtgagatattttaaagaatatcttgaatagtagagaattgtataaaaggtgttaaagtttccatattggaaagtgtttaaaaacaatgaatatcaaactaaccaaaaccattaacagtagatgcattatagatcaatttatagttttcctcaacattaagagcaagagaaaacagccttaaaatatacaacatttaggcaattgcaatatttaagaaatatatgtacacatttataaagatttatagcataattcttttttaaaatctaatgtaagaattatgcactggtt

SEQ ID NO: 471419 - DNA, 1000 bp, Homo Sapiens; identical to SEQ ID NO: 340784

SEQ ID NO: 471420 - DNA, 1000 bp, Homo Sapiens; identical to SEQ ID NO: 340785

SEQ ID NO: 471421 - DNA, 1000 bp, Homo Sapiens; identical to SEQ ID NO: 340786

SEQ ID NO: 471422 - DNA, 1000 bp, Homo Sapiens; identical to SEQ ID NO: 340787

SEQ ID NO: 471423 - DNA, 1000 bp, Homo Sapiens; identical to SEQ ID NO: 159648

SEQ ID NO: 471424 - DNA, 1000 bp, Homo Sapiens; identical to SEQ ID NO: 159649

SEQ ID NO: 471425 - DNA, 1000 bp, Homo Sapiens; identical to SEQ ID NO: 340789

SEQ ID NO: 471426 - DNA, 1000 bp, Homo Sapiens; identical to SEQ ID NO: 340790

SEQ ID NO: 471427 - DNA, 1000 bp, Homo Sapiens; identical to SEQ ID NO: 159650

SEQ ID NO: 471428 - DNA, 1000 bp, Homo Sapiens; identical to SEQ ID NO: 340792

SEQ ID NO: 471429 - DNA, 1000 bp, Homo Sapiens; identical to SEQ ID NO: 340793

SEQ ID NO: 471430 - DNA, 1000 bp, Homo Sapiens
ttttttttttttttttgtattcaatcgaaatatatttgtctaatatctacaaagtgtgaacaactggtcttaagaaagcagacaaaaggcacaaaattagtattactacagagaagcattcatgctatttggatttgataaatattggagtggcacagtaaaaaataaattaagcattcagcaaaaaccagatatttcattttttccttgctttgtattttcgtcactcctttgacctcatgtgtaaaggctaaaaactgaaatttaactgaaaccatggaatatttatgcaggcgttatgtatgttttagtcacagtgctttcttgcagagtttgggttaaccagagaggtgcacttgaggaaaaaataatccacaggaaattctcttctctttccccaaactaaatacaagattgaggctgtggttgtgcatgttttcatgtgcatgcatgtatttaacttctaaagccctttttcatcacaaaagaagtctccatatgattgactggttttctgatgtaaaagaagcaacttctcaaaaatgaatgactagcgctgtgaccatgagagacgggtggaaaactccttggtgggccttggctcttagttgtcccagaggtgctccatcctgcaaggctctggcataaatctttaacagcttcctgccaacccccatccagcaggaaatacttgcttatctttcttgggcgcggacagacaaaacactgaggtggggagggaggtgagaatcacaataattttgaaatgataaccacccatacttctaccaggaatgagccactttctcccttatggacagtgatcgggccatgccagttcaccttcattttgacaggagttgactaagtgagaatatctttgtgagtgtaaaacatttttggcaaagtgaaaaatagaaaaacttcaaacttcattgataaaaaggagcttatgattacccactttaaccttggtgagtgcagtatttaaatgtgtaat

SEQ ID NO: 471431 - DNA, 1000 bp, Homo Sapiens; identical to SEQ ID NO: 340794

SEQ ID NO: 471432 - DNA, 1000 bp, Homo Sapiens
tttttgtgggaggataaaacatttatttaaatggaaacactaatctttattttcatcatgctgaagtgtgtggttacaatttccaataaaacactatatataataagcaaaataagttagtacattgtaaacttatgcacagtttcatcaattaacagtttaagaacaaacaagccatttaagactttggagctacatttagtaaaaaattgcaaacactcaaatcttatcaaccccaagtaagacagtaaagagctattcaagacttcttcaaaccaattacacaaatacatgtttatttttggttacagtcccctgctatgcacaagaccattggaatgctggaacaattacacattttaaaacggcaaaaagcaaagcaaggagataacatgccagccttagagaagctgtcttgaaagtgcaaactgcgttttctcttcctgaaccactaggataagaacgggtacctcagacgacacggcagggtcatgagcatgctttctataccccactggtgggacatttactggaaccaggtctccatgcctttgaagatacctccggttttaaacagtgaacaggcttcaactaaatatagtgcaaatcaaataccaaggagcaaaacgacagaatagagactgtcacagatgattgacttcctgtttctctacctggcacaacccacatgggacacattggcacacggtaacaacaacttctatttaggttttgatacggaaggcggtgcggcggagcgaatgcagggcaaccacgcaacagcccctgagcaaggccccgatgttatacacaggatccgttccccctctctgagtactgaatgcccacagaaccgtggggaccacgggggcagccacagccaggagatccaccaggaagctgctgctccagtactgcctcacgacgcccccgcgagccagtgggatgacaccatccaacctctcttccacgcaggctgcaaaatccagctctctcatga

SEQ ID NO: 471433 - DNA, 1000 bp, Homo Sapiens; identical to SEQ ID NO: 340795

SEQ ID NO: 471434 - DNA, 1000 bp, Homo Sapiens
tttttttttttttttttttccctcttaaagaaatctgtgttttttctttcatagatgatcacagcttgccatcacgtgtgtgcacgtgtgtgtgttggtattgacttatttaacgctcactcccagctagactgaaatcttgatgagagcgagaccatatccgactttttctccacagtatccccagctcctagcatagagcctggcataaagtagatgcacccgaaatatccatcgaatgaatgagccaatgtgtacaggtggaaaatgagtggatgggcggagatgtcctctggcagcagcagatcatggcattgttcttcatcagggtgacctctcccaacctctcctgctgcccccaaggcaggtccgggagccaccactggaagcccagatgtggaatgtcctcctcctcctcctccttggaaggaagaagcctctgagtcctctcctcttgggactttctgctgccagtctctgcatgcccacaaggcctctcacaccattgtggtccttctgttgacatccacatgcacccttgggaccactcccttcagatgaccctagacccaccatcttggtcctctgtttcaggtccagttgaggtgaggttactgtgtggtaggggatgcccaagaaagggttaagttgccagaagcagagtcccgcccttgggtttgctcagccaatcagagtctgtcctggtgaggtaaagcttctatcctgggtggcattggttgagttgaccggccccatctcctgctggagagagccgaaagggtggagtttcttgctgtccgggggtgatgctgccagctgttgctgcttggcgatgttctccgacaggcaccagcacactctcttcttctgctcctgcgagtgcgcttccaaagtgaataagcactctgccttctctgctagatagagcacgcagaatttcaggtcttctgaagaaccttcctgcagcttcacactctggaggtagagggggttcctcagg

SEQ ID NO: 471435 - DNA, 1000 bp, Homo Sapiens; identical to SEQ ID NO: 340797

SEQ ID NO: 471436 - DNA, 1000 bp, Homo Sapiens; identical to SEQ ID NO: 340799

SEQ ID NO: 471437 - DNA, 1000 bp, Homo Sapiens; identical to SEQ ID NO: 340800

SEQ ID NO: 471438 - DNA, 1000 bp, Homo Sapiens; identical to SEQ ID NO: 340801

SEQ ID NO: 471439 - DNA, 1000 bp, Homo Sapiens; identical to SEQ ID NO: 340802

SEQ ID NO: 471440 - DNA, 1000 bp, Homo Sapiens; identical to SEQ ID NO: 159652

SEQ ID NO: 471441 - DNA, 1000 bp, Homo Sapiens
tttttttttttttttttttttttttttttttttttttttttttttttttttttttttttttttttttttttttttttttttttttttttttttttttttaaaacaaatatttttaattaaattttcaaacatgaaagtataaacgttaatatttgttgaaaaatatatacggcatttcccccgtgtgaacacaatggcttccggtaacactacccacttacaatgagatcttttaggcacttgggtgtagaatgtgcgagagggaaatgcaactttactttcctgctacctataggggcaaccacaattagatctcatgaaatattgttttcaacactgttagcattaacaccgacttaaaacatacggtgaccggacatataacctttaaagtcccagtatatttaaaacaggagaaatctggtaagttgttaggattctaaattccttttagtctgttcactgagatattaaatttcagtagacagaacccaaaaagagatttcatttctttctaatcactttggcttctttcttttttgttaagtaggtaaaaaccttcttggtgggcacctaagcaggatgcagccaatagttcatgaaccagctgcgcacgtgaggcttaaaatctaagatgctgctgaagtggctgcgggaggagcggctgcgacttacttttaatttcaaatcagctgcagatgtttgggagccctctcgatgaacagaacaaatcacataacatgcagaatccactcagaggctgttattccagggaaagagcgggcaggtgtcctgaggagtacattcttgctgtcacagtctcactgctggcacagaggtgccttgtttatgagatttaaatgccacaaactctggctcaggtggggacaagggtgtgccgtggctgaaaccagcgtggtcactgtgtggctggcacggcctgcacatgctgcaggagctgctcgcagtaggtggccgagcggtgcttgtggatgacggc

SEQ ID NO: 471442 - DNA, 1000 bp, Homo Sapiens
ttttttttttttttttttttttttttttttttttttttttttttttttttttttttttttttttttttttttttgagggtagggggtgtctttattgcacagtaccaatgtcaggttggggagttaccacctgaaaagctcctgttttcaaagagaacttgaccctgtcactcagatccaccaaaggggccaggatccacccctgggcggcccctggtccatgctctaggctgatggcccctgccaggacatctaacttctgccaggcaagaccagcaaactgttcaacggcatctggttcatgctgtggcatccacagccaccttagcaccaggcccatggaggggtgactaaggcaggaagagtagtcaccagccttccagggggctttcttcaccacttcccaaggccacaaagggcttcttgcacagatccccaggttgtgctagctcctgagctctggggcccccagggtcttggtcaggagcctccctctttcgcttgtgcaaggaagggctctcctcacccagccgaccctcagggaggccctggctccgcagacagacgatggctgcagcctgctccgccagtttcttggacttgtcccacaaggtagactgatacttttgttcagcaacggtgacaatagaggagaacaggcgatctagagggcgttgaaccgtttcatacacaggctgtgccaacttctccctccggcaccactctagtaggcacatcttaggggtgatctgggctgggtatgctctccggtcaaacttgacagccatcttaatgacaccagaggtatcttcagctggctcccctgtctgctctgaagtcttggctgagagcctggcctgctgggcatccagctcctgtgtggtctcctcatagaaggcaccaaggccaaaggcctcacaaatttcccgggaagactgggcagcatggagcaaccttccctggggcgactccagctgttctcgtagcatctggcacaagc

SEQ ID NO: 471443 - DNA, 1000 bp, Homo Sapiens; identical to SEQ ID NO: 159653

SEQ ID NO: 471444 - DNA, 1000 bp, Homo Sapiens; identical to SEQ ID NO: 340806

SEQ ID NO: 471445 - DNA, 1000 bp, Homo Sapiens; identical to SEQ ID NO: 159655

SEQ ID NO: 471446 - DNA, 1000 bp, Homo Sapiens; identical to SEQ ID NO: 340808

SEQ ID NO: 471447 - DNA, 1000 bp, Homo Sapiens
ttttttttttttttttttttaagatataatatcataactttattcaggagataatcaaatacaatacagggctgacactgacacacagctatgcataaaaattatataaatctccttgctagattttccagaagaggcccagtcataaaaaataaagagaaaccaggagagtgcctaaatgactgcagtgtttcaagcgtaagcatttccacactcccttgcactgaaggcagccccaggtgaaggtggtcccactagcaggaagattaggaggcagcagctatgcagaagccatgtctcctggccctgccagagctcaacggtagaccttgctgaactcctggagggcccaccgcttgttctctgttgcctgcttgagtacggtgtactctttcaccagcctgtcaaactcctccccaaggacctcataggagttcaggacctgtcttgagttctccatgtcctgctcctgtaggtgaatggctccctccaaacggtccctaatcagacgatgaacttccactttctcaacagtgtaagtgtcggacaaaatctttagctcctccatcctcagcttaaggatcatagcaccgcacttgacttccaggtactgggcattgatgcggtctagctcggattgagtcttcagccggtgttcttgaagaagcctctgcagcaaagtgaggcagcggagaagcacctgggagtaagcagcactcttcttctccagcagcaacatctgctccttctgctggctcttggcatcctggcactgctgctgctcacccaccaggacctctgcgagtttccacacctttgctgccttcacggtttcactgtcagcatctgaattgggatcatagtagcagagcagagtgaaacatttctttttgagctgctcctctacttcttgctgtagccgagccctcatccacacaaaatcctctgtgagtggcatgagttccagaaggtccgctttctccagccccagcagtggagg

SEQ ID NO: 471448 - DNA, 1000 bp, Homo Sapiens; identical to SEQ ID NO: 340809

SEQ ID NO: 471449 - DNA, 1000 bp, Homo Sapiens; identical to SEQ ID NO: 340810

SEQ ID NO: 471450 - DNA, 1000 bp, Homo Sapiens; identical to SEQ ID NO: 340811

SEQ ID NO: 471451 - DNA, 1000 bp, Homo Sapiens; identical to SEQ ID NO: 340812

SEQ ID NO: 471452 - DNA, 1000 bp, Homo Sapiens; identical to SEQ ID NO: 340813

SEQ ID NO: 471453 - DNA, 1000 bp, Homo Sapiens; identical to SEQ ID NO: 159656

SEQ ID NO: 471454 - DNA, 1000 bp, Homo Sapiens
ttttttttttttttttttttttttttttttttttttttttcagggtgaaaactgagtattttatttaataataaaacttacatataagaacaattcagtgaaatataaaacaaacctttttcccccttattttcaactgtcctttctaatacccatagggaggaagagatgaaaaacaaaaaacctgctagtctgtaacttaaggtccagaaagaaatatttacctattagccatcgtttcactcaagggattgtgaaatgcaaaagcacacatcaatttattcattagttgtcaagtgaggaggtaaacccctctttcagcatctctctgcatatcttagtttggatggtgaatgaagaaggaaactctctaaaatgtcaaataaggaaaagaccacctagaaatgagtgacagtaattcacagggatactaaaaataagaatcaagttgtaatatctgtactcagtgacacaaggtatcaacacaccttcccaatctaatcattttatcgtgtctacatggatcttccttatagcatgcttttttcataaattgtggaatattttttgagaaaagagagtgtaggtcactgaggccatttgttcttgtagctctctggctggcggggatccaagtgtgtatgaagatgagtgacagtgtgtggccagctttttcgctgctggtctttctatctgcagaagctttgagtgcatttatcagaagccaaaccatgccaactcttttgatattaggtctttgggtggagctttcaaaatcattctttgttccacttttcctagattgtcaaactgcgcccagtaggtggttgagagtgtgaatttcaaacatgtgcttttaatacgcccaaaactgttgcagacagttgggatgtgtagtgcacgtctggcccaacccagaagtgcagtaccgagggagaagctttgagaccgggggcatggctgaaggtaaatgaattgaaatgttctgatttgttacagc

SEQ ID NO: 471455 - DNA, 1000 bp, Homo Sapiens; identical to SEQ ID NO: 340817

SEQ ID NO: 471456 - DNA, 1000 bp, Homo Sapiens; identical to SEQ ID NO: 340818

SEQ ID NO: 471457 - DNA, 1000 bp, Homo Sapiens; identical to SEQ ID NO: 159659

SEQ ID NO: 471458 - DNA, 1000 bp, Homo Sapiens; identical to SEQ ID NO: 340819

SEQ ID NO: 471459 - DNA, 1000 bp, Homo Sapiens; identical to SEQ ID NO: 159660

SEQ ID NO: 471460 - DNA, 1000 bp, Homo Sapiens; identical to SEQ ID NO: 340820

SEQ ID NO: 471461 - DNA, 1000 bp, Homo Sapiens; identical to SEQ ID NO: 340821

SEQ ID NO: 471462 - DNA, 1000 bp, Homo Sapiens
tcaagtacaatataatctgttttattttacacttctctgattattgaaatctaaatagaggtttttgctaacaaacaaaaaggaaaataaaaagacagcaaggacacgattaaatgttgagtgcagatgaagggttgtatgaggccccatcctggggaggctgtacaccttcttggcacagcagcagtgtggcccacggagcttgaacctggtgaagacagcaagtaagccacagctcaagagttctgaggcttgggaacagaaaagagctccttcctgctccaccccaatctgggttgcatgggcatggaaaagagcaaacacaccctgcaaagcatactggacatgcctcttctttaccttctcaggccagaacaccctcctctccacaaacgtgtgcacacttgcacgctcattaagcatgtgcacacatcatattcacacactcaagccatgctcttgatttcagggctctattgcaggctcaggtatcaaccccagagccgaggtgtgtgagagctaccttagcagactcacaaaaggctactgcagaggcaggggtcaaccatcccaaggacctggcaagggagaaactgaattctgtatcccactgatgtgagaggaaattctaatgagcaaatgggaccagcggggcccagttagggaggtccagatgccagttctgagatgccacccagctctgccttgctcttcagtagccagtcagtgaaaaagcagagtgccaggaggccagtaccgagcaggtcccccagccctgtaaggtaggggatgcagtggttgtcaggatccagggcctggtgccaagtcagccgaaccatcacttctgcgaggtacagcaggattgtcacctggatcaggcctgccagcaggtagagcaccacaaaggtctggctgtttatgactgactgaccctccaccaggtagatgatgtagaagaaaatcagatggcctgggaccaccagcaagagcaggactcgag

SEQ ID NO: 471463 - DNA, 1000 bp, Homo Sapiens; identical to SEQ ID NO: 340822

SEQ ID NO: 471464 - DNA, 867 bp, Homo Sapiens; identical to SEQ ID NO: 340823

SEQ ID NO: 471465 - DNA, 1000 bp, Homo Sapiens; identical to SEQ ID NO: 340824

SEQ ID NO: 471466 - DNA, 1000 bp, Homo Sapiens
tttttttttttttttttttttttttttttttttttttttttcctgaagtgatgtttaaattttatttaataaaaatacagttttctttttaaatcaacaaataacattgtttttcagaaatctactcaaatgctgctccttagttatggcttaagagctacccaaagacttcagtgggtaggctgaggggaatagaaatgcagaatccttctttcagtagcctatatacagttatctcctacactcactacacacgtttgggcatgtagaacttgccccagtatttccccttgtgggtcaagtcatatgggctcagtactttccgtatgcccagcatgttggcagtggctattcgctcaaatgtccaggggttctggttgttacgttctctttcctcttgatcttttcgcatcttctctagagtcccgcggctcacagcctttgctgcgaagggcaacttgtgggcaacctggtcaaggaaaccttgcacttcttcaaattcacaacgcccacccatctctacaacaaggcggccagccttcacaggtgtcacgtagtggtcaatagcacctttgcctccccccatgcgatgcccaacacttttgcgagtgatgggcttgaaaggggctggtactcgccatatggcaaacatgttcttggggtccatagagcggttgattgtcaggcgcatcatttcaaagtggccccaatgcaggtagccaccacccaatgccaagattgcaaaattgccttctgtaaactccgtagcttcagtggaaggtccccgtatgtcacttaaatttttaggttctcttcttacttttggcacaagtggtgccctttcaataaatctaagcttgggtttttcaggaatggaaacatcttcaaaacttggtactgggagcagtgtctttacgccagcactggcggggaggagtgcccaggaatctgacaagggcacccgcaggagcggcgcactagcgcgagccagcagcctcca

SEQ ID NO: 471467 - DNA, 1000 bp, Homo Sapiens; identical to SEQ ID NO: 340825

SEQ ID NO: 471468 - DNA, 1000 bp, Homo Sapiens
ttttttttttgactgtcaaaatcaccccgtggggccaatttattgcgaggtcgcaagggagacactgctacaaagcatgaccccaaaggtgcagaaatgcctgcattaggctggaagattccctgaggtggctcaggcaggtaagaaacccacacagtcctgggtcctccccaagcctcggacgtgcagctgctgcttcactggaattcttctctcctcctggaaacttgctccagttgtgtcacgatggccaccaggtccccgcagtccttcttgtggaactcggtccaggccttggtcttgcagtacttgctgcaggtcaggatcccgtagcagcgagggcagggcaagaggcggaccccgatggagcggccacactggtagcagaacttgaagaagggaatttgcccctgctccttcacatccaggcccctgggcaggctggggcccttcttcttcatcctgtggctggggatcagctccgctctcttgcacaggtacagccacgtggggtcccactggctctccttggcaaagacagcctgccgtagctgcaagcccatgtactccaggagccgcttccgcgccaggaacgtctcgcgctctgctggcatcagcgtgtggaaggggcagcgggcaatcctccggtcctggaagaatctgaagtagccatagtccacggctgtgcccactgcctccttttctccctgcctgagcattacaggcttcaggatgtcggccccgtgactgatgagtcggtcaatcagggccagcttgctgtccatgttcctctggtgctcgtaggtcaggtcacaggcaacacacagggcactgcccaagcctttggtcaggggcaggttggggtcagctccctgggtcaggagctccttcacaaccttgccgggcttgtaagtgtcgtcctcgtcggatgccttggcgtccacatcggtgatggcatgcaacagcagctccacaatctgtaccccctcctccccaggaa

SEQ ID NO: 471469 - DNA, 1000 bp, Homo Sapiens; identical to SEQ ID NO: 340827

SEQ ID NO: 471470 - DNA, 1000 bp, Homo Sapiens; identical to SEQ ID NO: 340828

SEQ ID NO: 471471 - DNA, 1000 bp, Homo Sapiens; identical to SEQ ID NO: 340829

SEQ ID NO: 471472 - DNA, 1000 bp, Homo Sapiens
ttttttttttttttttttttttgctttttaagttttatttgcaatacttatatgatagatgttttttaattcctggaaaaataaatacacattattaataatagttatctggtagatggataacggtacatttctatgtaacattttcattttttgtaatcagaatgtattacctttacagataggcaaacacaaagatttgggaaaatgcatgtaaaatctaagaaaaaaggtaaattgtagatataatacattcacaaaaagaatataactgtgttgagctatatttacagatataaaaagatgaacaaattacattaggttttttaaaaaaagacaacctaacagtatgtatcgatgatagcacgtttgttctttaaaaaaatttgtgaattggtcaggagcagtggctcatgcctgtatttccaatattttgggaggctatggtgggaggatcccttgagctcaggagtgagctgggcaatatagtgagaccctatctatattaaaagaaaaaatttgtaaatagacactgaaaaggtatctatcaaaatatctctaatgaagtttgttttacaattttctacattttacattttttctagttttcctatgatctttataaaagcttatcacttataagaaaaaaagttattttcatttttgaaaaatatctataccctttactaagtccctttacattcaatgaccaagattcccacaacactctgggaagctgaaagatctgaaagtaacacggccattacatagatgaaggcagcagaccttggaaatgtaaccccgatggactgactctgggctggcattctcccacccctgcggctactccagactcagaggaatgtggcaagtcagatgccagctttggccaaaaaaactcctgtcattttaggagtctcaccatgcccagttacttcctctgagatggtaacagcaataggggagcacttcaaagacaaagcattcagaatgattcatg

SEQ ID NO: 471473 - DNA, 1000 bp, Homo Sapiens; identical to SEQ ID NO: 159662

SEQ ID NO: 471474 - DNA, 1000 bp, Homo Sapiens; identical to SEQ ID NO: 340831

SEQ ID NO: 471475 - DNA, 696 bp, Homo Sapiens
ttttttttttttttttttttttttttttttttttttttttttggaggaggggaggtcaggtttaatgtcccagtcctcgggcgctgtccagcgcctgccaggccccacggccgtgtcgctcactcgggtggcggccgacccgcctcatcagggccttccgcggaggccgtcccgtcgtcctcgggcaccagctccacgtccagctccagctgccccatgtagaggcccacggcgcacgcccagagcaggctggcggccagcacggcgcccgcgcccacggccgcgccccccagcgtcagctgcatgggtcctcgcagcgccgccaggcccacggcgtacgaggcgctgccccacaccacgcacaggccgcccagcaggaagaagccatatgctgcttcccgacccatgtcactctgcatgaaggagatgaccccgatgcccgatgccaggaggccattgcggaaccaggagaggaaggctgtctcgtgcgcttttcggaggagccaggcgtccgcacgatccagctcggacactgggggcggcgaagccccggcgcggggaccgtggccgggggcgaaggacccccgggcgcccccgctccggggccgctgaggcggcagtagcgacctccggaagcgaagacgggcaaggcgagcggcccgagcccaccaccagccgcctcccatgattcgcact

SEQ ID NO: 471476 - DNA, 917 bp, Homo Sapiens
ttttttttttttttttttttttttttttttagatacttattttacttcatcagttccaatcacaacactcatcatacatccaatgacaatatacatatcttcatgggtactaccattttgcagaggcatcatttactaatgcaattatccaattgatttaatgatactagctttattctgtgttattatattccatattatacaatgataggatatttgaagagacatataattttgtaagacaagactcattacatgattgtattattttctatgacatatttaaagagtttaataacatgtataagtaaaaacaaatttaggagaagagtcaagatatttcatgtattccaaagaactgatactagtattgaggaagctaatagcctaaaattatatccaaggcatggccacatctttttcccaaaatgtctgaatgatcagggcaacttcttatggttcccttaggctgtcagtcttgtccttctcttctgggagctctggggtaatagtttggtctacagcagaagtgaaaacattggttgtgctgggttttggtgaagttgagggcatgaaaactcctgcactgtcatgtctaaagttgatcgcttctttttgtaaatatggtatctcttctcctgttgacatcacagcaatttcaggagctgtgcctagttggggatcaaaagctagttgctgctgtcctcctgatatagcaggttctgctagttgtggaatgtatccaaattgagcatagaatggtatctgctcctcatactgttgctgtcttgtttgttgaggtgaccttggaactgtttgctgaggttgttcccagggtaggaccatgtaaactggatagtattgaaacatctgtccttgctcttgaggcattttgaaggagaatacatagggcatca

SEQ ID NO: 471477 - DNA, 1000 bp, Homo Sapiens; identical to SEQ ID NO: 159663

SEQ ID NO: 471478 - DNA, 1000 bp, Homo Sapiens; identical to SEQ ID NO: 340833

SEQ ID NO: 471479 - DNA, 1000 bp, Homo Sapiens
tttttctaaagctttatttattttataaaatgcatagaataaattatactagtaacattttaaaaattaacatctttgtattcagcagtcctgggtcaggaggcaggaggagggtggtggggacgggatggctcactgggcagctaacccgtgtaggccacttcctcctcgtcactgccatcggggaccgcgtctgtcccaaagtagcggtcgccaaagttcccaatgcctgggatgatgcggaaaaggtcattgacccgcttgtccaccgccgtggtgatgattctcactcgcggaaatgcataggccactgagtgcacgcccatctctgccatgagcagcgacagcaaaaagatcttgtcctcaggcacgtcgtggtccaggagcacgcgcactgccatcatggccgccgcgcccgtggacacggtgcagtccatgaggatcacgtggtcatcgctgatgtccttgggcagcctcaggtagtggagctcgggctccccggtaagctggttggtctggatgaggatggtgccgatgcgcacgtctttgcacacagcgcgcagcgcgggctccatggtttcaccggcgcgcagaatggacacaccggtgatctgcttccccgcatagcacttgcccgcatagtcctgcccctgcggggtctgtacgacgcagtcctgaaagggcaggaaggagagcgcgtgctcgatgagcagccgcatcagtctcttggagtagaagatgaactcgtcgcgactggtctccttgtccctgatgatggtgtgcatgccccgtacctgcggcgtgctcttcaggacgctcagcgtccggggcagcgggtggcactggtgtgccgaggccagcgcagccctgacgctgagttcacgctcctccagctggctgtgcacgtgctgcacaatcaggtcgatggccaccgtgttgccgctccctctggggaccacgatgtctgccaggcgcatggtgggctggatgtactggtcga

SEQ ID NO: 471480 - DNA, 1000 bp, Homo Sapiens
tttttttttttttttttttttttttttttcaaatttccatgtattttctgccatttttcagggtctaagattggtcatacattcccaatttactctcagttccagtcaagctggttgctctgaaagtaacccagcttgttgctctaaaatacctcagtagcctgagtgttatactagagatctaaagggttaacaggatagggtggaaaggttagagactcctagaaatctctggtcaccgtgatcttcggcctcattctaatacctgttctttggacagtctttttcctttggtgctctcttgcctttagctaccttctctaatatgtatgctaccatcactaataaagtgatgggaatgggtttgagagtcgtaatttatattaaaaagttgttggacttttaaatacattttttcaaataaaaaattaagcaaaatagttgcacagtaatcattgcaggtgtgtgttggattaaaggatggatatagctaatgaagataactcctcgaaagtggctgagatggaattttgtaccaacattgcccttttgaggagagagggccaagcatgaaggcaagaagaccactgtcatctttcaagggctcaactccttgttcttcctactcccttttcttagcgtttatttgagatttttcaagcctgtaaaagaagtacttgttttaaaacaatgttggaaatgaggaaaatgagcaatatcaacattttatcctgagggacagggagtagaaaacaagccagaggctgctagttacatagttcagtcttagggatgaagggatttatgtctctcctccctcaggtacctctgtaaagaaacacaagaccaaacaatgtgttttccagttttgtttttctgtactaaaaatatctagtgggtgctaggattgaaagggcaagagaggttgagatactgacatctcctcatgtggatgaagtggccattacctctggtttctgtctattggttgcatctctgt

SEQ ID NO: 471481 - DNA, 1000 bp, Homo Sapiens; identical to SEQ ID NO: 159664

SEQ ID NO: 471482 - DNA, 1000 bp, Homo Sapiens; identical to SEQ ID NO: 340835

SEQ ID NO: 471483 - DNA, 1000 bp, Homo Sapiens; identical to SEQ ID NO: 159665

SEQ ID NO: 471484 - DNA, 1000 bp, Homo Sapiens; identical to SEQ ID NO: 340837

SEQ ID NO: 471485 - DNA, 1000 bp, Homo Sapiens; identical to SEQ ID NO: 159666

SEQ ID NO: 471486 - DNA, 1000 bp, Homo Sapiens; identical to SEQ ID NO: 161036

SEQ ID NO: 471487 - DNA, 1000 bp, Homo Sapiens; identical to SEQ ID NO: 159667

SEQ ID NO: 471488 - DNA, 1000 bp, Homo Sapiens; identical to SEQ ID NO: 159668

SEQ ID NO: 471489 - DNA, 1000 bp, Homo Sapiens; identical to SEQ ID NO: 159669

SEQ ID NO: 471490 - DNA, 1000 bp, Homo Sapiens; identical to SEQ ID NO: 340841

SEQ ID NO: 471491 - DNA, 1000 bp, Homo Sapiens; identical to SEQ ID NO: 159670

SEQ ID NO: 471492 - DNA, 1000 bp, Homo Sapiens; identical to SEQ ID NO: 340842

SEQ ID NO: 471493 - DNA, 1000 bp, Homo Sapiens; identical to SEQ ID NO: 340843

SEQ ID NO: 471494 - DNA, 1000 bp, Homo Sapiens; identical to SEQ ID NO: 340844

SEQ ID NO: 471495 - DNA, 1000 bp, Homo Sapiens; identical to SEQ ID NO: 340845

SEQ ID NO: 471496 - DNA, 1000 bp, Homo Sapiens
ttttttttttttcaccgtgttcctggagctgcccgctgccctctgccctgtccgtccccggcagagctgggagccggccctcagcatgaccaccgaaactttatttacaacacgaggctggagtaagaggggtgggatggaggacagcagcagggccgacaggaccctacttctgctcccgcctccagacgatgaccatgccgctggcgtcactggaggccagtaggctctcgtcgcagttgaagctgacatcaagcacaggtgcactgtggccctgcagcttgttgacagcagccttggccgcccgctccacatcaaagaagtgcacgcacatgtcctcactgcccgtcaccacgcaggccccctggcggaaggacatgaggggacagaagatgctgcgcacaggatgtgagctctgctcgatggggaagcttctcttcagctgcagggtcccctcgttgtctaccaccctgtagagcagcaacttgttgaggcaagcattgatgagcagtgagggatcccgggcctcgcggctgacccaggaccgggctgagatgctggtcacagggctcccctcatgcaccaccaaacgcttggctttggtcagcttccctgtggccatatcaaagaggaaagagaagacactgccacggtcatcacccgcccagagcagccggccaggggcatcaaaggacagagcaaggacacggcctgtcagcttgctggagccccccttcactttcttgcctgtggagatgttcatgacatgcacgttgtgcttggcgttccccaccacagtgaggttgttgttgacaggctggaaggtgcagcagagcagttcagcgctatcggggtcagggatctctcggatgcagcgaccatcctcagaggcccagatgcgcatggtggcatccagtgaggtggacacgaggatgtcattggagagggaccaggcgaagtcggagacaccacgggtgtggccccgtagcacgcgaagcac

SEQ ID NO: 471497 - DNA, 1000 bp, Homo Sapiens; identical to SEQ ID NO: 340847

SEQ ID NO: 471498 - DNA, 1000 bp, Homo Sapiens
ttttttttttttttttttttttttttttttttttttaagttttaagggcatttaatcaggaggaaaggtttggaaaactaactcaggtgtatttattgtttaagcagaaataaagtttaatttttgcttgaagatggttcttaatttcttttaacctaattcctaatcctcacaaagatctttccaacagcaagttcagtaagttcaggtaacagtacgtcaccattggcttctggctcattgagtgatggggggatcgcggtttcatctctgtaaacttgcccttgactggggagataccatctccttaaaaatactcttcattttcctaaggagtgaactgctgctgcacgaattcttatttgtggagggagtagctgcctccttacttcaccttcatgcaccagtgcagcgtgaacaggggctttattgatggggcttgggaagctgtaataaagtccagcatgcaaattgtgaaggtttcgtatagccaccaggagacaagggtcaaaggaacgagcctctgtgggctctgctgcttagagtactttgtcctttctcagttcttaagggcaactgggaaggaagagggatcagcacttcacaaactggtgggtgacctcatagattcccacagactcctgggccttttcatcatagtcagtccagtccttctcctgcagattaatgtcactgaaggctgtccctgactccacaccttcagcagcaaacccagcctgcggctggaaatcaactggttcaaggccccggcactcaaactccactattgtcttgaagttctcattgtcttcagcattgtaaggcttgatggtgctgcttaaaatctcgatggaattttctcttgcacacagcttgcacttctggaccatggaagcactgccacggccccccttcagtgccacactgtccatcagccggatgtactgccacttgtccgaaatctcaccacagttgccacatttcatcttcaggtaccacc

SEQ ID NO: 471499 - DNA, 1000 bp, Homo Sapiens; identical to SEQ ID NO: 160849

SEQ ID NO: 471500 - DNA, 1000 bp, Homo Sapiens; identical to SEQ ID NO: 340850

SEQ ID NO: 471501 - DNA, 1000 bp, Homo Sapiens; identical to SEQ ID NO: 340851

SEQ ID NO: 471502 - DNA, 1000 bp, Homo Sapiens
ttttttttttttttttttttttcatgaggaaggtcggggcgtttattaaacaaagaccaacaaagacaatctcagaggcagaagtcagggacagacaaacccatgtgtctgggatggtccccattggttcccatctcaggtgcccagttaaagatgaaaggcacaaagcccctgctgcaaggtggatgggaagggctgtaatcacctctgacacctgctgagacctgaacctctgctctgtgcctccccaaccaaataacaacctgaggcctctcctcagccctccatcactctctcctccatagtatctgactggagatccagaagttcattacaaactggtcacctccaccggaagggaagcaaagacagctacagcactgtcctgaagggtctgggtcaagtcttccaccagggccgctgcctcctcactgctttcaggccgatgctcttgcagccaagcctgaatttcctttggcagcatggttaacatctgctccttggtgtgtacctctggtctcagccagcgccggcagagctctcggaggcggccgagtgcaccctgtggtcccctggtcacctcctcctgggggccgcccttgccagcactctggggaaagggctcagactcagggccatcctcctgcagcacagcttcttgcacccaggagtcatcctccaggatcatggtggtgacctcctcctcctgtctatcttcctcttgaggcacctggaccaaggagctcagcggagtggtcactctcgggatgtctgcagccatcatccacagtcctggggcaatcacttaggcttcaagccttggacctcagtcttctccagccaggctctcaggtaagacacttccctcctcaaatatcaacaagtagtcccgctctcgggagaccaggtcctgctctagcggttgcttcgcgtgcgaaagcgcccccgggctcggcccggcccctccagattcaccccggctcaagcccgtggggcaccg

SEQ ID NO: 471503 - DNA, 1000 bp, Homo Sapiens; identical to SEQ ID NO: 159673

SEQ ID NO: 471504 - DNA, 1000 bp, Homo Sapiens; identical to SEQ ID NO: 159674

SEQ ID NO: 471505 - DNA, 1000 bp, Homo Sapiens; identical to SEQ ID NO: 340853

SEQ ID NO: 471506 - DNA, 1000 bp, Homo Sapiens; identical to SEQ ID NO: 159675

SEQ ID NO: 471507 - DNA, 1000 bp, Homo Sapiens
ttttttttttttttttttttagagtaatactattgtgttattgcatagaagagacggctttcgggcgctgggctaggtaacggtctgggagcgctggcggctgcctgggggctgctgggcggcgggggctgcactgctgctgagttgtcgctgctgctcttgctccctggcatgctcctcataccactcctggatctcctcctggtacatcttcaggctcaggtcgctcttggtccttgatcgccgtcccagaaacaccatggaatgttgctggtatctctccatctgggagagggtctccagcagcctggtgacatccgaggaggccccccgtgcctcccggtagagctccaggacggcaaccagctcttctttggagatttccttctcaagggtgatgccaccatcaacttccgagtcctggttcttgcggctgtagttcattcggaagacgaaggcctcgaggataaaggcgacaatgatcgtcatcaccaccatggtcacaatgtaaaaggtcatgaagtagaggcggctccagtgggaggtctgagaggtgacgccttccatgatgatgtaccagttgttgacaactgtgagctcaaacagggtcacaaagctgttgaggatgttgtcaaaattattgagataatagtagccttcctccaccacggtcctgttgcccacggtgtggttgcgccagcggtaggcatctgccactgtactcgtgttgcagcagttggggaagacgatcccgcagaagaactccatgcccacgatggcgaaggagtagtaaaagatgagcagggtgaggcccaggctggccatccggggcagcagctcgaacatggtgtccagcacgttgcggtagcgctccttcaacttaaacaacctcagcagctggagggggcgcaggaccacgatgaaatagaagggctccatgttgagggccagcgccagcagtcccaggaaggcgaacactgtcacggagaagtcaaacaag

SEQ ID NO: 471508 - DNA, 1000 bp, Homo Sapiens; identical to SEQ ID NO: 340855

SEQ ID NO: 471509 - DNA, 1000 bp, Homo Sapiens; identical to SEQ ID NO: 340856

SEQ ID NO: 471510 - DNA, 1000 bp, Homo Sapiens; identical to SEQ ID NO: 159677

SEQ ID NO: 471511 - DNA, 1000 bp, Homo Sapiens; identical to SEQ ID NO: 340858

SEQ ID NO: 471512 - DNA, 1000 bp, Homo Sapiens; identical to SEQ ID NO: 340859

SEQ ID NO: 471513 - DNA, 1000 bp, Homo Sapiens; identical to SEQ ID NO: 340860

SEQ ID NO: 471514 - DNA, 1000 bp, Homo Sapiens; identical to SEQ ID NO: 159681

SEQ ID NO: 471515 - DNA, 1000 bp, Homo Sapiens; identical to SEQ ID NO: 340866

SEQ ID NO: 471516 - DNA, 1000 bp, Homo Sapiens
aacaaacaaacatttatttttactttttaaaatagggctactgggaagttaaatatttgcatctgtggcctgcatttgtggctgttgtgtttctattggacagcactgtattagaggaaccagatgaaaataaatataagacctgataacagttctgtgggtatttaacagagctaattatatccgaacattttctgaaaatcttttgcgtgacttaaacaaacataattaattccaaatatcaatgtcttcaaatgtatattgcatctatttaaaaaaaacatgcatctgtcaaaataaccagactccactaaaccatacaaatctgttagctgtcaaagcatatcaaaatatgcatcctccaagttcacttccaatgtgacttagggataatgcagacaatttcaggcttaaaaccaaatatgttagttatttccagatgagacagttaacattacaaggccctagaagtaatacacatcgcaattcaagtctgtattcttgaacttttcccctgttactgtgaagaagagtatcatgggtccatttaatctttgattactgcctaaaagcattcattgccccagtagttcttaattgtcttggaaatcattctcttgcaaacttcacatttccatatcatactttactttacgctattacttcatgggctcctgggcatttggtctgtttgtttttctcctttcctctttgaacaaagtcaggaaaaatgtgtcagtaggagaaaggaggagctgaagggagtaaataattcaagatcacttctgtcatttgtagtggctgagggctagaaagatattcttcggtgaagaaactcccaacaggttccatcagactgatacaacttcaggggggccaccctctgcagatggcagtgaatttgcacctgtttgtggtacaggcactaccacagcatctttgatgtctgtgtttacattacatgagaagttcttctccagttttttggcagtgtctgggc

SEQ ID NO: 471517 - DNA, 1000 bp, Homo Sapiens; identical to SEQ ID NO: 159683

SEQ ID NO: 471518 - DNA, 1000 bp, Homo Sapiens; identical to SEQ ID NO: 340867

SEQ ID NO: 471519 - DNA, 1000 bp, Homo Sapiens; identical to SEQ ID NO: 340868

SEQ ID NO: 471520 - DNA, 1000 bp, Homo Sapiens; identical to SEQ ID NO: 340869

SEQ ID NO: 471521 - DNA, 1000 bp, Homo Sapiens; identical to SEQ ID NO: 340870

SEQ ID NO: 471522 - DNA, 1000 bp, Homo Sapiens; identical to SEQ ID NO: 340873

SEQ ID NO: 471523 - DNA, 1000 bp, Homo Sapiens; identical to SEQ ID NO: 159684

SEQ ID NO: 471524 - DNA, 1000 bp, Homo Sapiens
ttttttttttttttttaacgaggggaggatagttttattcatttgaaacatcacaaaagcagtctgagttttcaacatggcagtgatacagattttaagcaacatccagtttatacagtttctggattaatattttaatgtttcatgcccagttcagtactttaaagcagaattaggaataaagcagtaaatattacaaaatgcagtcaagatacatattggaaatacaaatccattcattacagcaaatgttttgcaaaagagtaaagcagcaaatattaatttttctaaggtaacatgcactttatataattcaatgtaataaaaaagctgctcaaattaagtgttacaaaatctatactgtttcaggttattttgtaaagtaagaaaaatacatagaaatgagccatagaatcttaacactttaagaaatgtgataaatgtaggataaactgtgtaatggtgccttaaaaaattaaatatggacattcactaaagccaacggtcaaatgtaaatggcaaaaaaattcattgagtattacaagttgatatttgtttagttagtcagttgggtattagtctctttttgaaatccagtagaattttaatatgctcagaactgtaaaaaatcatagtaattttgtataacataaaaggattatagtttttcggattcaaaatctggataagaacattcatgatgctgaaagttaaactgaatatcttgcaaacatttactgttaatgagagagtgcacttcttgtgccttgattcttgatggctaagtgtctacaaggtagatgggagcaccagcatttgcgctacctctaatccatcaagttgggaggtagcaaaattggccggaaaattttccagtgtgtgttctgtgtttggagaactgtctaattaggtaccctcctgtagcccctgtatttttacgttataaagtataggattatcaatcttcctttaaatcaattctcaggttaacataagatca

SEQ ID NO: 471525 - DNA, 1000 bp, Homo Sapiens; identical to SEQ ID NO: 340875

SEQ ID NO: 471526 - DNA, 1000 bp, Homo Sapiens; identical to SEQ ID NO: 159685

SEQ ID NO: 471527 - DNA, 1000 bp, Homo Sapiens; identical to SEQ ID NO: 159686

SEQ ID NO: 471528 - DNA, 1000 bp, Homo Sapiens; identical to SEQ ID NO: 159687

SEQ ID NO: 471529 - DNA, 1000 bp, Homo Sapiens; identical to SEQ ID NO: 340879

SEQ ID NO: 471530 - DNA, 1000 bp, Homo Sapiens; identical to SEQ ID NO: 340880

SEQ ID NO: 471531 - DNA, 1000 bp, Homo Sapiens; identical to SEQ ID NO: 340881

SEQ ID NO: 471532 - DNA, 1000 bp, Homo Sapiens; identical to SEQ ID NO: 340882

SEQ ID NO: 471533 - DNA, 1000 bp, Homo Sapiens; identical to SEQ ID NO: 159688

SEQ ID NO: 471534 - DNA, 1000 bp, Homo Sapiens; identical to SEQ ID NO: 340883

SEQ ID NO: 471535 - DNA, 1000 bp, Homo Sapiens; identical to SEQ ID NO: 340884

SEQ ID NO: 471536 - DNA, 1000 bp, Homo Sapiens; identical to SEQ ID NO: 340885

SEQ ID NO: 471537 - DNA, 1000 bp, Homo Sapiens; identical to SEQ ID NO: 159689

SEQ ID NO: 471538 - DNA, 1000 bp, Homo Sapiens; identical to SEQ ID NO: 340887

SEQ ID NO: 471539 - DNA, 1000 bp, Homo Sapiens; identical to SEQ ID NO: 340888

SEQ ID NO: 471540 - DNA, 1000 bp, Homo Sapiens; identical to SEQ ID NO: 159690

SEQ ID NO: 471541 - DNA, 1000 bp, Homo Sapiens; identical to SEQ ID NO: 340890

SEQ ID NO: 471542 - DNA, 1000 bp, Homo Sapiens; identical to SEQ ID NO: 159691

SEQ ID NO: 471543 - DNA, 1000 bp, Homo Sapiens; identical to SEQ ID NO: 340893

SEQ ID NO: 471544 - DNA, 1000 bp, Homo Sapiens; identical to SEQ ID NO: 340895

SEQ ID NO: 471545 - DNA, 1000 bp, Homo Sapiens
agaaaatagcttatgttacaacaaaaaccctataaaaacattcatcccagcaaaagcctccagggctggagggtgaggggaaaagtttcaaagcacgtggatagtccagatctgggatgccctgtcctcatccggctcccatagcaccacgtggtcccggtcgtagccccggcctcccttcacgtccaggatctggccttcgaacatctggctgcagatgtggcccgattcactgatgctccacgtctggcgcggcaggcggctctcggcccacagcaccggggcccttcacgacctccctctgggtaaaggggaggacagggacattttcagagttctgaacaaacttattccttggggacgatggagcagaaagacctcctgggctggggacatccttccttcttgtagtggatggagcaggaggttgtccagggactgtcacatgctcgctcctcaccatgggcaggacggtggcagcaggggggtccacgggcccgtcctttttttagggggcagaacaaggggagtgagccgggccccggggtgagtgggcaccacaggctgctttgcagggtgagttaggccaggagaggggacatgggtctcgagtctgggagaggaggggactgatgcttgaccctgagaagtctggagagggagctcagtggaactgggggctcccagcacctgccagagctcacaggccctggcatccggggctctgccctggtctctgtccggacaggctgcaggggcatcctgattcttaggcaggtgagcactggctgggatgcctgtagaggccagggcagagctgtctttaagctctgctgtcccggtctcaggcagctgcctcaaggctgcccccactgtgctgcccagacctgtgctccttggcccgccagccgtgggcctgggcaggtgactggcaggggggctgtgcccagcaggcacgaggttacttagcactttcacggcctggctgcggctgggcgag

SEQ ID NO: 471546 - DNA, 1000 bp, Homo Sapiens; identical to SEQ ID NO: 340896

SEQ ID NO: 471547 - DNA, 1000 bp, Homo Sapiens; identical to SEQ ID NO: 159692

SEQ ID NO: 471548 - DNA, 1000 bp, Homo Sapiens; identical to SEQ ID NO: 159693

SEQ ID NO: 471549 - DNA, 1000 bp, Homo Sapiens; identical to SEQ ID NO: 340899

SEQ ID NO: 471550 - DNA, 1000 bp, Homo Sapiens
ttttttttttttttttttttcgactgtaacctgctttattaacacagaaactgcaccacacacatttgaacctcatagccaatgaacagacccagcacttagcaacttctccctcctgcgccccagagaagggagaaaaagagggagcagaggagcaccagctacttcccaaacagcgccacggggaagtcctcgccatcactgttgctgtgctgcagctccccgctctgccccagctctctcccaacatcttccatgagttgctccaggtccaggtcactggaggcttcgtcctcaagggggacacttccagcctcctgggtcaggggttcccggtgtctgggctcttctttcgcagatgaggggcaggcccccttacacgctgataggcccaggttctttggcactgttctaacttcttttccctctgaaaagctggctgccaaggccttgctctggggagctttaaattttttcttagggcctggctggtcagaatctgaattcccttggccttctttccttcccattctgggtgcaggaggagctgtggatttcctgcctagagatctcttcattatcttcctctgcagtgtcctgcctcggccatctgctgtgcctgcatcacccccaagccctcttggcttggtttttttgggtctgtattttgactcgcttacgaatgggcaaaattgggtctgttttctctccttcctccttttccaactcttcctctttctcctttttctctaagcaggatcctgggctgttcaaaccagagagctgtaagtcttttctttccccattactgttagatccgttgaatcggctccagaaaccaaacaagttaacccgttcctgaatgctgatctgttctgcctcttgagccatcatcagggccacccccagtttctggctgcagtcatttctgcgctttttcatgactgatagctccagggacagctcctggaagttctttagcatgttgactgggatccat

SEQ ID NO: 471551 - DNA, 1000 bp, Homo Sapiens; identical to SEQ ID NO: 340900

SEQ ID NO: 471552 - DNA, 1000 bp, Homo Sapiens; identical to SEQ ID NO: 340901

SEQ ID NO: 471553 - DNA, 1000 bp, Homo Sapiens; identical to SEQ ID NO: 340902

SEQ ID NO: 471554 - DNA, 1000 bp, Homo Sapiens; identical to SEQ ID NO: 340903

SEQ ID NO: 471555 - DNA, 1000 bp, Homo Sapiens; identical to SEQ ID NO: 340904

SEQ ID NO: 471556 - DNA, 1000 bp, Homo Sapiens; identical to SEQ ID NO: 159694

SEQ ID NO: 471557 - DNA, 1000 bp, Homo Sapiens
actaaaacagaaagactttcaggaaaatgtcatttaatgatttcagctatacattacatatacaactctgtagcctagcaacaatcattgctacaccatcattaactttaaatattttgcttggtgagctattctcaaatgtagcacattttaagattttgccatcattatgactgtggaatcattgtttggttttcataggaaacagatctgtcacagtatgaagctttgtttattttaagaaactggtacacaattacatttccacttacaagagaacgccacagatataactaaaggcaggcttcgatggctccacaaaggttgcgtgcgggaccaaccccacacctcctgcttccccgtcgcaccgccctggccaggttcacatggtttcatttccagagatgctttgctcttcgcagttaggtggttttaattccttcaaaggcacacaacttccatcttttttccagcgtggctcccacacccgtgaattcctgtttgaacatgcgtggcagcctcatcaaaagcatttctatttcatttgcagatatcttggagtccagctgctgcatgtatgaccaaagatattctatgttggctccaaaaggatggacgtgaagaaacgttgatatgatacctattagcagagcttctttctctgattttaagccttggcttcttttctcaatattgttctctcggtcttggttgactaatgcaactgtcaacacattgatttcatttgaatcctcatggctgtggccattggtctcgaccaattccttggtaccttttaattgttcctgcaggacttttagtaacgcttgtgtatgggactgctcttcctttgcttgttccaattctgactttttgttgtttaactcctcctggatggttagcaattgctgctgcatgccttgcatggtttgctgcagaaactgcagttgctggtccttggtgaggttttcttctgttcggaaaagctgttctttttctt

SEQ ID NO: 471558 - DNA, 1000 bp, Homo Sapiens
tttttttttttttttttttttttttttttttttttttttcggacgcgtgcgtccgcccacgcgtccgcggacgcgtgggcggacgcgtgggttttttttttttttttttttttttttttttagtattaaaatgtgactattttattttttcttcataaaggaaaacaaaaaacaaaaaaacaaaaacaaaacaaaaaaaacttaaggtatgtttcctgcaagcaaaatggagaaaaaggtattattgttgttactatgattattaagccacagacacataaaatccacaaaatggattggtggctttggaaatgcaataccgtatcaaaggtgcagactgtttcaaatgttctctacatattgggctgaaacaagaaccaaaccaaacttcaaccccatcagcgacgcaatgctcctgtgaccttggtgaaaacatcgtcgtgaccagctagatccaggaatccttctctagagacacgtggaaacgtcccatcaggtaggtcctcaagtccaaggtggggttgaagggctctggctgtacccagggcaaagcacgtgcattattggaccaatttctgaatagatttttataaatatgtacaaatcagttacaggcacttgaaatgtctttggctggaataacccaacatcgcaagataatgtattcacagagcatccaggcccaggctgggttcagcaggcaaggattatggttctctcagtctctctcaaaaaacaaggagctgtggaattaggcttcagccaaagccaccttctcgggacaaaattcaggattgctctgacgcaatttgctaggtctgcccttgataacagcatagcaaaacattgttatcaccatcacaaagaggaagtaactggtgtgcatgagatgcaaatttattaatgaacggtcatcatctggaacaatcactgtaagcttgggatttaaagcatgatagacttttccaatggcccccttataacaccagaaaggattgta

SEQ ID NO: 471559 - DNA, 1000 bp, Homo Sapiens; identical to SEQ ID NO: 340906

SEQ ID NO: 471560 - DNA, 1000 bp, Homo Sapiens; identical to SEQ ID NO: 340907

SEQ ID NO: 471561 - DNA, 1000 bp, Homo Sapiens; identical to SEQ ID NO: 340908

SEQ ID NO: 471562 - DNA, 1000 bp, Homo Sapiens; identical to SEQ ID NO: 340909

SEQ ID NO: 471563 - DNA, 1000 bp, Homo Sapiens; identical to SEQ ID NO: 340910

SEQ ID NO: 471564 - DNA, 1000 bp, Homo Sapiens; identical to SEQ ID NO: 159695

SEQ ID NO: 471565 - DNA, 1000 bp, Homo Sapiens; identical to SEQ ID NO: 340911

SEQ ID NO: 471566 - DNA, 1000 bp, Homo Sapiens; identical to SEQ ID NO: 159697

SEQ ID NO: 471567 - DNA, 1000 bp, Homo Sapiens
ttttttttttttttttttttttttttttttttttttttttttttttttattgcattttaacttctttaataattcactcaaaactgtaacacgagaggaatccactgtttagttaacatttacacacaattataaagaataaaagactgaatacatttatgaacaaactgcagtatgtctttaggttcataggctgctcaacacatttaaagcgtatagcaaatgaagtcacagaactatagggctacaagaaaatcccacaagtttatagcttaactggaatcagatttatcttgatacagaataatctataaactcatttaatggtcattttgtctcatctaacaaaccacacagatgtcaaccaccgggccttgcaaatgcagagtggccatttacatttaaaatgaagtattatagacaaccagaataaaatcaattcctgtgtttactattttccattttcaatatgagcatttgaaatgttaatatgagatacaatttcactatttaaactcacattacatatactgaaactaccaatgagtacagcaagaatatagacatactgcggcctttgactttaacatcaacacactggttaaaatactgagaaattcgaaccacacaaagtcacaaaatgaagtggaaaaaccttaagacaatttaatttagcacgcttattttgcagctgagcaagctaaggaccaggggcaactagaccctaataatgtgtacttttgaaaatgatacaaactaccttggttgtaagaagtgcaggttgaacactttaggagaacagtcttcaaactggcaattcaaaatttcccattatatgtgaataaaattggaaggatgttaaatgtccatggaaagttactcttgtaagttaggatgccttatactgaggctttagaatgaaagtacacttcacaaatggaatagtgaacataaattaccagaagtcaagataatagtcatactagtaaggtaagcaagg

SEQ ID NO: 471568 - DNA, 1000 bp, Homo Sapiens; identical to SEQ ID NO: 340913

SEQ ID NO: 471569 - DNA, 1000 bp, Homo Sapiens
ttttttttttttttttgtcatttgaaaagttcatttattatataccaatatacactttctgtaataaaaaagaagcctcccaatacattgagccatcttataaatgaaataagaaaataaaattttcatctgtttacaaatggggttaaattaatcagcacaagctatcatatgtatgtctgccctgcagtatatatgaattttaatcctggttatgaagaaaaaaatggtgctttattatttggcactataggatgctcttgaacattcagaagatacctttttccactttttatttttgtatactttttagatgagtgaaaatgtaaatatatcctaaagatgctatttggcagatttttttcaaataatagtagctcaaaagtacgtgtatgatacttgtacttcataattggctttactaaaatataaaatacacaagtgatcttactatgatttgaaaaaaaggtagtgaactccagaagttttaggctgtgagtaggaatttttaaatccattttatgtaagtttgttatagaagtgagcaagaatgatcgtgtgcatttcttcgtagtgttagcacttatacttttacggagaaccactcaacactgtattaaatggccaatgaatgtcagcaaacacctgtgtgagctaaactgaactaattcctattttagatatgctaaattaaaagaacaactttagtatgataaaaatttgcaaaaagaaacttattttcttgtagatcatcctattattgtaaatattgaagaagagcattgccaaactatatataacttaggtttcaaatttaaattatccccagacatttgtagacagatacatatgaatgggattttcgagcccaccaacttaattccctgcccccacccccaataatataaatgctttgactgtgaagaaagaaaactacacatgtaaaaaataaaaatcaaatgtaccttacattaacattctgatgactacagaataagat

SEQ ID NO: 471570 - DNA, 1000 bp, Homo Sapiens; identical to SEQ ID NO: 340914

SEQ ID NO: 471571 - DNA, 1000 bp, Homo Sapiens; identical to SEQ ID NO: 340915

SEQ ID NO: 471572 - DNA, 1000 bp, Homo Sapiens; identical to SEQ ID NO: 340917

SEQ ID NO: 471573 - DNA, 1000 bp, Homo Sapiens; identical to SEQ ID NO: 159698

SEQ ID NO: 471574 - DNA, 1000 bp, Homo Sapiens; identical to SEQ ID NO: 340919

SEQ ID NO: 471575 - DNA, 1000 bp, Homo Sapiens; identical to SEQ ID NO: 159699

SEQ ID NO: 471576 - DNA, 1000 bp, Homo Sapiens; identical to SEQ ID NO: 340922

SEQ ID NO: 471577 - DNA, 1000 bp, Homo Sapiens; identical to SEQ ID NO: 159700

SEQ ID NO: 471578 - DNA, 1000 bp, Homo Sapiens; identical to SEQ ID NO: 340923

SEQ ID NO: 471579 - DNA, 1000 bp, Homo Sapiens
tttttttttttttttttttttttttttttttttttttttttttttttttttttttttttttttttttttttttttttttttttttttttttttttttttttttttttttttttttttttttttttttcataaaaatgaatttttaatttcatgagcataaaaaaaaaacccaaacctgtcccatacccctcccactcatgcaaacagctctcaaatgagattcttcaaattttacgttttttccattctggctcattctttgcttcctcatcatcagattcaacttgggcaaacatggttttgggctgagtcttggaatatgctggagaaacccaatatgggctgtcttctgctgctttggcatgacgcaaaatggcttcccgaggattactgtcatcggtcttgtccaaagcaatgttcttcacaatataggaagagagagtgcccccgtgggttccaactcggccaccacgacctgggcctgctacaggaggttcaggtttatgcgacttcaggggatccagtctgtccttctccagctgtttccttgtactccgttggcggggctcacggaacataggcaaggcatgaggggtgatgatgtagtcctgagttagagtctcagcttgttttgccttccgctgggttttaaccacacataattttgctcccctctgactcttgttggggtcgtaatagactttagccaatccatttccagttccaaccatgatctggttcagctttggatgccacaggcagcgaacaacactcgcatctgtgatgtctatttcatacaccctttggaaagtcctacgctcaaagaaaacaagtttgccgctgccacatcctctttgaatagatgtaccagtgactatgagcttatcatctggactgaaacagcagtcagtcattgggaacatggtgggaagacccgaggctgaaaaaagtggtttattaaattgtcggatgtcccataattttaatgaatcgtcacctc

SEQ ID NO: 471580 - DNA, 1000 bp, Homo Sapiens; identical to SEQ ID NO: 340925

SEQ ID NO: 471581 - DNA, 1000 bp, Homo Sapiens
cccttgagacagagttttgcccttgttgcccagctaaatgaagtgatggtggatatgtaataattatacatctatcaagactagtttggtaacttaacaaatctcagcaatcccttactcccttcataacagaagtgcgcagaatacaacttttctaagagagtatctaaggaaaatgttaaagtgaacaactgaatctaagtcttctccctgacagaaatgcttagaaaggagtaaaagggagcagcattgtggcattactctagactcagggaatccctgcaactggtggaaaactcctactcaaaaagatgtataaacatgtacaaggatgttttgttcttgatagtaggggctaaaatttctggacaccatggtagagctgctgttacagagaaactaagtgccatggatctgtggtttcaggtgaagtagaaaaagaatgaatttagaaaattggaggttcacgttagaaggttgtgtgttctgaacaaaggaatgaatgtctgttgaagattttatatggtgtgaatccaagccacaaagctgagctgggatccaattagcttcaatagcaacaaatctgatttgaagtcaaagatgaacctgtggttttcatcaaaggtaacttactttaaccaggaacacagaaaacatggagggtgagctcagcttgcacctaatgagtttatactcagagaatattacaatctaaatttatatacacgtcatttgcttttacgcaatcctctaagacagtggtcctcaacattgactgcacactagaatcatgctagggcagtgctgctcaaattttactgtgcgtaggcaccatctggggatcttgttccaattcagcaggtctggaatggaacctgagtctacatttctaacaagtttccaaatgatccccatgtagtggtcctcagaccacaacctacatagtatatcaagaacctagagaacttttaaatatagttttctggatcctactcctgaa

SEQ ID NO: 471582 - DNA, 1000 bp, Homo Sapiens; identical to SEQ ID NO: 340926

SEQ ID NO: 471583 - DNA, 1000 bp, Homo Sapiens
ctggtgataacaacgatgaggtttatttttgtcaaaacatccaagggaaacattaattgttgtttgtcaactgtgaacttcacactacattgtctaaggatagaaaattgatgggtatcactctgtcagaaaatcctcaccaagaagccaattcaaggaatatgaaattgacaagcctttcaaacaaagatgtgttcggacttcactgatgcgatggtaggtcttttgggttacaatagatagggatgatataaaacacaatcttttcctgtctattccattttagaaactggtgggtgtgctcacgtttgtctgggcattgcagcactgcacacatacatgaattaagcaaagcatcggaaagtattgacacatgagactaaaataaataagagaaacgagctgctctttatacctagaaatagctggaaattactgaaaaaaattaaagtgcagaggttttcattttagcaccatgaattgtgatgaaatcccatttctctcactatggcaggactgtatgcagtaaggaagctagagtgatgtgtttgaggcaatgtagatttttgcttcaaaaacagaagtcatgttatcattttagaacaatgggacatagtgaataaagtctgtaaaacatttcttctttgcttttcttaggcggattttcctgcattgggggtagtagttgcggaagtactttttggtagaggaaatccaagtcctaatccctttggcctctgcatggcttgaattggctcagagatccccttgccatctcgtccaaggcctgacccaggcgtccagcccatattctgaagcattcggtttccaatattattttctaggattggctgggcattttcacctacaaatcctgcagtagtaggtccaggcaaaggtgcagcttttcttctccgtttgatatctcccgtgcataaggatcctaaatgcatgcttgtttgcctgctggctgttctcacagaacaatttttcttgtgtc

SEQ ID NO: 471584 - DNA, 1000 bp, Homo Sapiens; identical to SEQ ID NO: 340927

SEQ ID NO: 471585 - DNA, 1000 bp, Homo Sapiens; identical to SEQ ID NO: 340928

SEQ ID NO: 471586 - DNA, 1000 bp, Homo Sapiens; identical to SEQ ID NO: 340929

SEQ ID NO: 471587 - DNA, 1000 bp, Homo Sapiens; identical to SEQ ID NO: 159702

SEQ ID NO: 471588 - DNA, 1000 bp, Homo Sapiens; identical to SEQ ID NO: 340931

SEQ ID NO: 471589 - DNA, 1000 bp, Homo Sapiens
atttcaagtggtctctttattaaggaaggaggtaaaaggaacataacctgagcgcaataaatatctagtttcatataaaactagtattatacaaaattcagtttctaatgatcactgtccatcagcaacttacaatcaaataaaagacagatcaaagtataagaaaattgtagacggtaatattttcctaatgacctagtctcccatcttggtttaaatatgagaaattctagtagatagtggggatggagctaaataaacgaaaacgtaaggaagttagagaacggggacaaagacttaaagatttttcaacgtaagcactatttctcctcaaccttgttcagtttttaatggatcatcttattcaacaggagccacaacctgttttgaggaacaaccaacaactgtgggcctactggaagttcaaaagacgattgttcctgtttctgaggttgacatctaaatgcaagaaaattacaatacgatttcatactgcacaatcatcaaggtctacaactggaacagaaacattttacatacaaaagacctgaagatgatagcgtacttgcataatgaagtggaaatcatttgactttccatggcaaacctgaaggcaatgggcatgcattttgaggagtgaaaaggaccatctagtgctccatggcaaacaggttaccaagccatgctctagagctatactgtccaaacggtagccgctagacacgtggctatctaaatttaatcaaaattaaatagcactacaaaaaaagtagtttattggcaccaattacaccagttaagtgaaaaaccaagatttattataatagagatattacagtaaaaaagatgttaagtatagaatctaggtaggggtaggcatataggtgttcactttatagttctcaagagttttttatgttttatccttttcacgttagaaaaaaattgtttaaatagcaccataaattcagttatacaaggcacacctcaagtaatcagt

SEQ ID NO: 471590 - DNA, 1000 bp, Homo Sapiens; identical to SEQ ID NO: 340933

SEQ ID NO: 471591 - DNA, 1000 bp, Homo Sapiens; identical to SEQ ID NO: 159703

SEQ ID NO: 471592 - DNA, 1000 bp, Homo Sapiens; identical to SEQ ID NO: 159704

SEQ ID NO: 471593 - DNA, 1000 bp, Homo Sapiens; identical to SEQ ID NO: 340936

SEQ ID NO: 471594 - DNA, 1000 bp, Homo Sapiens
tttttttttttttttttttttttttttttttttttttttttttttttttttttttttttttttttttttttttttttttaactagacaatggctttattgttgtacagctcattagcagagaaccactccagtgagcctctggacaaggccagtagattgccactggccagccagaaagctgtggggctcccccaacccagcctgaggcaatgagattgacggactctttttaatctatacagtgatccttaatctttggggagggggacaggtcacacacagactactttggagaatacatgaaagctataggtgacttcatcccacctccaaaatacatgcacatatgtctcaactttcacatacagtttcggggggttcacaggtttttaaaaaatccagtaaagaactcatgcacttgtgcttttccttgccactgtcttttcagtaaagagaacatccagccagccccctgcacaggcttcttcctccctcttcctgacagcagcctctgtgcttggccagactccactgagcccttcatttacagagtgggcagcccctcctcttcagttctggtgggcagagcaactttgcccctctctgtttctccttactggattagatggttatcatgtcttccaggagtttcccagccttccagagtgcaggcaaatccagtctccctccaggatgtcatcagaggcacccacattcttccacgatcatgtctttatggtgatctaggagcactctgccattatccacatacagcatgctcagcggcttggtcttcactggggcacaacaagtggaagggactcggtggggctggtaacgtttcagcagactctggatgtatgcatggttggtcggatgaaactcctccccaacaggattaggacactcgccctcacagcgataggcgttgtactgcttggggtagatgatccaggagccccatccgatcaggttgaagtccacctggaacttgacctt

SEQ ID NO: 471595 - DNA, 1000 bp, Homo Sapiens
gttgggagtataaaaataggacttttttccttatcacatcaattatcaaagaaacagtacgtaacaaaaatacaaagctctggtggatttttttgtcttttgtcccccccaccaccacttctacccaacagccccttgccagggagcccttggctgaagcctggacgctgtccctgaggtgaccccagggctcaggagaaacggtggtccaggtctctctgggggctagcagagtatgagtaggccttgcccaataccaagcggtcccggagcagcttgaagaaggcatagtagttgctgaagaggatgagggccagcgagatggtctggtgccacttttcagaggacattagggagtacagctgatagacaatgacagcgccctccagcagcaggaggatgttgaggatccgcaggggtttgctgaaaaagaaatggaagcggaagtgggagacgtcagaggggatagccacgttgtagtggcctacggctttgtagacgttcttgctgtgcttcaccagcacgccctgcggccacatgcattcttcagtccacgggtgctgcagcacgttggagcacagcgctgggtccaccttctgccaacagcccagatgggcggcggccttgtgcagcaggtcacagtagctggcaggcagcaggtgctgcatgaggatcacggaggtgctgatggacaccagcaggaagagttcacaggaccagcgcttgtcatagtaatgtgtgttcttcacgaaccagacaggcacaaaggccacatagtaggcgctcagcatggagctgacgagcacttccttcatgcgccagttgaagtccatcttgaggaactccacctcactgcggatgaggctgggtgacaggcagcaggcatgggtgggcatggcgtccgggccatacagctgtcttgtgtgctgcttccacgtctcccgcagtgtcaggaggtagtcccggctctttgccaggccactgaccgcctcccggggcc

SEQ ID NO: 471596 - DNA, 1000 bp, Homo Sapiens
ttttacatatgaaaaatgtttattataaacataccttcagaatgtatcattctttttgaaaattctgtagcccagttttagccctgtctatcatgtattggttgcttaattctggccaactatttattttccctgagcttgtcaactttgcagtaaaatggggataaaatatgcaaattatctagctgatagaaagaataaacaagataatgtatgcatagtatttagcatagtagtagtaacaacaggaaagtagtcagagtagaaaatactaccttagagttaaaagcaagcttggggcttctcatttctgtcctacatatttgagacagtcatccccttaatagattctgtaactagggcacatgctacctctgtgtgaccacctccagtgatgctgagctctctaccattgaggcaactgatttcattattatcaagtttgattcttgaaaggcctttctttctttgaaggcttaccaccatcacaacctcctccataatacccactatttgatcatagttttgctctctatggccacacaaagcagccctattcttcttttggtttaactatttgaagactttgatcactgagctgaaatttctcataataaaaaggaaaatacaagatttcagtaaaatccagtattgcagatgtggtccaactgatatgtgcctacctagcccaaaggacaatgtccctatcatacccctcttttaattcatgcagtttccacttagcattttggggtatatgtatatgcatgtatgactgtgtgttttgaccaagcacatcaccagctgactcattcttcttttagctgctaaatcctctaagttgtttttccatgtgctagccttaaacaatatttctctcttctgtacttgtgacactgtttatttggaggcattttctgtttagtaggtaaacacaaagcttaacctttaattcctcataaagtcattgttattatatttaactcattgtttcagattg

SEQ ID NO: 471597 - DNA, 1000 bp, Homo Sapiens; identical to SEQ ID NO: 159705

SEQ ID NO: 471598 - DNA, 1000 bp, Homo Sapiens; identical to SEQ ID NO: 340937

SEQ ID NO: 471599 - DNA, 1000 bp, Homo Sapiens
tatttttccagaatgcctttattttcagtatcatagaatttaaatacagagtcaaaagatgatttataaaatataaaacattttctgcttggccgtatttgaagacaagctgaatacatatctatgttctgaataagtccactatggatatatataggaagagatatacatatatccatccacagatacacacacacatatatatttctgcatgtatatatacataattctttctatagttacaggaaatacttcttctataattctgattttgactcccatcctccaccatttactcatccactcattacctaaatcttggctttctttcctatattgtaaataatccatccaaacttctagccagtactgtcaggagggttcttgctcgagtgagctgttaatactattttccactgacaacttctgcacatcgaggacacagtgtatctgaagactccgctgtatacttccaacaacgggggcatttttctttcgtagtcggcatgacaattactttataggaagactcttcacgaatatcaccaccttctaagttgatgaggaatttccctttaagctcgattacatctgcagtcatctctcgtggttcctgagccagtaaagttgactcagaagccatcattaattcattcaactgagaggtgctggaagtctcttcagactgcagcatctctattatctcaaaaagcagtccaggttctatcacagtgataaccttgtactcagctgcatttttgccagggatgcttccaagaaatgagtctcgcattgcacacgcactctccacagcttcttccaacccgggctttttccagatagaactagtactaatccacccagtacggaaaacactcttgggctctttaatataaggtatgtgctggaacacctcttcagccaggtgaggaagaatgggagcaaaagaacgaactattacatccaaaatttcaactaatgcagtctgacaagagcgtcg

SEQ ID NO: 471600 - DNA, 1000 bp, Homo Sapiens; identical to SEQ ID NO: 340938

SEQ ID NO: 471601 - DNA, 1000 bp, Homo Sapiens; identical to SEQ ID NO: 159706

SEQ ID NO: 471602 - DNA, 1000 bp, Homo Sapiens; identical to SEQ ID NO: 340940

SEQ ID NO: 471603 - DNA, 1000 bp, Homo Sapiens; identical to SEQ ID NO: 340941

SEQ ID NO: 471604 - DNA, 1000 bp, Homo Sapiens; identical to SEQ ID NO: 159707

SEQ ID NO: 471605 - DNA, 1000 bp, Homo Sapiens
tttttttttttttttttttggcagaattattctttatttctggagacatttaatcagatgcagtaacactgattccaggcgagggcagggggcatgggtacccctgaagcaaccagtatcctgtggcccaaggtgtcccccatccccagacctgggatccccctcagttacagttaaatagagagaggaagatctccccagggggctttggggggagggtctgcctcctgcacccaccctctccacgcagaggagtctgagcacaagctatttacagtattcacatccactgtaccccaccaaatcaaggcaaatactacaggtggcccctccccaagggaagaggccagagaggctgtgagtgtatatgtgtgtatgggggagaagggatgtctgcgcgtgcgagcacacgaatgcactgaggggcagatctggctccggccaaagagacatcagtctataaggtgcagattaaaaacaacagagaggacccacccccaggggcccaggccacttccatctttgttctgtctttttctcctccagacatcctggtaggtgatgcagaggagccctcacaactgtgcccggatccaaggcaaaccctcttaaaggacttctgtgacctgcggggactgcaccacagctttcttgaggaaggcttctgcctctgcaaagggcaggagtgtctctggtgttcggctcagactcttgtccccagagggtccgttggtggagaagccattctcctggtgtgctgggagaggctgcaggccattcaccagggacgctggcaactccttgcttgggagactccactgaggctcctgtgggatgggctcctctttctgcacagcctccttctgcagccctggggaccgagcctccacagctttcacaggctctgggctggaaccgttggcgwtygcgctccttgctgtcctgcttcttggtttcagaaacttctgacttccgagtcctcttcatgatctcctccaga

SEQ ID NO: 471606 - DNA, 1000 bp, Homo Sapiens
ttttttttttttttttgagacagagtcttgctttgtcaacaggctggagtgcagtggcgtgatctcggctcactgcaacctccacctcccgggttcaagcgattctcctgccttagcctcctgagtagctgggactacaggcgtgcaccgccacacccggctaattttttgtattttagtagagacggggtttcaccatgttggccaggatggtcttgatctcctgacctcatgatccacccgcctcggcctcccaaagtgcttggattacaggtgtgaaccaccgcacccggtctggaggtcttaatggtcccccagagtcacccgctccacctgcagagtggcagtaccaccgtaacttgctctacacaggcaacaaggccattttcagctgttactcagaaacttgcttcttggtgatattaggtttaaaagacaagaaagaaatcttattctacagggttggagaaagggaaaattataacacaaaagcccacttcagtctctgttgattctgcaagagtcacagctgagttctgaggccgcctttcttctcaccagcccatctccaagctgtgcagtcacaggaagaacaggttctcgcacagctggatggctggttcatgatgcaagatgtgtcctgacaggaaagctagcttgtgggcatacttgcaaggagctggaactctgatggtgccaggccaattccagtacatgtggcacagtttgaaagtcagcctctgcatatgatcagggctcaggtttgcggtgttgagaacacagacataatgcgtaggaatgccacagccctgccgtacatgatgggcaagaagatagaaatccacccactcacagcttgttattgtatgatctaccacagttccaggagtgggagttacaaagttctgaggagcagccagatatagattagtactgattttcttctgaactacaaacaccaccatcttgggctgataattctcaaaagcttcaaaacact

SEQ ID NO: 471607 - DNA, 1000 bp, Homo Sapiens; identical to SEQ ID NO: 340943

SEQ ID NO: 471608 - DNA, 1000 bp, Homo Sapiens; identical to SEQ ID NO: 340944

SEQ ID NO: 471609 - DNA, 1000 bp, Homo Sapiens
tttttttttttttttttttttcatggtggacagaatgcgtttatttctccagtttggcctattttaactcctacatacatgaacagccaatacaattaaagtagaaacacaatttttaatattccttatcacagccatttgaagctcctttctgcccaaaaggtctagactgccagcagaggccctgagacaaaggcactgctataagatgcagactgtatcatggcacagtgggaaagtcaccatgtgcaaaatccacggcttgcctgcctctatgcctcagacaggaacaaatcatgggatggatctgggatctatacaacagctccatgaggcaggacaatcatatgaggttttatgctgaattacacccattttcccaatgaggacacataaaacctcccaaacatgtgagaagtttcagacccaaatataataagtgatgtataggcatgtgacctgcgaagtgagtttgtcaaccttgtttcacttgagtgtgaaaaatgctttataattttgataatcttaccttcagcagctttgtaagaaataacttgctccaggggccgggcgcagtggctcatgcctctaatcccagcactgtgggaggctgaggagggcggatcatgaggtcaggagatcgagaccatcctagctaacatggtgaaactccgtctctactaaaaatacaaaaaaatgagccaggcgtcgtggtgggcgcctgtagtcccagctactcgggaagctgaggcaggagaatggcgtgaacccaggaggcagagcctgcagtgagccgagatcgtgccactgcactccagcctgggcaacagagtgagactccgtgtcaaaaaaaaagaaataacttgctcccttaaggccatttcagtttcctcattcataaagtgaaaatacaaactaaagctcgcaggttttctgatcctgccacttagagaaaaaaggcaagactaggacactggtctcctggagtccaagggacagt

SEQ ID NO: 471610 - DNA, 1000 bp, Homo Sapiens; identical to SEQ ID NO: 340946

SEQ ID NO: 471611 - DNA, 1000 bp, Homo Sapiens
ttttttttttttttttttttttttttttttttttttttttttttttttttttttttttttttgcctttaatagctcagttactattgtttatgttgataaagggtctgttaatgtattgcaaaagagaaccaggaaagaggtccagtgtgggaagcactgccttactgtaccccgctcactctcaactgaggctcctgtgatgagcacagtgggcacacaccccatccccaacctgtccacgggtccctgggccatggtggggttgggagtgacactgctatgaggggaacgtggagagctggtggctcactcatggtgagaggctcaagggcggcagtggctctgcagcaaagttggcagctggagcagcgtgtggggcccgggaaggaactgggaaggagcagacagggtggggctgggggaactgccaaggatcccgagccaagccactgcgaaactgagaagggtgcttgccacatgggagccacttcgtttggctaagcattgggtctgggttcaggagccacgatgctgccccgggtaccccccctgccaccgtggcaggtgtggcacagacacaggcctctgccaacagggcagctgggcacgctgggcactcaggttgccttctccttcccgctttccattggttcctccttcaggttctcggtcacgagcttcatttgctgctgcttgagtgcctccaaagactcaaattccagtctggctagtttcatctggatatgccgtggcttatcaggtatggcaaatgcaagtataaactttaaagccaggagtgcgtgctccactgctactacaatcaaaatgaggtctgcttttgattctggaaaggctgcattcacttgtggtgacattccaatcagcgcacagttagtgaccacagatataacactcatcatttcaaaagccaactgccacacaccaatattggctgaaggttctgagaatggacgtttgaagaccctgcacatttttaag

SEQ ID NO: 471612 - DNA, 1000 bp, Homo Sapiens; identical to SEQ ID NO: 340947

SEQ ID NO: 471613 - DNA, 1000 bp, Homo Sapiens; identical to SEQ ID NO: 340948

SEQ ID NO: 471614 - DNA, 1000 bp, Homo Sapiens; identical to SEQ ID NO: 340950

SEQ ID NO: 471615 - DNA, 1000 bp, Homo Sapiens; identical to SEQ ID NO: 159708

SEQ ID NO: 471616 - DNA, 1000 bp, Homo Sapiens; identical to SEQ ID NO: 340952

SEQ ID NO: 471617 - DNA, 1000 bp, Homo Sapiens; identical to SEQ ID NO: 159709

SEQ ID NO: 471618 - DNA, 1000 bp, Homo Sapiens; identical to SEQ ID NO: 340954

SEQ ID NO: 471619 - DNA, 1000 bp, Homo Sapiens; identical to SEQ ID NO: 159710

SEQ ID NO: 471620 - DNA, 1000 bp, Homo Sapiens; identical to SEQ ID NO: 340957

SEQ ID NO: 471621 - DNA, 1000 bp, Homo Sapiens
ttttttttttttcatctttttgagaattttattcacttcaaaacaaattcaacacacctatttacaaagggattccagagcccacttttcgaggctgaggaaagaccccgagagcgctttgcacagcgcgcttcccagcgtcggaaacactgctctcagggcggggcacagcggaagggctgcacctctcagggttccctaacttttcccttattcagtcgtctagagagcaaatacacagtaattcccccgtttcctattgacgtcccagcggaagtctgactcctgcgcgtcatgcagtttctgaggcaacgaatcactggcacggaagcttttcctggcgcgtttccagagaaccatgcgaactacaatgtccctcaccagaattcaacgtggcagagtccctgcatctgctccctgcctggcctgggctcccacatccacagaagggccacagccggggagcttcggagtcaccgcacagagtctgctctctgctctgtgctcctcagtcccacagtcccctccaagtcacgggagctggaggccaaggagcccctgccacctgcagtctcactccaggtcagaatcgctgtcctctgaggaggagggaacctgaaggtcctcatagaggacgcttggtgggacacgaacacagggaccctcagacttctctgagacatgagggctctgagcgaggaaggctcccggcttctcaggagagtgaaatgagggggccgtcagcaggctggagctccagcgtccgttttccagtctccgaaagagcactctgagaggctgggccccatcatggctggccgctgggtgatgggacatggtgcaggcctgggcagtaggcaggcaaggtctgctgtgcggaggctgccggtcgccgctaagcacctgggcgggtgtcctcgtgcctatctggggtgacgtacgtggtccaagttcggttgcggctggcggaggttggagattctccggggcccccagctca

SEQ ID NO: 471622 - DNA, 1000 bp, Homo Sapiens
ccttgccaaactttattgtgattaaaattccagagacagtaccagctccacatacctctagccctgtctttgccctagttcccgagtgtccttcacccccatcttccaaatcatctctggtttcacggggaagaaaaaacctagggctgctgtgaatgtgccctctcaggtccctgagttggccccaggtagagctgtaagagatcaggaagagggcctccctgcctgacggcgatgatcctggaggcaacgtgtggagcagaaagagaagtcgaggtagtgaaagggagtcaggccttggagggatgccccacaactccagcagcgtcgagtattgacgattgcagagtcagggattggagaggtaggggctcccaactgggcagcgagtcggcgctctgcagccagagctctcttctctcggtcactgagggcggcaaatcgccgctgctcttctcgttcacgctcctcctgctcctgctgcctctgctgctgttcctcccgttgccgccgggctgccttctgctcccttttccgtgtagcctgccgtgcctccatttctggtgtcaatggtcctggcacctgagccttgttgtaatcgtaggcatctggattcttctccatgaaccttcggaactcattacgtgttgatttgtcagccgcaacagtataaggtggccgggcccgagagtcctgcacagtggggtcagcacctgcttccagcagcagacgaaccactgagcctcttccagctgcagctgctgcatgcaggagagtaaagccaccggagcccaagggggcactgagcagagacagaactctagggtctgcagggctgggagctagctgcagctttagcactccaacatctccagctcggcaagcagcaagcagtgcattccagagctctggctgaccaggggctttggcctcatccagcaaagggcccaagggggcagcaactgcctgggatgactgtgtggaaggctcctcttcttga

SEQ ID NO: 471623 - DNA, 1000 bp, Homo Sapiens; identical to SEQ ID NO: 340958

SEQ ID NO: 471624 - DNA, 1000 bp, Homo Sapiens; identical to SEQ ID NO: 159711

SEQ ID NO: 471625 - DNA, 1000 bp, Homo Sapiens; identical to SEQ ID NO: 340960

SEQ ID NO: 471626 - DNA, 1000 bp, Homo Sapiens; identical to SEQ ID NO: 159712

SEQ ID NO: 471627 - DNA, 1000 bp, Homo Sapiens
ggagatggagtcttgctccatcacccaggttggagtgcagaggcacgatcttggcttactgcaacctctgcctcctgggttcaagcgattattctgcctcagcctcccaagtagctgggattacaggcgtccaccaccatgcccggttaattttttatatttctaccagagatggggtttcaccatgttgtcaaggctggtctcaaactcctgacctcaggtgatccacccatctgggtcggcctcccaaagtgttgggattacaggtgtgagccactgcgcccggcctaatttttgtatttttagtagagacaggtgtttcgccatgttggccaggctggtctcgaactcctgacctcatgatctgcccacctaggcctcccaaagtgctgggattacaggcgtgagccaccgtgcctggccagaaacacacttcttttttttgagacagggtcttactgtgtcgcccaggctgtagcgcagtggcgtgatcatgactcattgcaaccatgacctcacaggcttaggtgatcctcttacctcagcctcccgaatagctgggactacaggcatgcaccaccatggtcggctaattttttgtttattttgtagatatgggatttcaccatgttacccaggctggtcttgaactcctgggtttaagtgatctgcccgcctcagcctccccaagtgttaggattacaggtgtgagccaccacaccagacgataaacacacatttttaaaaaaagagaatttcccacctgagaaatggttaattcacttatattaataaattgtcatggctcttttttagcttctctagttttactgaaaggtagaataaaaatatatgaaaaacaaaggaaaagtcagtttggtcttaatgaacctgagatcttgatactccaatataaagcaggttctttcagtattaccagcagcaaagactattaatacccatgttacagtcaactagaaatagacttcatatgactaca

SEQ ID NO: 471628 - DNA, 1000 bp, Homo Sapiens; identical to SEQ ID NO: 340962

SEQ ID NO: 471629 - DNA, 1000 bp, Homo Sapiens; identical to SEQ ID NO: 340963

SEQ ID NO: 471630 - DNA, 1000 bp, Homo Sapiens; identical to SEQ ID NO: 340965

SEQ ID NO: 471631 - DNA, 1000 bp, Homo Sapiens; identical to SEQ ID NO: 340966

SEQ ID NO: 471632 - DNA, 1000 bp, Homo Sapiens
cactctgttgttgagatgaaaatcccctgggggagagaggagaatagagggggcataaaagagagcacagccaggcactaacgcgcaggcgctgagtcaatgagaccctcctgcacatcacacaggtcagagacacggccgcaagcccctcctgtccacatgcccagagtttagagacaccaaggtctcagcatcacctagaacctctgagaagtcatctcttgatccccttgacaccaggacttcagagatgcccggtttcaaaagaagacaagcaagggggattcctcagtcaacacccattttcccctctctcccttgcccaccgaaagtgatttataagcacagcagaaatcaaaacaaacaagccatttttttttgcttggaaaacgaggatccacatgtgtaaataaacgggaactacagctcaaaggcagtcatacacttgtcattcttgtttcttcctctcatgacatggaaaggcaggtagaaagatctcttgaaggttgctccgaagcccatgggagtgaatgttccggtggacttggggctctgctgacggaggccaggccacaaggggacaacgctggcaccaggcccagtcacctctgtaccactcgttagtagtctggttggtggccgccagatacaggacaaacaacaggtagccacccaggaggaagctcagaaccacgacaaagcccagcatgaagacaatccgtggaaaagtcaggaacaggtactgaataagaaagaccgtgtccataacatggaggtgtccaaggtcatcgatgtaagtctcctggtataaatctgacatcaccaccaagtggaccagaaaagtggtgctcacaatggcgacggtggcagccgaggccgtcaaggtcaagacgtagatgaggaagtacctgatgttccaggccccgatgcagttgttcacccaaacacagtgatggtcgaaacggtgcacacaccagttacacacactgcagtgcttgga

SEQ ID NO: 471633 - DNA, 1000 bp, Homo Sapiens; identical to SEQ ID NO: 340967

SEQ ID NO: 471634 - DNA, 1000 bp, Homo Sapiens; identical to SEQ ID NO: 340969

SEQ ID NO: 471635 - DNA, 1000 bp, Homo Sapiens; identical to SEQ ID NO: 340971

SEQ ID NO: 471636 - DNA, 1000 bp, Homo Sapiens; identical to SEQ ID NO: 340973

SEQ ID NO: 471637 - DNA, 1000 bp, Homo Sapiens; identical to SEQ ID NO: 159716

SEQ ID NO: 471638 - DNA, 1000 bp, Homo Sapiens; identical to SEQ ID NO: 340975

SEQ ID NO: 471639 - DNA, 1000 bp, Homo Sapiens; identical to SEQ ID NO: 340976

SEQ ID NO: 471640 - DNA, 1000 bp, Homo Sapiens
ttttttttttttttttttttcagtttgtgcgtgtcacttgaatcagaaaccaaacacatgtaaaaaaatatcatcctcaatgccccccattaactctctctccagaaggtgacaatgttagtgaactcaagactctcactgatgatggtattttacaatgaaaacacaaggaaaccctttgaggtccaattttcacatcatattctccaaatagtaaaatagcagctctacatgttgatgaaaagaaatttcaatttcttcctatttgtttttactcatatcaacattaatatgtatctggatttattaatttccaaaaagaaaattttagttaccaaatatttcagaaatttaataaagcattacatatatgtaattagcacttatctaccaaaaaaacatatgtgtatgtatttatttatcttaccttcactgaagttcttttttctggctggacatgagaaacaggattaagtgatcaatgctggctttatttcttcataagcagtaatttgggtctttttcattcaacacaacgcagcattttcataataaattcacaaaagacaatacaaagaaacacctactgaatagaactctgtcgagcaattcatgttttaaagttggactctataccaaactggcattatggtattataggcatttgatttttgttttcttattttcagtttgtcagtttctttactaccattatttttttctagccggagataacgtataatcacaaagtaaggcctagagaccatttatagttgtttgcaatatcatgatcacattaactctcaagaattgatataagccaaagtgaaaagaagtcaactagaaccacatttggtcacattcaaacagtctccaaaaacacttcactaatatacatgtttccttcttgactgattttgtgttaattttatcaaaattataatgaataaggctgcaaaatttttgtagagttgtttttctaggggactactgtgttcaa

SEQ ID NO: 471641 - DNA, 1000 bp, Homo Sapiens; identical to SEQ ID NO: 340977

SEQ ID NO: 471642 - DNA, 1000 bp, Homo Sapiens; identical to SEQ ID NO: 159717

SEQ ID NO: 471643 - DNA, 1000 bp, Homo Sapiens; identical to SEQ ID NO: 340979

SEQ ID NO: 471644 - DNA, 1000 bp, Homo Sapiens; identical to SEQ ID NO: 340980

SEQ ID NO: 471645 - DNA, 1000 bp, Homo Sapiens; identical to SEQ ID NO: 340981

SEQ ID NO: 471646 - DNA, 1000 bp, Homo Sapiens; identical to SEQ ID NO: 159718

SEQ ID NO: 471647 - DNA, 1000 bp, Homo Sapiens; identical to SEQ ID NO: 340983

SEQ ID NO: 471648 - DNA, 1000 bp, Homo Sapiens; identical to SEQ ID NO: 159719

SEQ ID NO: 471649 - DNA, 1000 bp, Homo Sapiens; identical to SEQ ID NO: 340985

SEQ ID NO: 471650 - DNA, 1000 bp, Homo Sapiens; identical to SEQ ID NO: 340987

SEQ ID NO: 471651 - DNA, 1000 bp, Homo Sapiens; identical to SEQ ID NO: 159721

SEQ ID NO: 471652 - DNA, 1000 bp, Homo Sapiens; identical to SEQ ID NO: 340988

SEQ ID NO: 471653 - DNA, 1000 bp, Homo Sapiens; identical to SEQ ID NO: 340989

SEQ ID NO: 471654 - DNA, 1000 bp, Homo Sapiens; identical to SEQ ID NO: 340990

SEQ ID NO: 471655 - DNA, 1000 bp, Homo Sapiens
tgaaggtcatggggcacaaggctgcaattcttttaatggtgatgacagtaacgtaagtctgatacacaagcattatgtattcaacacactgatacctgatagcatgtcaggaaaaaagaataggcaatgcagtttaaggggggaaaaactgagaagtcataactactccaaagatgtgcaggaaaccacaaaagacatggacctgcttctactataaaaagaaaatgaagcacttctctggggttgctataccaactgtttcagcccattgtagtcttgcctctttcagggctttagccactatttcatttcatggaaaagcagacatctcctaacaaacagagtgacatttaccaaaataaagagggcttctcagtgagaagcttaataaagaaaaatatttacctatgctttgcacaattttctttttttttttttttgagacggtgtctcgctctgtcgccaggctggagtgcagtggcgcgatctcgtctcactgcagcctccaccgggcccgggttcacgcgattctcctgcctcagcctcctgagtagctgggattacaggcacgtgccaccatgtccagctaatttttgtatttttattagagacggggtttcaccgtgttagccaggatggtctggatctcttgacctcgtgatccgcctgcctcggcctcccaaagtgctgggattacaggcgtgagccaccgtgcctggcctgctttgtgcaattttcaaaagccattatttctattcaattttgggtacttaactacagtgctggatgtaaagtttatgcagtaaaagcttattgaatgaatgaatcataggataaataatacaactagtaatttcttaagatcataaattccattacagtaaccctggtaggcaactctataaagttctgggctccaagaagaggtcagtgcatgccataaatgtgtttgatctgctgtgaagtatattcagtcttcaaaatgtaatgcttacatgag

SEQ ID NO: 471656 - DNA, 1000 bp, Homo Sapiens; identical to SEQ ID NO: 159722

SEQ ID NO: 471657 - DNA, 1000 bp, Homo Sapiens
cttttttttttttttttttttttttttttttttttttttttttttttttttttttttattttatattcttttctagaacaaccaatctttattagaaagttgtagtcacgtttacaataaatatcaacaatataatgaaaaagtagaacaaattagtttccaaatactgaactcctgtaaccaaaacacattttggatttgggaaaacacagtaaacacataccaaaaacacagccacaaataccaaaaacaaaaaccagctcaagtataggattgaactggctggaaaacacttattgtgttactgccttaagaaccccacggagcaccttgtagctcattaactgcacattttccttaggggggaaacaaggtcctctctcagtcacatatgcataaggaaatctcaaaacccaaaggccatcaggtggaagggtgatttcttgtttttctgggtagaataccggacatggtggtgggcctggctgaacctgaggcattagtattatctgcaaaggagcatcaggaaccacaacaaaaagcctcataagttgagcataatgaggtttcagccctctaccttgagaggatgacagaatatataagggcatgtcactatttagggcttttaaagctgattcctttggcccacttcccattactttcattactttgtcaggcccagagcacatgaatctccgacctcgagagtcttcatattcaaagcccacaaaagctcgagctatgtcatctcgccgtcttcctcttcccattacaaccgcacttctctttccaggaatagctttatttggagcaggccaagagtttgtgtctaagtctccttcatcttcagctctagtcctgatgacaatgtcccaaggcataagataatttgttcctggaataaagccctgttggtccaaacctgtatgaaagttataagacttagcagggcctagtttaaccaaagaccagctggagaatttgggtaggagacctt

SEQ ID NO: 471658 - DNA, 1000 bp, Homo Sapiens; identical to SEQ ID NO: 159723

SEQ ID NO: 471659 - DNA, 1000 bp, Homo Sapiens; identical to SEQ ID NO: 340997

SEQ ID NO: 471660 - DNA, 1000 bp, Homo Sapiens; identical to SEQ ID NO: 246527

SEQ ID NO: 471661 - DNA, 1000 bp, Homo Sapiens
tttttttttttttttttttcaatcaacatggcctttaattttaacaattttaacagcaagtggtggggggagttctcagatgagcaactggagctggaagcacttctgtggtcaagcaggcagcccatggggttgcatcttcctgttgggggatcatccattttcttcaatgaatagttttaagtcttgtcaaatgctcacacagaggcccgctattaaggaggcagacaggcaacattcaatacgaaggcaggacaagctcagccccgctccttcattcgggcatgtgtcattagggatgacattctctgaaggctgcccggcttgaatggccaaatccctgcatcatggctttctttaattccctctgctcccaactcacaaaatgaggacctctcttttaagacgagaaggcactgttctcaaaggtatacatttggaacttcaataatgaaagcatctcttgcttggcaggtggaatataggcaattttggatttttaatgcatggcatggggcgggagtgaaatatcttgccagggcttgtttgccctataatgggagagaaccaggcctctggatgatacggtatcaaacactgctgctcctttctgttttcttttgtgggaaagggaggaggatagaatggagaggaattagtgggagcctgggggaagttcaaaataaagaaactgtgaaatcctccacctcaaagttgggtctgcaccaggattctgcctgatgcccaccgcatggagtgattatgtagccaataaagtgcctccagtaaggtcttgaaaactgttggttaaggagggaacgtttcctgtccctcctgatgtttctttccatgttggggcactcagtgtgcgtaactccaggcctgtctctgccctccactcattcagtaaataaggaaagtgtaaaccgagcatgtttggctcctctctccccgttttcaggagtgtgctgtccggagggagcaggcggtattctctgct

SEQ ID NO: 471662 - DNA, 1000 bp, Homo Sapiens; identical to SEQ ID NO: 159724

SEQ ID NO: 471663 - DNA, 1000 bp, Homo Sapiens; identical to SEQ ID NO: 341000

SEQ ID NO: 471664 - DNA, 1000 bp, Homo Sapiens; identical to SEQ ID NO: 159725

SEQ ID NO: 471665 - DNA, 1000 bp, Homo Sapiens; identical to SEQ ID NO: 341002

SEQ ID NO: 471666 - DNA, 1000 bp, Homo Sapiens; identical to SEQ ID NO: 159727

SEQ ID NO: 471667 - DNA, 1000 bp, Homo Sapiens; identical to SEQ ID NO: 341005

SEQ ID NO: 471668 - DNA, 993 bp, Homo Sapiens; identical to SEQ ID NO: 341006

SEQ ID NO: 471669 - DNA, 1000 bp, Homo Sapiens; identical to SEQ ID NO: 341007

SEQ ID NO: 471670 - DNA, 1000 bp, Homo Sapiens
cactgagaatgcagctttctttcatttggtcacttcacctcttcatcgaccccagagagggagtggggaccctgcatgctgccccctccccgcccccggggtcttctggcaggactggggaagggagcctctcagggggtggcggtccacgcccagtagcacctgggagctgtgggggccgaggcagtccgaaggtgtggggtagctctgagctcatgtacaggtccggtaccccgagcgccttgcggcgggagccagggcccatcagtaatagtgcatgcggcccagggtgcccgtggccgtggggctgggccccagcgtgcctgtgcccagcaggtccggctgcccggtgcgccagatctcccgcaggatccgttcgcgctcctccagccgctgcgcccgctccagctcctccgccgacgtgaagacgttgacgttgaggggcccgtccggctctgcggacagctcggggcccggcagcgtgtcgtcggggcccagccgagtcaccgtgtcctcctcgtcctcgtcgtcgtcctcgggctccagggtgctgctgcgggggtcccggcgctgagccgggccccggggccgcgggcggggcgcccacgagatgctgatgacgagcaggcagagggtgagcagcaggccgaagcagacgcccagcacgaagtagaggccaaagctctcggggttggcgcggatgtgcgcgtaggcagccaggctgttgctgagcaactccatgtcccttcgcggggcatccatgctgctctggggggcagctcccctaccagctccgcctgacaaccctgcgacgtgataccattatccccacttcgcagatcaagtaaacggagtcttggagagattgaattgactttaccaaaaccgtcaggatttgaatctgctgctctctgatcctaaagcctgagctagaaaccaccgctccccctcctaggaggccccttccaggcaaagctgctcctcttccccagacccatgc

SEQ ID NO: 471671 - DNA, 1000 bp, Homo Sapiens; identical to SEQ ID NO: 341010

SEQ ID NO: 471672 - DNA, 1000 bp, Homo Sapiens; identical to SEQ ID NO: 159728

SEQ ID NO: 471673 - DNA, 1000 bp, Homo Sapiens
tttttttttttttttttttttttttttaaagaaacagaataatttttattgctaggttaatttattacaaagataataatagtctgttgaacttagttacagttaaacacactgtaccgattcaaaatcattatactagtttgatagggaggagggatgggggagtgggctggggttccaggaattggaagtatcagggtggaaataggaactttataccaagccccatgaccagctgtgcttcaagtgagttttaaaattaattggtcccttccctgaagagggtctggctcagaagaaacaggaactggtagagctgcaccctgtccacagtgatccactactaaaaatactcatacctaggaggaccttaaacttctgaatgctggttcagtaaggctccactgtaaaatcaaacatcttttgtggtattcatttttttattgcttgatgtctggaacagttaccgaaactagacctgtatcgcgcatctctactagtgcttgggcctcaaagcagtgctcgtcacctaactgcacaaagaaatgctattaggtccaattgtgagataagctgaattataaatacacaattttcagaacgacaggcacttaaagctcattaagtaaaatacaaaaatagattatattaataagaaatatttagtgttcatcaaattgtaaatctaggcttttgccattttttaaaaaggatactggaaactgaaaagagatgacattcatatgaacaatgcatttttcaaacttttgttctgagcgctgaacaatctaagaaattttagcgcaatctaagaaaaaagacttaccacaaagcacctaaaataacattgtagatgggtgggaacgctgtcaaccatttcttagtttccctcccaagtctcagtatcaaggcatcaagattacattccacaaacgattgtcagccttcggaaatcaggtcagtgtgcctgtatgtcagagacgttaaaacccttaggagg

SEQ ID NO: 471674 - DNA, 1000 bp, Homo Sapiens; identical to SEQ ID NO: 341012

SEQ ID NO: 471675 - DNA, 1000 bp, Homo Sapiens
aatttttaaaatttttttttgtaaagacagggtttccctatattgcccaggctggtctggaactcctgggctcaagggatcctcccacctcagcctcccaaagtgctgggattacaggcagccatgcccagccagggcagtcatttttatgcacaactttctgtggggctcaggtgcacctatgatacataaatttacagttcttgatccccaaacagagcaggaggcagggtgcctgggccaggcttcctttgggaaatgtggtccttgaggtagagtcacagatgccggagggtgaccagcactactggggagagatctcctctgggagagatgcatgccaaaggtcctctgcattcctcatacctctgatgcggacagaggggtgtccagctgaatgatgtggggcccccgcatcctctgcagctgggcccgagtcagcttccgtggcctgctgtcccggggctcctcggccccctcaatcctttggctggccagctcctcccggatctctctgagcatgtcctcagcccgcattgggcgcagggatgtgtggccagctttcaggaacagaggcccctcttcttcctcctcccctgaggactcccaggggctttccccggcagagtcagcatgggttggggaggagggaagctggccccgaagccgggccctgtggagtgtttccaccaccacattccctcgctcggaggccccatcttcttcctcagaccaggttggtgggtcttcctggggaagactgcctccttttaggattccttccggcagttcgggggcgcttcggcgttggggagcttgggggtcgggagggtggggacgcagagggatgtcccggagttccagggtggagaaggtgaggcgagggtcccgccgaagggctctttggcgtagacggctcagtggggagcgggaccccgtgggggtgcctgggatcaaagtgccgtagccagagtctgaggtatcatctggcacaagggga

SEQ ID NO: 471676 - DNA, 1000 bp, Homo Sapiens; identical to SEQ ID NO: 159729

SEQ ID NO: 471677 - DNA, 1000 bp, Homo Sapiens
cttcattctctgagtgctatttattgtctcaatcttcattgcttaaagtcaggaaacaacaaacacattcatatttgtggcaaaacatctacctactcatgacatggcaaataatcattttacaataacaatacagtacaatatgatcgtgctactttcatggctaggaatgaagttgttgggtttctctttcagagctacccctaaaggcattcactttatattctctgaagagaaccagctaaccaggcggaacatccactaagaatcttccacataaccagaccccaggagcttgcctattgcccataccagagaggcccatttggaaatacaccatctggtctcttgagcacagacctggagtgtgggattcagcttggctggctccaaagctggcccctactgatcagcctgagatccccagcctgcacaggctgattccactgccaacacgtggccccatgtgggtcctgggcgggggggttcctttggtaaagtactgggagaggaaggagtcttcctatctgagtatcttgggttgtgatttggtgtgggctgcactggcagtgcaatagcagcaactcaacaaaacaggactgttacacaagcggggcagaaggcaggtgggctggcagggaagttggtattcgattacttgaaatattaagttgtccagagggcaaggacacgcacaaatcaaagggccacctctaggtttcaaagcaggtcgagatctgtgtaaagtcccctttgacttcataaaatctcacttcaaaaattctaccgaatgctcatcagacggaaataactgtttcatccctctaaaggatgaaatgaaaagcaccagtctttggcctgcctgctggttacccacaaactcaacgggtgggttccgagaagcagatgagccatgaagagcatcaaacaagcattactgctctggccaccaccagggtcacctttgaaccgtaagaaagagggaaaaactcctttgagt

SEQ ID NO: 471678 - DNA, 1000 bp, Homo Sapiens; identical to SEQ ID NO: 341014

SEQ ID NO: 471679 - DNA, 1000 bp, Homo Sapiens; identical to SEQ ID NO: 159730

SEQ ID NO: 471680 - DNA, 1000 bp, Homo Sapiens; identical to SEQ ID NO: 341016

SEQ ID NO: 471681 - DNA, 1000 bp, Homo Sapiens; identical to SEQ ID NO: 341018

SEQ ID NO: 471682 - DNA, 1000 bp, Homo Sapiens; identical to SEQ ID NO: 341019

SEQ ID NO: 471683 - DNA, 1000 bp, Homo Sapiens; identical to SEQ ID NO: 341020

SEQ ID NO: 471684 - DNA, 1000 bp, Homo Sapiens; identical to SEQ ID NO: 159732

SEQ ID NO: 471685 - DNA, 1000 bp, Homo Sapiens
ttcaactttacaaaatttgttttatatctgttagaaaatgtacagacataagtattttcagttgacaaagcatcaaacccagttctgcctagtgataagtttcaccctagagtatgtatgtaacgttttagcttatccatcctttcttggagcgcctccatttccattgaaagccaggctggagcaggacccttttggagtagtgactcagttgcttccaaagcccctgctattgtatgcagcgctgacctgtactcttcttcccaggggaactcctgacgagctctttttgcataaggctgtaaagatgacctctttgcttcttctacagtcacattagcaaagggttcccagaaaatacctttttcctgtttcacacgttccactttggcagcttcagtttcatctacaaacccagtcttctccagaaaggatacaactttgttcttagtttcttcagaactgagacactgtggaactatctcttcatgatttgttccctcagcgaactgagtaaacgcctccaaggtatgttgttctagcagccaactcctgtcagctagcagtaaggcaaacatacaggacaggttgggcagaattctgtcctggatagcttcaggtataaaaagttttcctaaagaagatacaaaatccaacattgccaaacgaacatagtcaggaagctctaatttaagtagcgaggtctgcaaagttactgcctgaagtatcagtttaggatctagagtttgaatgaaaaatcccaacagtggaagtaaaaggctgaatgtctgttgaacataaggttgatctgctacctgtttaatgtttaaaaaagcccaaagctgactcacaacttcgataattgcagtttgttttcctgtatccaaagcttcaccagcagaattacatactgcaagcaaagcagacagtactgtgttcagagattctagttctcccaaagtacgactcctgctcagccatttcctgcattctgcagtgc

SEQ ID NO: 471686 - DNA, 1000 bp, Homo Sapiens; identical to SEQ ID NO: 341022

SEQ ID NO: 471687 - DNA, 1000 bp, Homo Sapiens
actgtatatcctttattaaattttgccttaaaaattttaaatgctgcatttttataattcacaatagcaacaaaacatgacaattatttgtgtgaaatacagtctaagctctaaaggttcatagattacattcattttataccaggtttgttcatatatatagattaattcatcacagtatacttatttcttaatatacttgcattttatcaagtaaaagaattaaatattaaaagtagcttgacaaaatacagaaatattctgtgcaataaatttgttgtcaactgattcatgactggttcatgaatcatgactgatgtaatctttttatctttctgcccagcttctcttacatgatccttgggaaatagccagttgaaaagaaatatggcaaggtattctagaatggtccactaaccatagagtctttcaagatgtgcaggttgctttttgtattcttcctgtaggtgatctgcctcttctagaatacagtgatattctggtatcagaaagttcgtatttccctcatgaatctgtaattcttttaaagcatcaattaactgcactttcttagccaaaagcaactggtactccagctttgggtggattagctttaaagtgtgtttgactgatacttcatttatctcgtatgatatgttgaggttaattttcctttttgtagcttctttagaaagcacatcttttaggatggagatagtagaaatgttgtcagatttaaaaactccctctccttttctgtaggtactttcaagttgtgtatctagaaaggtgttctgaaagtaaaatgtcacacattctcctgctggaggtttttctggaacttcaggcagacaaaaaaccacccaggagtgaacttcagcaaaactgaactggcctgttagggtcagtgtattcatgggtctgtcatgatcaataaagtgagttctttgatggagtgaaagaggtttgatgtggtactggcggacctgacaggttttgg

SEQ ID NO: 471688 - DNA, 1000 bp, Homo Sapiens
tttttttttcctgttttaatgttactttgtttattaacatgtcgttctaaatattacataaatacagcttacatactagagtatcaaacattgttccagtaagaagttcaagagtacatttagggctatcttaagaaatatgaatactttggcttccattattacattagatgaaaaaatcaattcaaataagagttgtcatatcctgctatgattaacaaaaaaacaagtagaaaaataagagagtgtatttaaaaaaaataatcaaatgctttttgaaagacctgttctcttcactgccacacatattcatacaaatgacttagtaatctaatatgagaagtggtccttcacttatattaggaacttggtaaatatttgttgaatgaatgaactatctatggatatgaatttactactttaatttgtgctttttttgaaaaaaagttttcaagtaagagcaatagtaaacatactgaagttcacattttgctcagatcataagcctatagaacagtgattgttacaaacaccacccatcatagcacaaatcaatgtgcatttctgaagctagtaagaaaagttctatcatgttgtagaacgaattctaaccgactaattcactgggcttcaatcacttgtgatatggtcaagaaaagggggctggggctcctaggcttgtatctatttcagctatcagtgaattcctatctttagggcctcactccccttcccaccccaatagacacaaatttaaaaacattgctaaaaatagtagttgtagcatgtcttcacccacttgtaatttggctctgaaaatgtattcaggctccaggttcagaagagagactttccaagcaggagacaaaattcactaagggaactcactcaaatggaaatgagttcatggaccagagagcaaagcaaaacattgctcttaaaagcaagctcaacggacacacatgatgaaactcacagttgaacactcttacatcccaaa

SEQ ID NO: 471689 - DNA, 1000 bp, Homo Sapiens; identical to SEQ ID NO: 341023

SEQ ID NO: 471690 - DNA, 1000 bp, Homo Sapiens; identical to SEQ ID NO: 159733

SEQ ID NO: 471691 - DNA, 1000 bp, Homo Sapiens; identical to SEQ ID NO: 341025

SEQ ID NO: 471692 - DNA, 1000 bp, Homo Sapiens; identical to SEQ ID NO: 341026

SEQ ID NO: 471693 - DNA, 1000 bp, Homo Sapiens; identical to SEQ ID NO: 159734

SEQ ID NO: 471694 - DNA, 1000 bp, Homo Sapiens; identical to SEQ ID NO: 341894

SEQ ID NO: 471695 - DNA, 1000 bp, Homo Sapiens; identical to SEQ ID NO: 341028

SEQ ID NO: 471696 - DNA, 1000 bp, Homo Sapiens; identical to SEQ ID NO: 159735

SEQ ID NO: 471697 - DNA, 1000 bp, Homo Sapiens; identical to SEQ ID NO: 159736

SEQ ID NO: 471698 - DNA, 1000 bp, Homo Sapiens; identical to SEQ ID NO: 341030

SEQ ID NO: 471699 - DNA, 1000 bp, Homo Sapiens; identical to SEQ ID NO: 159737

SEQ ID NO: 471700 - DNA, 1000 bp, Homo Sapiens; identical to SEQ ID NO: 341032

SEQ ID NO: 471701 - DNA, 1000 bp, Homo Sapiens; identical to SEQ ID NO: 341033

SEQ ID NO: 471702 - DNA, 1000 bp, Homo Sapiens
gacatctgtaactttaatttaatacaaattgatcataactcataaaatgggcaacattttaaataaaaatactgctggggtggcccagattctggtagttgaagggttggggtagggctgacaattccttttgcccaagggaggcccgggtggcgggggcagccattttaagaaccccctgtgtttagctcttccggctactttgggatggtgtgttgtgtcagagaccccaagtgcagaatctaggccccaggactagaaagaaaagtcaaggccggggagacatttaggctcagtcttgcagcccactcctccagttcccacctctgggcagggatagagccaaggggcaggacaaccctagatgtggactccaccctctcccgagttcttcacgattggatgctgtggcagaaaaacgcaggtggggcttgctccacccaccctaacttccttctagggagatgacatttcccagactcccttgcagccaaggttctggatctgacttaagttcccccaaacagaatctcttgtaaaaatttagatttgggaactgagtgaagtgggagaggggcaggcctcaggacatctattggctggcacggaccgtggcagagggagcctagttctgcagtcagcagctttctggcatagtggcttcctgcagatgggggcagctttcctggtcacaacagacatgatgaatctggcgctgggagttcctggaaattcagcagagtctgcttctccagctcttccaacaattttgcaagccaccaggggccaggtagtaaatccttgtctaattaaaccagctacaagtggctcttgttttctgcagcaggatcctaactgagatagatgccaagtctgacaaggggtctagccaacagcccctcccagtgcttgggtcctaattacaacaactgcttctggaagcctcctgcaccctagcaggtcacagaggcctggctgaagagggttggctggactcttg

SEQ ID NO: 471703 - DNA, 1000 bp, Homo Sapiens; identical to SEQ ID NO: 341035

SEQ ID NO: 471704 - DNA, 1000 bp, Homo Sapiens; identical to SEQ ID NO: 341036

SEQ ID NO: 471705 - DNA, 1000 bp, Homo Sapiens; identical to SEQ ID NO: 335779

SEQ ID NO: 471706 - DNA, 1000 bp, Homo Sapiens; identical to SEQ ID NO: 341037

SEQ ID NO: 471707 - DNA, 1000 bp, Homo Sapiens
tttttttttttttttttaacaggacacttaatttgctaaactttattttatacatacacgtttacatttactagtcatggtgtcaacttgttaacacaacgaagccctaatggacccgttttgaaattagaagctggacagttacaggctttggtctcttcaagaatccaattcacccctgggtttcgcttggcacacaccccaggagaacgtcgatgcacacagctgtgtagctgcaaacggaaaccactctcttttctctcgtatttttcagtcagactcactcaggattttgaaatgaatcatcacgagaaatttgttttaaagttgaatcactgagaacatctaacaactgttcacattctttatcacaaaaactgaagtcggaaaagacgccctgaaaacttgcaagggctaatactctatgatagaatattactactgttcaccatgttaatacatttacttactaccatacacctgaacagtcacggcagaacaagagcatgtgaatgacgaaaggaaacttgctttcagggtgtcagattatagaacatgcacaggaatttcttccacttctaacctcgctcatcagtcacatttacaagaaactcaattttaagcaaagagatgcctgaaataactaagacgtgtacaaaaacaagttaacctatgaacacaaggtaatattctgatagtcttcgatgtgacttccaacatatctgagtagtcacttttcagttttttaaacacgtgagaaaaatagatttggattacatctttgtggacggctacgatacagtttggaaaccattatctcagggaccctgctctctcctctacacatgcgcacgcaaacacacacacacacacacacaatgacacatggtggtctggtctaatatagtgtgtctgaattcagagggcagacattaacagccaagttttgtttttttgagagagagtctcactctgctgcccaggctggagtgccgtggca

SEQ ID NO: 471708 - DNA, 1000 bp, Homo Sapiens
ttatctgaagctccccacgtggatggagagagaagtttccggggctcggggccgggcaggcgtctctgcactggagaggatgtagctgctctgctcatggagggcttcttggcttttccttctccccagggcccgttgtttctgcttttcttttccagtgtcatctctgattgtactgaaatcatcatcgtcgtcaatcaggagattcttaacaccaatagtatctccgtctttcaagtaatacggtgccccttgcaaataatcttgtttttttttctttttcctcttggttatttgttggttccagctagatatcggaagccactcgaacttttcgggaaagtatttggcaatttcaatcttctccacgggaagacgatagaaatcggcaactctctgcctcagggagccggcagtcccaccctgggccgcgttccacaccaggtccagggcaggggcataggtcctctcaccagggatgcgcacctgtgtcctcagcagcacgtcctgggggcccaagttttcgcctttctgaaggggctctaagcagatctcaattctccgtcctagtttatattccctgagtggctgccggtcagttcgtaaaagcctgcctgggcgcttcctctccaccgtccaggctctgaggtgggctggggacgggacaccgaactccaggaaaggaggcaaggtcatggcctgagacttcagctccgccagcgtggcatcttctgagatctctatgtctcccaagtagaggagagaaacttgcgcaggctcgttcccagaagcaccttggctggaagtggctctccaaactctgccccaagacgaagtacagttggtctggtcctgatgactctcccagtgtcctgagggaccctgaagctggtaccaccagatgggcaccttcaggaaacccagaggaggaagttgtccttcaattaaaagcaaagtatctccagaacatatcagaagttctttcagtgttgcatcttct

SEQ ID NO: 471709 - DNA, 1000 bp, Homo Sapiens; identical to SEQ ID NO: 159741

SEQ ID NO: 471710 - DNA, 1000 bp, Homo Sapiens; identical to SEQ ID NO: 159742

SEQ ID NO: 471711 - DNA, 1000 bp, Homo Sapiens; identical to SEQ ID NO: 341043

SEQ ID NO: 471712 - DNA, 1000 bp, Homo Sapiens
ttttttttttttttttttttttttttttttttttttttgcagagtggaagtttaatgggaccatcaccgtgataccccatcacagcagtcccaggctggaggccccaggctctggccgcctctcccagcatggtgggcctggagagagcaccagcaccacctcccactttccctggggtattgctttgcccctgtgcctcccaccccaggaagctacaagagacaggctgtcctgtccccacactctccctgggtcctgggactccctgttctgaggggctaaggttgcctggggccagagggccctccccagggacaaccatcctctccctgtgtcccctgccccccacactgagggaatgtctgtgtccttgttcctctgccaggggccaactgaggctgccaaccctaggggcggggtgcagggctgtgcggggagggtggctcagatccctgcaaggaggcgtgctgcagggacagcacagcctgggcccccggcagacattaaggcacagtgtggcggtcaccatagggctgctggggcccttgccccggggcggcacctggcaggtgctggcatccggggctaggcacagctgtcagtgttgagacaggaggcatggtgtgtgcgggctggccccagggcctgcagtgcaagagagctgggagtggggaggccaggtccacaggtctctgccagacacaaggaggtccctctccccattctccctgcctgggagagcccaggggaggggcttgtgggcctgggcagagctcatggccagagccgagacgcagtcatggcaggcctggcccacagaaggcacaattgtggtgtctgggaggtcgagggtcagcccgccaacagggctaggcagacacattgacgtccctgagagagatggcactgctgggggcctcgtccccaagcagcagggcctgtgcgtccgagtctgtgtctgcttcagccttgcccagctccgtgctgggctctgaggcg

SEQ ID NO: 471713 - DNA, 1000 bp, Homo Sapiens; identical to SEQ ID NO: 159743

SEQ ID NO: 471714 - DNA, 1000 bp, Homo Sapiens; identical to SEQ ID NO: 341045

SEQ ID NO: 471715 - DNA, 1000 bp, Homo Sapiens; identical to SEQ ID NO: 341047

SEQ ID NO: 471716 - DNA, 1000 bp, Homo Sapiens
gtctctgggtagtcacgctagggctggcaggggaggaggcagaggaaaggcagggagaagagaaaacatcactgaaaaagaaggtgtcggggaggtacaccctgattctgaccagcccagcccacacagagggtctgaaaggttctcagccttctccatcacccaccctgcggcctctgaaaagaggggcccatctcagacacaaaagcagatactcccaaccttatggggaaagctaacggaggaatactcacagcaccgtggcacgggacggcccttggcttcagagccgggctggcaccgtttgtaaacattagacctggtgatgtctggggatggaggaggagagggatgcccagcctggaccatcaggtttgatgaaagagacagggtggggcccctcaaggcctgggaaatgtctattagctatgggaaagaggctgacaggttcatggtgggggttgcccaggaaggtgtggacaaggtctgaatctacctgactatgtatttgcacgacttcagtgctacctttggaagtggccaggctcctgaggaagctaccactggcctggggtaatgagcacaacccctactcaggacagggtgctctgtggaggatggtggccttctgtccatagtcattctccagagggaagtcagactggattctttcttatgagatctaccgactctcttcacccgtggattccaggcatggagaagttgagaactgggagaggaggaggggtcctctatgatgtgagacttcctgccgccatccacggcactgccaggactggggagcaggaaggggactggatttgagctgtccagaggtgtggggcctgagtttgccccagtccctggaagaggatgtccggatgtcatcccaccagttggaatgatcgtggactaagaatggccccatagctctaagagatgggttcctgcgaccaatggcaaaggccttgtgttccctgggaggcagtggttatgccaa

SEQ ID NO: 471717 - DNA, 1000 bp, Homo Sapiens
gaggctaaaatcatttaattatacacaggccacaattgcaggatggaaaggcagtgggcacttggaagtgactacacatggcaataagcagcctatcttctttaccaaccagaagtttcttggggcatgtgatggtaggccagaccctttccaagggaatactactacactaagcctacactgtactgtgagagtcatggtggaacaaggccacaggcagtgggaggaaatgtgatgactcactgtgtcagaattctaaggcccagcatgatcaggatgtaaggctccataattttctaaaccagaaattatgagaagaacaaaattctgcaatcacttatgtttttttcttcttttttttttttgagacagagtttcacccttgttgcccaggctggagtgcagtggcacaatctcggctcactgcaacctccgcctcctgggttcaaccaattctcctgccccagcctcctgagtagctgggattacaggcatgtgccaccacgcccagctaattttgtatttttagtagagatggggtttctccatgtttgtcaggctggtctttaactcctgacctcaggtgatccgcctgccttggcctcccaagtgctgggattacaggcgtgagccaccatgcccggctgcaatcacgtatgagtttttctaaaaaaaccgaaacactggaaacatggatgcatcttaaagactttatgctaagtgaaaccagtcacaaaaggacaaatactgtatgattccacttacatgagaaatatgagtagtgaagttgatgatagagacaaaaagtatggctgttgctaggggaaggggaggtggggagttattgttcaatgggcacagaatttgggaagatggaaaacttctggagatggatgatggtgatggctggacaacaatgagaatgtacttaatccactgaattgcatatttaaaaatgggtaagctggtcagttttatgttataaatattttacctcaat

SEQ ID NO: 471718 - DNA, 1000 bp, Homo Sapiens; identical to SEQ ID NO: 341048

SEQ ID NO: 471719 - DNA, 1000 bp, Homo Sapiens
ttaaactgatgaactttattggagttaaaactataacaaagttcatcctaaaacactttgcaatgcaaaattatttcactcaaggagtgtttaataatttgaaggctaggaattacaagcaattttcaaaagcagaaactcacattcataaaactttatacatcatttgaactaaaatacatttatactactaaaatcaaacatgcatcaccttcaaacattcttatatcatgatttttatatattacattatttaacaccattcctcatcactacatggattttatcatacactggcaccattctccttggatttttgatctttgtcttcattctttacattatccttcttgagaacagtgtggatttcatccattaccgtagataagtttctgattgtcttattcatttggttttcaaattgtaaattcatgttttccgaaatctttaagttttcttgtaactgactaaggtcctttttaacttctctgagttcaccagagaggcttttgttggaattctccaaatttaatatggttttttcatcttcatctgttttttcttctagtaactgcagcttctgttctacctcagctcttactttttcgctcttttccaatttttgcaagaggcttcctacatctaccattgcaccattgtacacaatgaggccaacattttcttccacatcctttgattcctgctttactgttggtgttggaagtaataatctgtttcctagcatatcttcctgcaatgactcagactcttcatggttctcttcatcttttgaggtgtctgttaatttccggtaaaagcaagattcacggagcactactttattaagaagcttctttacctgagcccgagaaagatgtagtccaagagtataaagtatttcttccaaatccttttcaagaaggtaaccacaatgactttgatcaaaataaacaaaagccattaacagatctctgttaattgtgatcatttgagtcttttc

SEQ ID NO: 471720 - DNA, 1000 bp, Homo Sapiens; identical to SEQ ID NO: 159745

SEQ ID NO: 471721 - DNA, 1000 bp, Homo Sapiens; identical to SEQ ID NO: 159746

SEQ ID NO: 471722 - DNA, 1000 bp, Homo Sapiens
gtttttttttgaaaaagagcctacagcacccccacccctacctcaccactccccaaaccagctcaagagttaaagccaggaagtggggcagactggggagaggaggcttgtgtggctccctctagtgttggttcactgctgtgcagcacacagcagtatctgggtcaatgaggacatggtcctagcctttctttctccaccaggaccctgacttatctggctggcccagcatggaggagaaggaaagcgggccgtgctgccggggggattcctggatccctctgcatgctgacagacagctgtccacagtgggtagccaaggtgactggcattttgatcccagctgaatgaagactggatttgaatgcagtgccagggctgttctgtagacaagagcgaacagtaccctgttcgctcccttctgcagtaccctgaggaaggagagaggcacccagggcacgaatgcagacaacagagggactggccaggctatcccgttttccacctgtctgtgccacagccacccactcccatacttcatgtccctaggccaaagcctgcccatccctgggtacccccatttccacttatgggagatcagaggggtgggatagaaagggaatgctaaaaagtgcccccctctgctttccctaaccttcactttccctgtccccattctagggtcaggcaagagtgcaggtcagaagagacacatcctcccgaagaagagggaagggcaggcccaggaggctggggcatgcacagagcaccatcctcgggacggggtgtttctgggagacctgctccccacctgccatggtgggaggaagaaggctggtccgagaagggagcaatgagcaatgtccctgaatatcagggaacagctgtgaaagccttctcctctgccccgcagagatgccccagccaggctctggcccctacacgtgagtctgcatgcgctgctggaatcgctggccgtagtccgagtgctgggaggtgt

SEQ ID NO: 471723 - DNA, 1000 bp, Homo Sapiens; identical to SEQ ID NO: 341051

SEQ ID NO: 471724 - DNA, 1000 bp, Homo Sapiens; identical to SEQ ID NO: 159747

SEQ ID NO: 471725 - DNA, 1000 bp, Homo Sapiens; identical to SEQ ID NO: 159748

SEQ ID NO: 471726 - DNA, 1000 bp, Homo Sapiens
ttttttttttttttttaggtacacacagtaaagtttattttggtgcatggtatacttcactccattaaaaataaattaatcagcaaattcctgcctggctcagctctggtttatgtaaatagtgcccagctgtaatgagttacaaggtgttattatctcacacacacacaggaggcttcactctagagctccgctcgcaacaaaagcatcttaaataaactgagagaagcggtttgatttgtaatgttttcacagaagtgggatatacctcacccatatagagtttctttatatgactcattttatagcaagttaaatgaaggaagtttgatgggggagggaggggcaatatggttccccaccccctttcttcactttaagaaaatcccccaagagatgacccgcactgagggaggaggggctggtcctcaggtgctcagaccaaggtggctctgcagcacgtgcttcagaagttgggaagggggaccaaagctgggcacaggtctgggtctgctacaactaagccaggaggaatgttctcttctccccagtatctcatgaaaggggaggccaagacaggagacagcatgttcctcattcagttcactgggagtgacaaaggtgactttgttctcaaggcctccttccaaatgacttaggatgtgaaagcccttggtcatcagaggcctcctgggtcccagacgacaggcctggctggctgtatcttggcctgaacagagacacatctccatgaactagaggcaagagcagcagagaccatcccagcctcttccctttctccgtctctaactgagctgcgcggtgccctcattactgcgtccaccatctcaggcaagtttctaagtccctggaataaagaagggccatggcagagagaagtctctgtttcttttaatggccaactcaaccccatggctgaaagccgagggacaacgcgtggtcaccgaccggactcggcagcattacaatctgctcctag

SEQ ID NO: 471727 - DNA, 1000 bp, Homo Sapiens; identical to SEQ ID NO: 341054

SEQ ID NO: 471728 - DNA, 1000 bp, Homo Sapiens; identical to SEQ ID NO: 341055

SEQ ID NO: 471729 - DNA, 1000 bp, Homo Sapiens; identical to SEQ ID NO: 341056

SEQ ID NO: 471730 - DNA, 1000 bp, Homo Sapiens; identical to SEQ ID NO: 341057

SEQ ID NO: 471731 - DNA, 1000 bp, Homo Sapiens; identical to SEQ ID NO: 341058

SEQ ID NO: 471732 - DNA, 1000 bp, Homo Sapiens; identical to SEQ ID NO: 341059

SEQ ID NO: 471733 - DNA, 1000 bp, Homo Sapiens; identical to SEQ ID NO: 341061

SEQ ID NO: 471734 - DNA, 1000 bp, Homo Sapiens; identical to SEQ ID NO: 159751

SEQ ID NO: 471735 - DNA, 1000 bp, Homo Sapiens; identical to SEQ ID NO: 341063

SEQ ID NO: 471736 - DNA, 1000 bp, Homo Sapiens; identical to SEQ ID NO: 341064

SEQ ID NO: 471737 - DNA, 1000 bp, Homo Sapiens; identical to SEQ ID NO: 159753

SEQ ID NO: 471738 - DNA, 1000 bp, Homo Sapiens; identical to SEQ ID NO: 246530

SEQ ID NO: 471739 - DNA, 1000 bp, Homo Sapiens; identical to SEQ ID NO: 159754

SEQ ID NO: 471740 - DNA, 1000 bp, Homo Sapiens; identical to SEQ ID NO: 159755

SEQ ID NO: 471741 - DNA, 1000 bp, Homo Sapiens; identical to SEQ ID NO: 341068

SEQ ID NO: 471742 - DNA, 1000 bp, Homo Sapiens; identical to SEQ ID NO: 159756

SEQ ID NO: 471743 - DNA, 1000 bp, Homo Sapiens; identical to SEQ ID NO: 341071

SEQ ID NO: 471744 - DNA, 1000 bp, Homo Sapiens; identical to SEQ ID NO: 159758

SEQ ID NO: 471745 - DNA, 1000 bp, Homo Sapiens
gttttgttgttgttgttgttttgtttttgtttttagaaagcctcacactgtaacccgggctggagtgcaatggcatgatcttggctcactgcaacctccacctcccaggttcaaacgattctcctgcctcagcctcctgagtagctaagactacaggtgccatccaccacgcccaactaattttttgtatttttttttttttagaagagatagggtttccctatgtttaccaggttggtctcgaactcctcacctcgtgatctgcccaccttggcctcccaaagtgctgggattacaggcgcgagccactgcactcgaccgccctgagctttttttcctgcaactagagggtctgatctgtctgcttgttaagaaactgcacaacttccaaaccatcagggtaggtcgtgtgtgtcgtctgagcatttgcataatagtaaacatcacacgtaagttcacagcccaaatttcctgcagctctgcaatgtttggggaagaagcagtgaactcatcaggttgaacgtggctgagaaatccaccttcagaactctctaagactgaggagcttccgtctaaaaagcaaataagttaaatttaaaaggatagtgtatatacattgtggaaatatcagtatcctaatgcgattgctaaattcaatttaagcaaacgtgtgaacacattctttcttgttcatgagattactatacacatgtcaggtcagttcaacaacaatgatcctgtaaggaacattaattctttaatgaatacactcagtcggtatttctctttcgagtattctgatggatcaggagattcacggatggaaaggcactgtcttggccctgaagctgctcacagtcccgcagcaggcaaacacagaagagaaaagccgaatccctgtgacactggcttacgggacctatgaagggccacgggccattgtgaaggagcaccacaggcttccaggagagccaggagtcaggggagcttccccaggatg

SEQ ID NO: 471746 - DNA, 1000 bp, Homo Sapiens; identical to SEQ ID NO: 341073

SEQ ID NO: 471747 - DNA, 1000 bp, Homo Sapiens; identical to SEQ ID NO: 159760

SEQ ID NO: 471748 - DNA, 1000 bp, Homo Sapiens; identical to SEQ ID NO: 159761

SEQ ID NO: 471749 - DNA, 1000 bp, Homo Sapiens; identical to SEQ ID NO: 159762

SEQ ID NO: 471750 - DNA, 1000 bp, Homo Sapiens
gcacttacaaagcagttggggcatttattgacatttaaacaagggaggagatcctgaacactagtctcgctcagtttataaaaacttgaggccaaactctccatcatctgtacacagcttaaccacggccaggagcaagaattcgagttaaacgaattgaaccagtccaaccacaagacgataaagggaaacagggcgtggggatttccagtttttccttttacattacaaagtttccaacacaagaagccaacaataccccagtgctgcaccaagttacttcccactgtttcccaaggcacagtcaattaataatcagtagtccaagttctaagaacattccctggaaaacaaggacgcacctcccgtggctctatgcatggcctgccactgatgaatcaaattcttaagaacctacgaccgtctgatacccttgaggagagcaccctcatagaatctccagcatcaggcctcagttttcccatctgtaaaagacagccatgcaaagtgggagatccgctaggcttccagatcgaagtcatcgcgctcctcattgtactctagcacgtgccgcttgatcttggacgagtccacccaagtgacaaagtcctccatgctgcgcgtgacaaggaaggcggggtcggtaaccacgtcagggcccacgcgtacgtgcccttgctccacaaaggccacggcagcctgaaggtgctgcgccatgcgcagcttgaggagcacggtggggaggcggcggcggcagaaggacgaggccgtgacgaagtcgcagagctccagcgaaccgcgcgtgggcaccaagccgagagcatacagcttgtccagcagcgcggccgaagcgcgcacgcggaactggtcgcgttcgggcaggtcgcgcaggcgccgcgccagctcacgcacggcacggctcagctggttgtagcgcgtgtagtcctcccgccgctgcagccggtaacgccgcagcacgcgcagctcgtgcaggttgtgg

SEQ ID NO: 471751 - DNA, 1000 bp, Homo Sapiens; identical to SEQ ID NO: 341080

SEQ ID NO: 471752 - DNA, 1000 bp, Homo Sapiens
tttttttttttttttttttgagtcattatactgtccccaaacaggggacatcatcaattttattcctgccaagtagatctggactagaagaatatgtgcttgatctacaacaaaagctgccaggcaaatgcctgatactacgtccatctcacctgttctgctcccaccatgctaattggcttgcacttgaagaggtgggtgatgaatttgggaatgaaggagtttgcaaatttaacgcagaactgagtgaagtacttgcgtgtggaagccaggttgtcacggatgatggggacgttctgcttgatgtgcagaatgacagaggtgacgtaggggctctggtcaccaacgtgctccacgttctgccactgcatcttgctcatggcagtcagggcaggatcacaggcagcatccagatcctgaaccagcagctgaatactgctggagatgacggtgctgaacgtgtccatctctccagtcagattgattcgttcaatcagacttacatccactttttctttgagtttttcttctagctgctgggtggtggccagacagtactctgccgtgctcaggatgttacagatgaggcagagctcctccagagtgaacttggctacttctgagccctccttttccttgaggaggctgctgatagtcagtcctccactgctggttgtggttttgggcaggttgccagagaggattttccaggcatattctcggaggtacttctggaaaatggtggtcagggcgatcatgggctccccagtactgagctgagagcattgcaccatgcacttcttgtagtagacaaagaggtcggcgcagctggggagcacggcacccccttcatcagtgttgggcttaggtggcccctgggctttgaaatcagccacaaaccgatctatcagctctccgaggttcttgtcttgggattcgatatacacgtagagatgaggctcaaaacacttggaaacaatgccatgaaatggattgtctg

SEQ ID NO: 471753 - DNA, 1000 bp, Homo Sapiens
ttttttttttttttttttacagatctaacatttcttttctccacagtacagtttgacactagaaaacattataaaataaacataaatatggcttctacaataaagcagtttgtagaatatatcgaatattatagatttaagagttctggtaggatataagcgacatatgactaaaatagaaaaatagttacaatactatcacatagtattgtaatttttcattgttctgaaactgttcataactatttaggttgagtgtaatcacaatcatttgctttaaaaatcagaaataatgtaaaatatataaagtatataaagaaagtttgatcctagctcatgggtgcccaactggagttattttggaaggctgtaagaccacgaattatgagaagatagaaggtacagattaaataataaatctatttgttattagaaattggcttataggaaatctatcataataaagtctagttttagatttcagaccacacaagaacaagagaaaaaaacgagggtcaagtaaatagttcttgctcataggtcttgctgcctccaaaccaggaattacattaaattgtgctaatacaaatgaacaaacaaccaaaaaacagaaaaatatgctactttcaagtttcaagtaaacaattggtttttcaagatttaaaaagatgagtttcaacacattaaacaaagacactgaagctgttttttcctagcacgtgtacgatgtactaatatcctatgtgcattattagaactaaaaaaaatttagttcaaaaaaacttatctttttaaagcatctttgctctacttcataggtttctgcaaattatattttccccaaacatgaacacaacatttgatctattcatttattttactttctaaggaattgatagaaatataaatgtacatatacctaaaaagtggctatcctacatatgacagcccagaatttactaactccataggttttctggatatttcaagcacacattaa

SEQ ID NO: 471754 - DNA, 1000 bp, Homo Sapiens; identical to SEQ ID NO: 341081

SEQ ID NO: 471755 - DNA, 1000 bp, Homo Sapiens
gtagaataaaatactttaaatggtttaatattgtaaaccagcccccctcccacacacactttttaataatgggttaaacttttccctttctgtaaggccatagctggttttctgactagttgcctaaacatgtttctcatataagcgaaactgaacatgctgctgctattaatcatcataaactgtaaaatgtggttttctggaaaactggtactttgggagttttataatccttttggagtctaagccagcacatctctgtgagttcattctagaaaatgtgctttgtctttatctttagtaatccaagaccactctaaaattaaggccatcagggaaatagcaaactgatgatgcattttcttatagtgcttttttcacactactgcttgattgacagatctttctgaaccattttcatcaggcactttcatcatctgaatcaaatccaaagagtgtctgacatttcttttgtgcaagatgagcctcaagtgcttctgcattacagtaggtggtcaggcatttgccacatcttaatcttttcactgattttttatacacgttatcttgatcagaacaggcatctactctatcagtcagaaattttctgcgttttggcatactaagataccgttcatcaaggtaactgggaggcaatggtctgacgtatggttttgttaaaattaagccatatgaagtatgtacacttgtcagatttggtttggaaggtgcctgagatactggcaaggtgttgtgttcttgtggtacaacactgggcaaaatggaaccattttctgtcctgattctgtttgtatcaattttcaaagcaggatctgatgaaactaaaggtgtttgctctatttcactgtgtccattgactatatcactactactacaattattttcagaatttggctctatgtcaggcatcttttggtctatcaagcttatatttgaaacagtgtcatcagaacgttcgtttccattctgaactaaactg

SEQ ID NO: 471756 - DNA, 1000 bp, Homo Sapiens; identical to SEQ ID NO: 159764

SEQ ID NO: 471757 - DNA, 1000 bp, Homo Sapiens
ttttttttttttttttcggaatacatttctttcttaatctttgtgagtacataccaccatactggtggcaatggcggtgagagcctctgtggaccagggaagctgtggtgtgagttccatgctagctctataagccaggctctggggcagcatccaagacgctctgtattagatactgaccagtctcatgtgccactggtgaggaggaagacaacgtgcttttcccaaagggcgatgatctccccagatgatgacccttctcaggaggcaggagcgctttcccggaataaccttttggctccttattcagctgctgcagcagatactcattagttaccaccagggatctctgactttcatggagaatggcaactgtcttctccagctttttcagctgggcaagctcctggttcaggcaagccacctgcatggtcagctgttggtttttgtgcagaagatcatcataagtatgtgactgttgcccactcacaattgagatggcagcaccttcctccaactgttgaattttttctgacaaaatgaggttttcctccagcactctgaccagtttttgcttcaaactttccatgtcattagggaccagctgcgcagcctccttcagttcaagctccctcctgcagaatgctttcatcgtgtcttcaggatgtgagcaacacctcggctgagaaggagccgggactaccaaagacagaagcaaatctcgggcaggaccgagaaacttcttgttgaggaggagggagccggagccattccagtgcttatccacaagctccaggagctgtctgaggacagtggccacatggggggttctggcagagatggggggactgtggtttccagccaaaccgtgcaaactacccaggtcactagagagaggctcgctgcctgtagcatcttggaaaccatgctttagattcaggttggcaaggatattgtccttccatttgaatcctctcttcgatgggcttagtgacctctt

SEQ ID NO: 471758 - DNA, 1000 bp, Homo Sapiens; identical to SEQ ID NO: 159766

SEQ ID NO: 471759 - DNA, 1000 bp, Homo Sapiens; identical to SEQ ID NO: 341083

SEQ ID NO: 471760 - DNA, 1000 bp, Homo Sapiens; identical to SEQ ID NO: 341084

SEQ ID NO: 471761 - DNA, 1000 bp, Homo Sapiens; identical to SEQ ID NO: 341086

SEQ ID NO: 471762 - DNA, 1000 bp, Homo Sapiens; identical to SEQ ID NO: 159768

SEQ ID NO: 471763 - DNA, 1000 bp, Homo Sapiens; identical to SEQ ID NO: 159769

SEQ ID NO: 471764 - DNA, 1000 bp, Homo Sapiens
atttgtcttttttttttttttttaattttagagaaacgatcttgctctgtcgcccaggctggagtgcagtggcttgatcgtacctcactgcagccctgaactcctgggctcaagcagtcctcctgcctcagcctcttgagtagctggaaccgcaggtatgtacaggtatgtaccgccacatttggtcattaaaaaaaaattgtagagatgggggtctcactatgttgcccaggttggtcttgaactctcagcttcaagcgacccttagcctgagcctcccaaagtgcgaggattacagttgtgagcccccatgcctggctgccatttagtttctgatgatcattttcctgcctttttttttgggtgcaaaaaaaatggttttagtcctcagcatcttacctgcatcaggttcaccaaggggccccagcccgatggctccctgcctcaaagcagtggaccatccatctctcccaggatggctcggtagcacctgagagcgcatgcagatagcctgggatttgagaaaaaccatgaacccagacagatcacagcttgcagagctcagggtcccttgctgtcctctgagagcagtgacctcccagaatcttcctgctggtccaggtactgtgaagcctcaggccccacacccaccctctgccttccatccttgcagctgggttgcacagcagtactgcccaaatgagatgcccctgcccgggctggtgccaacattcagaccacatggaaggaaaagtgttctgtttattggtctggcttggtctcctgtgcgtctctcagaacgctgctctgcccttgtgggctcaggggtcgcagtggtggtcacactggggcctgcctctgctgcccacctggaagtggcctcagtcagtcttcctgaaccctgtcagcctaaacttctggaagagggggatgaagccttggaggacgctgtggatacggtacactagtccgaagtagatgccaacggtttccagggagg

SEQ ID NO: 471765 - DNA, 1000 bp, Homo Sapiens; identical to SEQ ID NO: 341089

SEQ ID NO: 471766 - DNA, 1000 bp, Homo Sapiens
atattaactttccaaagcatccaaaactttcatgatctgctgttttatggctttagttgcatcccctgcatttggaatcaaatacctttcgattgccaagatttctattcctgaagcactgctatttccatacttgaaggtaatgagttcaggatgtttttttttggatgtaattttaactacagaattcagcgcttgtcgagactgtatataagccaatcctttccgtgaaacaatctcccttaaacagtacatatgtgttgcagtaaccaacagatgactgggaaacatgtgtccactttcttttacttctttacaaggaaaatgatgtttgacatctggtttgtttatccaagtctgaatgtttacaacctcttttctatcatcatctgacattgaagaactgtcaatttcatctgtgtcgtattcttcttcatccccaatgctgaaaacaggctttacgccacggtaaggcttgcccactctgtcactgctgctcacatgccgatccacaggagttgatgtattctctataaaactgataactttttccctgacattaacggattttgtcttcaaagccacagtcattttatttactagtgatttcattcctctatcacttgagccattaggagattcaccatcaacagaattgatactgctccttgagcctgaggtactagcaatccaatggccatatccattttctggtccatccacattaatgtctgccaggtgctgctgcagtgccataaatcctccactggcaatactcacatattctttgtttttctgtaaaaagtgtgccaggaccatgttcatatacatgtcttcttcctccctgccactgcccataaaacagaggtgctccccaccagctatggagccagactcaatggactgcttctgtgcttccagcaaggattttactgactgtgcaaactcagatggattctgaagcatcaggtctgaatctgagtggaaagcagttgataaa

SEQ ID NO: 471767 - DNA, 1000 bp, Homo Sapiens; identical to SEQ ID NO: 159770

SEQ ID NO: 471768 - DNA, 1000 bp, Homo Sapiens; identical to SEQ ID NO: 341091

SEQ ID NO: 471769 - DNA, 1000 bp, Homo Sapiens; identical to SEQ ID NO: 341092

SEQ ID NO: 471770 - DNA, 1000 bp, Homo Sapiens; identical to SEQ ID NO: 341093

SEQ ID NO: 471771 - DNA, 1000 bp, Homo Sapiens; identical to SEQ ID NO: 159771

SEQ ID NO: 471772 - DNA, 1000 bp, Homo Sapiens; identical to SEQ ID NO: 159772

SEQ ID NO: 471773 - DNA, 1000 bp, Homo Sapiens; identical to SEQ ID NO: 159773

SEQ ID NO: 471774 - DNA, 1000 bp, Homo Sapiens; identical to SEQ ID NO: 341100

SEQ ID NO: 471775 - DNA, 1000 bp, Homo Sapiens
gctttttaacttgtgtgtgtgtgttttttaataggtcccacgtgatttatgctttaaagaagctctgttttccaggatttgtttcaatatttagagctccttttatcagttcttgtagtggtggcttggtgtgaattatcttggcatttgtttgtctgaagatgactgtatctttccttcaaatatgatgcttagtttcgctgtatacaaaattcttggctgataattgttttgtttgagggggctgaagatagggccccaattctgtcttagcttgtagggtttctgctgagaaatctgctgttaatctgatagatttttcctttgtaagttacctggtgcttctgctcacagctcttaaaatggtttcctttggataacctgatgacagtgtacctaggtgaagatcttttggtgatgaatttcctgggtgatctttgtgcttcttgtatttggatgtctaggtctctagcaaggccagggaagttttcctcaattattcccccaaatatgttttccaggcttttagaattctcttcttcctcaggaacattgattattcttaggtttggttgtttaacataatcccagacttcttggaggctttgttcatattttcttattaatttttctttgtctttgttgaattgggttaattcgaagaccttgtctttaagctctgaatttttttcttctactagttcaattctattgctgagactttccagagcattttgcatttctaaaagtgtgtccaaagtttcttgaatttttgattgtttttactttaagccatctatttccttgaatatttctctcttcacttcttgtaacattttttggattttcttgcattgggctttgcctttctctggcctctccctgattagcttaataacctcctgaattctttttcaggtaaatcagggatttcttcttggtttggatccattgccggtgaactagtattatattttggggggtgttgaagagccttgtt

SEQ ID NO: 471776 - DNA, 1000 bp, Homo Sapiens; identical to SEQ ID NO: 341102

SEQ ID NO: 471777 - DNA, 1000 bp, Homo Sapiens; identical to SEQ ID NO: 341103

SEQ ID NO: 471778 - DNA, 1000 bp, Homo Sapiens; identical to SEQ ID NO: 341105

SEQ ID NO: 471779 - DNA, 1000 bp, Homo Sapiens; identical to SEQ ID NO: 159776

SEQ ID NO: 471780 - DNA, 1000 bp, Homo Sapiens
cttgggttctactttatttcttccccatgtattcctttcatgtgttctataacaacagttgatgtaaaacaatttgtgtcaacaagaatcttaactgattaaaagggataaaccccacatacaaattaaaagatgcccaaaataaatggctattgaaattttgaaaggaacaaacaaaaaagaaagatgattttaagtgtttctacttgttgggaaaatagtcatctctatccagaaatagcatatgttaaaataaaaatcaagtttatattaggcttactgttcgtttaaactgcatatgctttggtaatttttcattcatttctaatagattacaaaattcactcctcaaagctttgatttgctctctcttccgtgcctttatttctcccacttctttcattaacttgtcatgttctctttttctcctagcattctcgatactgtaggctttgggatcttcaatgtcttctggaattggctctgtttcaattccaaacctgggagatggaactttggccttcatgtctttccttagcataaattcagaaaaaatgttgaaaacaaagatattgccatctgctccagcagtcaccaagaaacgatcatcaaagctattagcaatacttttaatacatccataattattgtcatgcatattgaagtgccagtagtccaccaaactggtcaatgaaggatcattttgatttaggacatagactcgaattgctccatttttcattccacaaaacatcataactttgttaatgttgaaagtgatagtttggatgggattgtcctctgtatccgcaagataacggacatcaataggttcatctttttgttctttgaaatcactgctttcatcacaaggggggaactcacagtgatatagaaaaccagaatcatagccacccaaagaaacccagaacttccctggctctgagtaaaatccacagaggatgggagagggggttgacggaataaatatttcaggtaa

SEQ ID NO: 471781 - DNA, 1000 bp, Homo Sapiens; identical to SEQ ID NO: 341106

SEQ ID NO: 471782 - DNA, 1000 bp, Homo Sapiens; identical to SEQ ID NO: 159777

SEQ ID NO: 471783 - DNA, 1000 bp, Homo Sapiens
acaagttttcataagagtactttacttgtggatttcttggctaaatgtattaacatttgtttcttctcactaaaagtccacattttcaacaaagctgtatgtgtaagattgatagtttcattccacttgttcttttcgtaactggtgtaagccaccaggttctccgtgtactgcaagatcgactttacaaactttaggtactgctgatactcatgcgcattcttcccacaaacagcatgaatgttgaccaactccagcgcaatgagtaacagtatcaggctgagcacaggggacagtagtctgatactactccacatacgcaggtagttctgccgctggcgagaccgcagcgtcctttccacccactgcctgtgtctcagctctgaggcaacggtgacctggctggacacacggcggcactgttcgctgatgcttcggagcacaaccagcacttccagcacaatcctggggcagaacagggtgggaacaggtgtgctgcagagctcacggagaagctggggccacgtctcagtaggaagacgatccaagtcctttaacacacaacgattctcaggcatatggtgatacagctcatccgtcatttttgtaatcaaagagtggcaggcatttgtttcagaattatcttctaatctgacggcttgccgagtgagttcttcggggaaaggcagcagagcccaaaccctgatgctctcctcacagctcagcacctgttttttaagctgaaaaaccggatgacagcgagaactatagccttctgcaagactaatcaacaattctacggctgatttttccttaaaaactgatagcagacagtcatcaacgaatctgagtagcagtacaagagaaaatgcaagcaactgattagttgtttcttttgaaaattcatgtaagttgatctccccgtggcttaaatgatctcttatgcggggaccctcctgatggttcaggaaatcccagagaaattccatagcaggctctc

SEQ ID NO: 471784 - DNA, 1000 bp, Homo Sapiens
ttttttttttttttttatcttttgtatcacaatttattcaaagtttatcagcataatttaatgacatttcaggttaaaattaaaatgagtataagaagttatagtcaaatatttatttgtattagcaattcaataaacaaacagaagctccatcacttttaagtagtattcatttagaggagtaataattggatgggaaggtggtgagcttagtagctcttacatggtgttctccaatctacaaaaacttttttccccttcaaacaacacataataataaagctaacaattatatagtgtttgccaagtaccagatactcatcaacatactttacagatttgaactaatttcaaccacacaataaccatgtgaggtagatgccatcataaactccattttgttaatgaggggcctgacacagagggcttaggaacttgtccaaagccacacaaataaaatgaagcagaggtgggatttaacccatgcacattgacttcagagtatacacacaaataaaaagctgttttgtttctcctgcatagcaaagtaataaacagtactatcaggtgggaatgggtaaaatttacatttgaatagtggtttcgttatttcaaagttttggaaacaattgcaacaaacattgtactggcagttctgtttcagttttcttttttcttacaaatttaaattaaatttcttttttagagatgggaccttgctatgttgcctaggctggtagatttgcactcttgggctaagtgaccctcctacttcagccgccccagcagctgggattatagtagtgcgccaccctgcctggcttaatttcagttttcttaaaaaaaaaaaaaaaaaaaaaaaactagcatgcctgtcattttattttgcctactggaaaccaccagttaaaacaagaagaaaacaggaaacctccagttaagagggttttagaaaagtgtatttcagaaaaaaaagttgtacattcaaaagagtggttgt

SEQ ID NO: 471785 - DNA, 1000 bp, Homo Sapiens; identical to SEQ ID NO: 341108

SEQ ID NO: 471786 - DNA, 1000 bp, Homo Sapiens; identical to SEQ ID NO: 159778

SEQ ID NO: 471787 - DNA, 1000 bp, Homo Sapiens; identical to SEQ ID NO: 341110

SEQ ID NO: 471788 - DNA, 1000 bp, Homo Sapiens; identical to SEQ ID NO: 341111

SEQ ID NO: 471789 - DNA, 1000 bp, Homo Sapiens
gattcaaagacatgcatttttttcatcagcagttttataataatcacaattcctaaaccaagcactttgtggaaatttgctccttgctatgtgttttttccttacaaagactttccaccagtaagattgttacaatgtaaggtaagaaaacagtgtgaactatgtcacgaatagttaatacagtatacagtattaagatagtttttctggtctctaaagaaatggtactttagaattcagtgtgtctcagaaataattctgaccattaagtaaacatcaaaattttaataaataacataaatgaaaaaacaaacaccttttaaaaattgcttatacctaacaaaacaatttctttgatgaagggtctggttggctttatcttggcagtgttcatttttatacaatttttgaattgcatttactccattctgatgaaattccacctctttggaatcacagaagagatgaaaccaatactgctacaatattgtgccttcctgaaatgcttctatccacttctgagccgaatgagcatcctctgctttgaatacataaaataacatgtttttgtgcagtaactgaaatactttagactcggaattctcatctttaacttgaataacagtgaatcctaataaaggctgactctccaaagcggccacgtcctcacttgcagcatatgtatatagtactttattttttatgacaaaccaaaagtgtttccagggttttttattgccctttgatctgtacaagtagccactcatagaagaatcctctgtgtttgctgatacttctttgagagcagctgggatttttttctgtttcctccctgatggaatgctatgtaagactgatgataaggcacttgaaggagatttgtgatttccaggagatccaatcctaggggagtgctggtgatctaatttctgcagttcttggaaacaatgttcacatactcttgctggttgatttttcaggtaatctaagccatacttat

SEQ ID NO: 471790 - DNA, 1000 bp, Homo Sapiens; identical to SEQ ID NO: 341112

SEQ ID NO: 471791 - DNA, 1000 bp, Homo Sapiens; identical to SEQ ID NO: 341113

SEQ ID NO: 471792 - DNA, 1000 bp, Homo Sapiens
ttttttttttttttttttgacttcaaacatcctgcaacctttaatatatatcatgttgtgtgagttttaacatatttgggcttgcatttgttctacaatgtgtaatatgaaaagtttatcagcacaactagactgaattattcctcacataaatccttggatgtgttacagttttgatccttggttaatagcttcaacatgcacaaaatatacaaagatgtttacacattttgatgtctagtgagttgtgagacctaaatgaagcctctgccacacagttaggtgtatatgatttctctttagcatggactctgatgtcaatgaatgcttgaacttgtgatgaagggtttgctgtactcgtaaggattctctcaagaatgaaattctctgatgctgtgtaggagtgaattgtgactgaaaaccttgccacatttattatacttgtatggtttctctctgatataaattctttgatgactcacaggatttaaactttgactgaagaccttgccatattaatttcttttataaggtttctccttagtatggataatttgatgtctgaagaggtttgggcgcacactaaaggacttcccacaatcactacatttgtaaggtttctttccagtatggattatctgatgtctagtgaggtttgggcgcacactaaaggatttgccacactcattacatttgtaaggtttttctccagtatggatgacctgatgggtagttaggcttgaatgcacactgaagcctttgccacattgattacatttgtaaggcttctctccagtatggatgacctgatgggtagttaagttcgaatgcacactaaaggctttcccacactcattacacttgtaaggtttctctccagtatgaactctccgatgactcgcaaggtgtgaattgtaactgaaaaccttaccacattcattgcatttgtaaggtttctctccagtatgaattctccaatgccttgcaaggcttgaagtct

SEQ ID NO: 471793 - DNA, 1000 bp, Homo Sapiens; identical to SEQ ID NO: 341114

SEQ ID NO: 471794 - DNA, 1000 bp, Homo Sapiens; identical to SEQ ID NO: 159780

SEQ ID NO: 471795 - DNA, 1000 bp, Homo Sapiens; identical to SEQ ID NO: 341116

SEQ ID NO: 471796 - DNA, 1000 bp, Homo Sapiens; identical to SEQ ID NO: 159781

SEQ ID NO: 471797 - DNA, 1000 bp, Homo Sapiens; identical to SEQ ID NO: 341117

SEQ ID NO: 471798 - DNA, 1000 bp, Homo Sapiens; identical to SEQ ID NO: 341118

SEQ ID NO: 471799 - DNA, 1000 bp, Homo Sapiens; identical to SEQ ID NO: 341120

SEQ ID NO: 471800 - DNA, 1000 bp, Homo Sapiens; identical to SEQ ID NO: 341121

SEQ ID NO: 471801 - DNA, 1000 bp, Homo Sapiens; identical to SEQ ID NO: 159782

SEQ ID NO: 471802 - DNA, 1000 bp, Homo Sapiens; identical to SEQ ID NO: 159783

SEQ ID NO: 471803 - DNA, 1000 bp, Homo Sapiens; identical to SEQ ID NO: 341122

SEQ ID NO: 471804 - DNA, 1000 bp, Homo Sapiens; identical to SEQ ID NO: 159784

SEQ ID NO: 471805 - DNA, 1000 bp, Homo Sapiens; identical to SEQ ID NO: 341124

SEQ ID NO: 471806 - DNA, 1000 bp, Homo Sapiens; identical to SEQ ID NO: 341125

SEQ ID NO: 471807 - DNA, 1000 bp, Homo Sapiens; identical to SEQ ID NO: 159786

SEQ ID NO: 471808 - DNA, 1000 bp, Homo Sapiens; identical to SEQ ID NO: 341127

SEQ ID NO: 471809 - DNA, 1000 bp, Homo Sapiens
tttttttttttttttttttcactgcaggatttgtttatttcacactcacccttgaggcccggcccgcgcccgtgccctccctctccctgcgccggggccgcggagctgcagagtccgcagaggggtggaggcaagagaggggggcagtgtgtccaggaccgagcgggtggggcgtctgcagagggtgagagcagcgagtggtctcagggcgcccaggactggtcccgatgccatcacagttcccaactcggtaaagacccggggggcaacaatcccaaaagaaggcactagcactcggggcgcgcctggacaccccccccgttccctctcagagcgcttacgtccacggggacgggggagagaagtcgcccaatcacgccacgagcgtaggcctccagggatgcggctcgcgcgtgagcttgagggtataggtgcgcaggcgcgggcagtgcgcgcggaaggcgtccagcaccgagtggctcaccacgcagaaacaatgcacctcgcgcagggccgcgcagcgcgccgccagctcctccagcgcggcgttcagctcggccgaagcggctgcgcgcacctcgagcgcgcacagggttgcggcgtagtggtgtgctgcgaagcgcactgggcctacggtgtcgcctgagaggttgaggcgcagcgcagccacggggacggctggctgcaggacgcgcgtcacgctctcagcgggcagcgcgggctccagctccagctccactgccagcccagggtggcggcggcgcaacgcgacccaggcttcgttgggcagcggggacgcgcgtgcatcttcggggcacgcgcaccgcagagccaagagcgcgaaaggcgctcggtctggcgccgccagtgcttcgaggatggcgtgcgacaaactggctaggtgcaggccgagagcgcgcaggcgcgggcaggcctccagtagctcgagcactgagccgggacccacgctgcccactagggtactgttgtccagaaaaag

SEQ ID NO: 471810 - DNA, 1000 bp, Homo Sapiens; identical to SEQ ID NO: 341128

SEQ ID NO: 471811 - DNA, 1000 bp, Homo Sapiens; identical to SEQ ID NO: 159787

SEQ ID NO: 471812 - DNA, 1000 bp, Homo Sapiens; identical to SEQ ID NO: 159788

SEQ ID NO: 471813 - DNA, 1000 bp, Homo Sapiens; identical to SEQ ID NO: 159789

SEQ ID NO: 471814 - DNA, 1000 bp, Homo Sapiens; identical to SEQ ID NO: 159790

SEQ ID NO: 471815 - DNA, 1000 bp, Homo Sapiens; identical to SEQ ID NO: 159791

SEQ ID NO: 471816 - DNA, 1000 bp, Homo Sapiens
ttttttttttttttttttttttttttttttttttttttttttatgatgtgagagggtctgatgttaaagtttgggcagggggacacttgccatatatcacaggtgctttctccttcactgaactgtttaacaaaacgaaactcagttgaaccgaagctaaagacaactacaaccatctttcccagttcttttgaataaatcaaggaataattgtaagtgcttccctgttccctgtcctagccatttctccaagcctgtactcaggctccctctgtgatcaacagagaagactgtccatttggggagggaagtcctcatttgcaaccaattctctttcaccctgactgacttttgctagattgcatcttacttgttattcaaagagtagtctaaagagcatgagccatttgcatttggaaaatggcatttgtgtaaaaggtgacattgccatggttttacacactttcctccagtacgtaaaaactatctccatgcccccatctctccgtttgatttataacttgtaattagcatatttttaagctcccaagtaccagtttctcagctgaagatgacaaatggctcagttttagacactcaatttaggagatgggattctcaagccacacacacaaaaaatctaatgagcacgttacataatttttagtataaatgctgagaaattcatttaaaggtaaagtcttatttgccaagctatttaagaagagtgaattaggggttaatgttttatgaagttctctgctttgtgcaggtaattatttctctctttaaaaaatctagtaatttgattgtattatgcaacatcagatctgcaggtacaaattatacacatgcatgttaatgagcaggttttgtgcacattcaaaagtgaggcgttttaaatgtcagtcccaagaaacctacagaaatattctaaagaaagagagcatatttgcatgaacctgtcatgttcttaagcacatatacttctgttccccac

SEQ ID NO: 471817 - DNA, 1000 bp, Homo Sapiens; identical to SEQ ID NO: 159792

SEQ ID NO: 471818 - DNA, 1000 bp, Homo Sapiens; identical to SEQ ID NO: 159793

SEQ ID NO: 471819 - DNA, 1000 bp, Homo Sapiens; identical to SEQ ID NO: 341138

SEQ ID NO: 471820 - DNA, 1000 bp, Homo Sapiens; identical to SEQ ID NO: 341139

SEQ ID NO: 471821 - DNA, 1000 bp, Homo Sapiens
gtcaggaaaatatctgatctgattcttcccagcttgcttcccctacaacttaataagcccttcactaacccctgtatgtattaactgcaattgcctagcccggcatttacactctcaaaagatttaacgcaattacaatcaaaaaacacttgtcatatataacactttttcacatggaaataaattggtggtttaaggtttacaattcctttgaataaaatttcagttattagttacaaaatgctaagacagattgaggtctcaaagaaagaacttgagaaaattatgttttaaaggacttcacaaatatgaagcataattgttagaatcctgatacaaagtaacttttcctaggtttaaggttcaagtctgaattcttgaattgtccagcatcaacgagacctcatttatattctttttattttatcattactttcagattcagggtctctcgctattttgcccaggctggactcctgggctcaatggatcctccctgcctcagcctcctgagtggctgggattacaggcatgcaccatgcccggtgctacaaatttttttttaaaaaaagctcggaaacacaacgggcttgcatcgtgttggcagcaggtgcctcttagctggtgctggacagaaggggcttgcagtatttgcactgaatccaaacccggtacattgtcagttgcttccctcggttcacctgcagtcggcggtccaccaggttctgaactttttccagtccagcagtggtgaaaagcgtgtccagttcctcttgtgtgaagaagtaaactctggttccatcacctctcacatagaaatttccagatagacactgaccttttttaaaccgaagctgagccatgtcatagcggccgtaatctcgcagaagtaccatccccccaggtttcagaagcctgctcagcctgttgatagccttctgcatcttgtctggaacaattgctgaaagaacaaatatgagaatgataatatcaagactgc

SEQ ID NO: 471822 - DNA, 1000 bp, Homo Sapiens
tttttttttttttttgtctcatttcccaagactttatccaattctcagccactgagtagggtaccacctgggtcctagtgtgctagatagtttcaggcaggagcctgggagcaagggctgtgctggccctcttggcttatcagggggcttccctggtcatcctccagcagcaactgtcttagcgctgggtggccagcgtcctgggcttgtagacagggacatctttgtcccagagtgcaggctgccccttgataatgtcagctgccttctctgcgatcatgattgtgggggcgttcaggttgccgctgaccatgctaggcatgatggaggcatcgacgaccctgaggttttccaccccgaggacccttgtctgcggatccaccacggcagtgggatcggagggctggcccatcttacaggtgcacgaggggtggtaggcgctgtcggcttttgcccgcacaaaggcatctatctctttatctgactgaatgtggcttcctggctggagctctttccctcggaacggagccagggcttcctgtgcaaaaatttctctggtgagcttcacacacagacggaaatcctcaatatcagtttctgttgacaagtagttgggctggatcacagggtggtcttggggattggcacttctcagtttgagccagcccacactcgtgccccgcatgggccccacatgtacctggtaagcctcctgctgggtggggacccgcccgtggtcaatcacttgggatggcaggaaatggaactggatgtccgggtgggggaccccaggctggctgcggatgaacccacctgtttccagatgggcagtggctccctcccctgtgaatttccagagccactccagaccaatgcagaccttccgcaggggcttctgtgctgaatggagggtgatagggcgggtgcatgcctgctgaatgtagatctccaggtggtcttgcaggttctggccaaccccaggtaggtggcacaccacagg

SEQ ID NO: 471823 - DNA, 1000 bp, Homo Sapiens; identical to SEQ ID NO: 341140

SEQ ID NO: 471824 - DNA, 1000 bp, Homo Sapiens; identical to SEQ ID NO: 341142

SEQ ID NO: 471825 - DNA, 1000 bp, Homo Sapiens; identical to SEQ ID NO: 341143

SEQ ID NO: 471826 - DNA, 1000 bp, Homo Sapiens; identical to SEQ ID NO: 341144

SEQ ID NO: 471827 - DNA, 861 bp, Homo Sapiens; identical to SEQ ID NO: 159794

SEQ ID NO: 471828 - DNA, 1000 bp, Homo Sapiens
ggagacacaaaaagtcagagagactttatttaaatagagttaatttgaagtaaaccagagagttttgtgtgcagaagcattttgcttaacttagggccatcaccacattatgaactcgtgtgtgtgtgtgtgtgtgtgcacgcgcgcgtgcacaggctagtgtccttctgtgggtgtgtctgcgtgaggacccatccatgcatgtttgatctttatggcctccccctgtgcacctgcgcctatggataaggtatagtcttgtcttgattcccagtattcattctccttgaagaatcctgacagccttcagtcaccttcccttttccagtctcccaaaagcaatggcgccttaaatgtgcggtaaggatgaggtgagtcttgaggtagcctaggccacagctgccccttcaaggcaaggcctcagctgagttcaggaaataggagaacctggccccggagcaaccccagaagcgcaggaccacgaacgtcccgacccccagcagcaagaggccgcccagggccccaaagaagatgccgaagaacgcgtcgagtttcatgctcaggtgctcacagtgctcgccccaggccgtgtagatggagaaggacacacagctgcagcggggcccactgggcaggtgctggcactggcctccatggtcacagtagcccctactgcacggggacacgcaggtgaagccgctctgggggctgtagaccaggtcgtagcccttgtagccatcgcatctgaagtaagccttcagcgtgctcacgttcagggctgtcacatcgcgcacgtcttccccggaaatgggctggaagaccacgtcgttcctgggctcctcactcctccgtggaacgtggtataagaacgcctccaccaccgcggccagcagctggttgttcaggaagtcaatgaccgggccccgagggcggtactggaactccgagatgaccatccagtgttggatggggcttcccgaggccggtgctgcagaatcga

SEQ ID NO: 471829 - DNA, 1000 bp, Homo Sapiens; identical to SEQ ID NO: 159795

SEQ ID NO: 471830 - DNA, 1000 bp, Homo Sapiens; identical to SEQ ID NO: 341146

SEQ ID NO: 471831 - DNA, 1000 bp, Homo Sapiens; identical to SEQ ID NO: 341147

SEQ ID NO: 471832 - DNA, 1000 bp, Homo Sapiens; identical to SEQ ID NO: 341148

SEQ ID NO: 471833 - DNA, 1000 bp, Homo Sapiens; identical to SEQ ID NO: 341150

SEQ ID NO: 471834 - DNA, 1000 bp, Homo Sapiens; identical to SEQ ID NO: 341151

SEQ ID NO: 471835 - DNA, 1000 bp, Homo Sapiens
ttttttttttttagttgtgccaattatttattccccccaaccccccacaaaaacaaatttttttaaataaaaggaaaagaaataggatttttttttctaaacctgaataaaatgaccacttttaaaacaggtagtttaaaagggttacaaaacaagcaggcagtccaggtttcctgattaatgaagatggaggccgtgggttttcactgtctctaagtgacacacagggctttatagttctgcgtcaccctgaagcaagactgaatcttgatcatccaagagaagatcggtgtccacaacttcagcctcttccatgacacctcccaactgctggacgacgtcgtcgtcgaggatgtccacatccttgatgggtttgatcagactcagctggtccaggggcagcagccccggcgcccccacgggccccgtagtcctctcaatcgtggctgccatctcagctgcaaaagccgccttctgagccttttgcctctgttgttcctcctgctgcctgtgagttttcatgtgtgcatttcggcttttgatcttgaagaagactttgccacactccttgcaggggaagatggtggtggggtctgtctcgccgctggtggtgctgtgagagggtgagctctttaccgaacagtacccactctgggtgccaccaggcttctgcttcccagaggggatggcacctcgggccttggtcacctggttggtgcccccgtggatgcgggcatggccattcagtgcctgtcgggagctgaacacctggggaagaaagggagtgacatgacatctacagtcagccccacagttgggcatttcacagatgaaggagcctgagggctggcccagggcctgcaggggcggcccctccgtgggagccaggacggggacgggtggtggctccggggacttcggcacctcactctcttcttcttttgtggatttcctatcttcttccgggtcctcctcctcctcctcctctaactcttcttct

SEQ ID NO: 471836 - DNA, 1000 bp, Homo Sapiens; identical to SEQ ID NO: 341152

SEQ ID NO: 471837 - DNA, 1000 bp, Homo Sapiens
tttttttttttagtgcttattaaaatcttttttctttgacatgttagaaatgattgtccacggtattagctctcatcaggaatttgtttttttgaagatcctgaatgtttaccctgcctgctacaattttttcccatgatgggagactcaagatcgtctgaagccattggtcttcttttaactcagaggttgagtaccatgattctttgttcatgttcagccagcatttctccagtatattcccctgtgtttcagagagccgcaaggctgtgttcaggaagaggccacatttctgcccatctcccattaatatacagacgtaagccatcaggtggtagagccttgggcaaaagacagggccagtggtattttgagccaccagattctccaagttcttgagtagctcctccccactggcttgggcattctctgactgttctttgatttgtttttgaaggtgaagaacttgcccctccatgtacctagatattccgtcatagtaagtaagtgtcatggttcttcttggcaaaagatttttagctctattggaaaatttgtaaaagttgtcccattcctgaagtctggcataccagatagctacagaggaataaagtcccaggaggagtccactgtggaacttgaggattctgttgttttcgtattggtgtatgaattccaaacattcttcaaatgttctataaacaaaaccagaataaagcaggatgtccaagcagacaaaatagaaaaatgccttgctgaagatgtgttcctgtgttacagaaagctcccacagccgccccagcacctggatcaattgcgggtatctgctgttcagaaggagacatctgctaagtctgcagagggactgataatgtcggttgggattctggagcagtgcccacatctgaagggctcgggagcctaactcaatggccaaatccaggtgtcccattatgagcttgttgaagaccagtgtctcagccacgtatgccacgatttc

SEQ ID NO: 471838 - DNA, 1000 bp, Homo Sapiens; identical to SEQ ID NO: 341153

SEQ ID NO: 471839 - DNA, 1000 bp, Homo Sapiens
tttttttttttttttggaagaaaagtttaagagtttaattaaaaattaaatatattgtattaggtatattttttaaaagggcaaagtaaaaaatattaatacaatctggttgtagaaaatacactgcaagaaaaggagcaggtgcttcaaaaatgtaaccctggcaactctgccaacaggtcctgggctcgggcttcctggaaaagccccgggacacgtgggaactccaggcaccctcgcaggggccccccgagggcaggtggcccagaagcccaggaagggtggcctgggaggtggaacgggcgcaaggccgagcatcactggctcctagggggctgtgacatggaaccaaacatacacgcgtatgagagagcagagcggcagcgacgcggtcggatcggtcgcgggggctgcgggaggaagcgctgcagggacccgggcggcgccggcggcctagccggagatgcacgcgctgtaatagaccgcgctgctggcgtccgacagcgcggagatcaggctgctctcctctgggcaggacatggcgcgcgggcccagtttggccagtgccacgtggtacgggagcccgggggcgtcgggccgagtccggctgcagttgaggtactggtcgaactcggtgaggtccacgtcggcccacagatcggcggcgggccccagcggctcggcgctctccagcggcggggcctcgggcggcggcgacagcgggccggggtacgggccgggcgtgcccagggtgccgtagtacaggccagcgagcggcgccgcggggggcgcggtcctgagcgcctccgccaggggagccccgtagcaaccgccggggtcccgcgacaactcggtgggcgcgtagggcgcgcggaagggccgcagcgcgcagtcctcgggcgccgcgggcggtgggaagaaggcagcctcgccgggctccaggccgtccagaggcgagcgctcgggcgtgggcagccccaggccgtcgaactcggcgccc

SEQ ID NO: 471840 - DNA, 1000 bp, Homo Sapiens; identical to SEQ ID NO: 159796

SEQ ID NO: 471841 - DNA, 1000 bp, Homo Sapiens
tttttttttttttttttttttttttttttttttttttttttttttttttttttttttttttttttttttccaccatttacattgttttatattgatataacctagagaatgttccaggttaccctatagaggcagtgctcttgcttgtttacatgccaaagtgctctgtggaagaggtgacgaaagggtggcatccctgggtaagtaagtgcctatgaagaagtagcccaaccaatggctttgcagcacacaatgtcccagtggggaaactgagggccagagaggggaagggacatgtccaaggtcacatggtgatgggacacccagggctgggccactggtccgtgcctgacctccagtgggtctgccagccaagggtgaggaaggctgtggggaggggaggtggccaagtcaggcttccccctccacctcgtcctcgctggcacagccctcggacacagctctgcgccgggatgcccgcctctccaggtactctgccttaagctgctccagctcccgcagctcagcctccagccgctcccggtggaccatgcgcagctgccgcagctgtttcatgcggaaggggttcatgtcattgaaggcgatgttcatcagcttccggctgttggagatggtcttggtgaagaagcgcaggtactggtagatttccaggccattctgtagcctcaagatctccttctcgttgtacttcgtcccctcgtacaggaaggcatcccagacccgaaggaggatgttgctaatgagactgtccgcaaagaccacgaggaaccagttgaaggtgacgagggagagatccacgtggtgctgccccagatgggccatcagcctgggcagcttctccgagagcaggtcctggagcacccgctggtccacctgggatgccgtcagcgtgttgcagtagtaatcagcgggcatgatggtctccacaatggccaccaggcaccagaaggcgctctcctcctcctctaggaccagcagg

SEQ ID NO: 471842 - DNA, 1000 bp, Homo Sapiens; identical to SEQ ID NO: 159797

SEQ ID NO: 471843 - DNA, 1000 bp, Homo Sapiens; identical to SEQ ID NO: 159798

SEQ ID NO: 471844 - DNA, 1000 bp, Homo Sapiens; identical to SEQ ID NO: 341156

SEQ ID NO: 471845 - DNA, 1000 bp, Homo Sapiens; identical to SEQ ID NO: 159799

SEQ ID NO: 471846 - DNA, 1000 bp, Homo Sapiens; identical to SEQ ID NO: 159800

SEQ ID NO: 471847 - DNA, 1000 bp, Homo Sapiens
tatgggtgaagaatgatcttttattttcaaatgttttatgaagagactccgaacaaaataaaggctttcaaaaaggggggtaaaggggtgaggaaagcatgtgagagaaactgtaaccctgtaaacaacactaacgggttctttgaacaaatagttttgaacagaacagataagagtgagtcgaagcactgatttaactaattggtgatataatcaaatataatttccagtagttaatcagaaccacagtaataataactgaggaatagggtgtaaacaaataacaaataattaaaagccattttattgtcaatactgactgtcatacaactgaaacacttggaaggaaaatcacaagaatccacaaaaggacagattcagagaagtgcaagggacaaagtatctacaatagaaaatcatttcgtgacattgacttctttctgtccagctgtaaaagagggaacacagagtcaatatctatagagcacgtttcaattacactaagaatttaaaaaagaaaaagaaaataaagaaaattattgtattgcagagttttccaatgaccacacaattagccaggactttaagcttcttctcttggtcgtcatttcccttgctgtcattctgtgacctcctgggtgaatctgtggctgacacatcacaagtgtgttaacaattcttggcagttactgtcagtgctcagatctgtaggctggaaaagtctctgttcgatgaagcttcagagggctggaaacatcttgcaagcggtagagctgtcccgtgctgtgctgccgtgtgatgtgctgccagtaggcgctgcgaggcaggggcaccatggtgctcagcgaggcggcccgctcactcatcttcatctggagcatcgagtttttcacactctgtagcaagcgctcgtgctgctcggctatggccaaggcagcagagtggactttctgatagatggcctccccgtctcgggtctgaaagataaacagcccttcac

SEQ ID NO: 471848 - DNA, 1000 bp, Homo Sapiens; identical to SEQ ID NO: 341159

SEQ ID NO: 471849 - DNA, 1000 bp, Homo Sapiens; identical to SEQ ID NO: 159801

SEQ ID NO: 471850 - DNA, 1000 bp, Homo Sapiens; identical to SEQ ID NO: 341160

SEQ ID NO: 471851 - DNA, 1000 bp, Homo Sapiens; identical to SEQ ID NO: 341161

SEQ ID NO: 471852 - DNA, 1000 bp, Homo Sapiens; identical to SEQ ID NO: 159802

SEQ ID NO: 471853 - DNA, 1000 bp, Homo Sapiens; identical to SEQ ID NO: 341163

SEQ ID NO: 471854 - DNA, 1000 bp, Homo Sapiens; identical to SEQ ID NO: 159803

SEQ ID NO: 471855 - DNA, 1000 bp, Homo Sapiens
ttttttttttttttttttcagaaagcagatatgaagctttaattcaccataggcatttctccaaccattctgtacattaaactttcatgtcttcacacatatacatcttttataagacagttttcttagcaatatggtactctgtaccataccaacattccatttaactagttaagggtgtattatataacatgaaccactgattaaatataaatacagaagttgaatacataggttagaaagtttaaattttaaaaaaatttaagaaaggctaaataccatgaaagtttacatgtattctttaattctagacaccgtacaacagtgacaaccaattacaataaaatcacaattgcttttagatgacagtactttcagatttctaatacccaattactttcatttccacaatgtcaacttcatgctgcattttcatttctatagagcagacaagcttccagactgcagaccaagtttcttgtgtaataatactactatcttgatcatgaccacaggaaaccaattttatattccctgtactatagagatgagacattatttggtgtatatgaaactcttcagtggtggtgttcaagaatattcaaatagtagctgaaaatagggtttgctagagcagtccacatatttcattaaaagaaaaatgcccagtcaaaacatttagaaataaatatatagtacagcctttccctctcccaaatactacccaggaaaaaagttccaagctgacttaaaaaaaaaaaaacacacaaataaaaacaaaaacacctcaaaaaataaacattatatgatattctgagcagcaatcttcctgagtctattttcaattgaaacaaattctgcagccaatagtacactgattcagtatccacagtccagaaggagttcttgaacatctagttcatatccccaaaaaatgtgaaaagactcctaaacacccaagttattacacaatgggaagctgatattggcttgtattaaa

SEQ ID NO: 471856 - DNA, 1000 bp, Homo Sapiens
ttttttttttttttttttttttttttttgcatgcctgccagctcgtgcatcctcctttttatttcaagaggtgccagctccaaacaaagttacaaggttaagtgcaactccaagttcctgacacagctaatccctgctcggtcttcaaaaaatagaggtctgtaattcctttttgaacatgccttcgaagtggaggtctttggccatgagctcttcttcgacatcatctagtgcccactggtgatccgtcagctccaaagcttcccactctgtcttgaaagctttgtttgtgtctgcgggcatggccatggctgctcccgtcatctgctcctgcatcattcgtgattggtcagcggcattatcttggcccagaatcagagagtaaatgctccgaagcccaaatacattgaggaagtaccaggatgcagaactcacccaggatgcatctaatgtgagtagctcgattccttgctgtaacataggcttaaaacggagggtcagtggaaatgggaccttggttgtgacaaagcctgagaatgtcatgttgatccatccaccaataagaatcatagggaggacatttgttacattccctttcatcatgtctgtcaacatagtaggatcagtcataggagaaggtggcactaccttccgtttagtttttttgaaaaatccatcctctgggttgttgaaataatattttcgtgtcaagaaagactgtttgggaatgtattttccattttccctgaggactctgcttcgaattaggacttgactgtcagatacttgttcctgggtgagcttcttgtcgctctgcagcaggatggacacgtagtggcggatcatgcctacgaagaaagtgatgataacgatgggtaggaccacccagaggcggatgttggagtcgagcaacagttctggccctgccatcttcactgaaagctggttcccagtctggaatgggcgagcttctcttctccggggcacagttgcttctctt

SEQ ID NO: 471857 - DNA, 1000 bp, Homo Sapiens; identical to SEQ ID NO: 159804

SEQ ID NO: 471858 - DNA, 1000 bp, Homo Sapiens; identical to SEQ ID NO: 344071

SEQ ID NO: 471859 - DNA, 1000 bp, Homo Sapiens; identical to SEQ ID NO: 341167

SEQ ID NO: 471860 - DNA, 1000 bp, Homo Sapiens; identical to SEQ ID NO: 341168

SEQ ID NO: 471861 - DNA, 1000 bp, Homo Sapiens; identical to SEQ ID NO: 159805

SEQ ID NO: 471862 - DNA, 1000 bp, Homo Sapiens; identical to SEQ ID NO: 341169

SEQ ID NO: 471863 - DNA, 1000 bp, Homo Sapiens
tttttttttttttttttttgactgtgaggaatttttattttcctttcatgttcactaattgcaagctttcttcatttcggtaatatctaaaatgatctcctcttgtcggaggtagattttcccagtagcttctaactcctgacccagaagcggtgtattgcgcctcagcatggaggaggacgtgaaggcgtacggagtctgggagtagtacaccacgtaggtaggtttgtactggtttggctttgtgtactgtgttccccaggcaattcgaatccagactgcattctcctcagtttctctgaagctgactgtcacattttttaatgctctctgaagaattttcttgaacgaatttttaaattgtttcatatcaaaaaggtcaacatcttcacctggtcctttactcatctgaaaaacatcccaaactttctggtgctgatgaaattgcatataaatgatgtctaacagggcagcatcactgatacttgcacgcttttcctcacacagatggatcaagtgctgaactacagattcctttctctgtcggaaatttacagtctgcagttgattttcagacaaaaaatcccaggccttcaggattgttgtcagttcattcatggggattttcaagatggtcctcttgatgaactcagcaacagtctcatccatctctttggcacggcccacatctcctgcagtctcactcctcaagagctgttcccgctcgccgcgccttcaaagccaccaattgcagttcccgccgcctccaagctccgcccaccggagcacaagcatcaggctgtgtcttgggcacaggggactgcacgggggagcgactgaagcgaaggtcgccgagccccccacgccgctcttcttagaagtgtgcaaccttgcaccagtagtggacttacacataggctccgttaggacctggcttatgtgctcggcttgtggcttagacgctgccgtgccccagtggactcactgtgcctccccccac

SEQ ID NO: 471864 - DNA, 927 bp, Homo Sapiens; identical to SEQ ID NO: 341173

SEQ ID NO: 471865 - DNA, 1000 bp, Homo Sapiens; identical to SEQ ID NO: 159808

SEQ ID NO: 471866 - DNA, 1000 bp, Homo Sapiens; identical to SEQ ID NO: 341175

SEQ ID NO: 471867 - DNA, 918 bp, Homo Sapiens
ttttttttttttttttttttttttttttctttctcttttcctttaatattagggttctagaacagatcagacattttgtaatgatgcctgaaataaacactaaccacctcgacaagcaacaggttcaactcctggcagagatgtgtatccttattgatgaaaatgacaataaaattggagctgagaccaagaagaattgtcacctgaacgagaacattgagaaaggtgctgctttgaaacagtctttcttgtaaagcgatttgtgtaggcatttccgatttgctgagaagagcactctgttcaaggaagtgcagtcttcagtaataccgtattttctcgttggttccagttcgttaaatagtgtggtcattagcatctgctttgctgtcttcctgttacagcgatttctcttcacttcatgcctgttactcggcttcttcagagttattctggattcatagaagaggggactagccctgacatacagcagcagcctagccttaatatttctagagagtggagagaggcgggcaccatgcaggaagcgtgtgccttcaccactttccgagaactgaatgtccttgatagggaacttgactgccggaaaggggccaccagcatcaccatttccttcacttcgacggccaacttccttgcccagtgcagagctcttcctcaccatagccatgcagagacttgacaggagtggaagtgcaggtacttctggccactgcatcttggtatcagattggccaggaaaagccatgaagacacgccctgcgtgggttggggctccactcctttgcagggctgctgcaccgagccttcagcgttgtcttgtttaacaccaagaatcgaatcctgatacagcagaggtcggacacgaaagtcacgtttcctggtgagtccgttcaacca

SEQ ID NO: 471868 - DNA, 1000 bp, Homo Sapiens; identical to SEQ ID NO: 341176

SEQ ID NO: 471869 - DNA, 1000 bp, Homo Sapiens; identical to SEQ ID NO: 341177

SEQ ID NO: 471870 - DNA, 1000 bp, Homo Sapiens; identical to SEQ ID NO: 341178

SEQ ID NO: 471871 - DNA, 1000 bp, Homo Sapiens; identical to SEQ ID NO: 341179

SEQ ID NO: 471872 - DNA, 1000 bp, Homo Sapiens
ttttttttttttttttttttttttttttttttccaaaatcaaactgcttgctttactatactttattgatataaatacagcaaatctcaataagcaccagctaccattttaccactacacaagagaaacaaagtcaaaagaattatatattaatgcaaagagtaaacacagaatgctttcacttccactatagtcctctataacaaaacatcctacatactttgtacaatttgcttataattggttaaatatttgatatgaagcaaggttgatttttaatcaaacttctatttctcagtggaaaatgctctcttcatcagaggtggttgagttttcccgacatcaaacatcatttccaaaggtgggttattgagagaacaccaatcaggtatacggcccgtctgattataatattcctttgaaacagaacggctcccaagtatatcttgtaatgctccaaaaatagcccctcccaaccaggccacacaattagcttttgcaggtggagtatgaattcgaaatgtcttagtgccaagtgcttttttatattttggtttttctaccaaataccttatttctgcaagcaatctgtggagaaatcctggcaacatagaagtgccacctatgactaccaaattctctgctagttgcttcctggtgtctatcggacactgtataagggaatccaatattaaagtggcaactgattgctcttcattatcttgttcaaaaagaatttccacaactgaatctctgattgatccaaggatatgtaaaatcttctctccatctaatggatagtcaacatttgggggtggggagggacgctcattattcccatcaatattaaattttgctgcttggatttttagtcctcgcttcagatcacttacaaagcaagtacgcgctttaatgtcctctaagacaccttccggaactgaacccatcactgagggaaggctctgttctttagcaacacttgtgtcaacagtacattgtt

SEQ ID NO: 471873 - DNA, 1000 bp, Homo Sapiens
tttttttttttttttttttttttttgttggcatattattattagtttattatttataccgtgctctgttccaaaaaggatgtaaggaggcagcatggcttgagtaccaccttacttgatgagttaaggagttcacatccatctagagacacttgtctgagagactgtattagaagactacgggatggtttaggggagggaagagtgctaagaaaagcagtggcatcttgtccaacctcatcttctctctcctcatttgcaaatcatatctcaggagtaagccaaaaactggtgggagggttgcagcaggaaaaaattagcagtaaagcaggagagggttaattcttagaaaggtacacaatcccaccatccttcccacctctggtgcctactgcaagtaaagagtctggtcttctcccgacaggctctggctgggcctgtggtctcatgtggagaatagccagcgtggtcagtctgtaggcaggggcccactgctagctgcaggctccaggctctgcccctccatcacccctttcctcctcttcatccgactgtgccaagggcgtatctgctccatcatcacttggatttgggctatgcaggttggtggaggagtcggaggaggaggaggaggaggtcctagatgtggtcctgtctgatgtaggcaccggcaggctcagctcctccaaatggttgtccatcccagacgactggggggttggtggaggatcttcgcaaggcaagaacacatctgctgcatccgggtccccaaggtcaataagttctacttgctccagtgtgtccacattcacttccatggatgagatactacctatggggggtctctgcgactcgagatgcagatgggacagaggaaagacaaactctgtctctggctgtaaaatgtcctcgaagaatttttgccgctcccgaaggcggagctgctggcgctccagggcggcccgaggatttgggtccatgtcagctcctgcgggtagagg

SEQ ID NO: 471874 - DNA, 1000 bp, Homo Sapiens; identical to SEQ ID NO: 341180

SEQ ID NO: 471875 - DNA, 1000 bp, Homo Sapiens; identical to SEQ ID NO: 341181

SEQ ID NO: 471876 - DNA, 1000 bp, Homo Sapiens; identical to SEQ ID NO: 341182

SEQ ID NO: 471877 - DNA, 1000 bp, Homo Sapiens
gggcaggatttgtgtctgttttggtcactgctatatctctagtgcctaaaaaggccttgcacatagcaagtgcatgatggatatctgttgaatgaaggaaggaataaaatgaagacatcattgagctcctggatccagctatgcctgaagccagtcttgtgaaatgagataagaagatacacacccacaatgtctctccagcctacacctccatctccgagaccaggtcatggctggtggatttcttgctgtccacactttcgtcctggccctgggactccctcagggcccagtgacaggcagctggcagtgaccggcggagttgagccctcccaaaatacaggaagagcatgggattgaggcagctgtgagcgagggcaaggcccacgatgaggggttcagcccgcagggccctggccaggagtgcggagttcggggccgccacagtgagcaccagccccagcaggtggtagggtgcccagcagacaaaaaaccccaccacaatggctgtgcccagcggccggcagcgtcgggctgcccagcacaggagggcactgtggcagctggccacggccaccaggggccccaggaagccaaaaagaaaccggatggcagtcaccgcattctcggtgctggaggagccgccgtagtccaccacacactgcagccgggctgggaagtgctcctggtgcagccggcggtagatggcggagggcacggtgagcagcaaggccagtgtccaggctgccccacaggccacctgcaccccgcacgcccgctgaaccgtagaccaccaggcaggcccgagagccaggaagcagaggtcggcactgagagctgccaggagcaggacgctggcatacatggtcagcaggatgatggagggcagcgcccgacagcccactgcaccatacggccagtggcctccacgggcaatgggcactgccaggatgggcagagacaaacagcacagcaaatccgccacggccaggtggagcaa

SEQ ID NO: 471878 - DNA, 1000 bp, Homo Sapiens; identical to SEQ ID NO: 159810

SEQ ID NO: 471879 - DNA, 1000 bp, Homo Sapiens; identical to SEQ ID NO: 341184

SEQ ID NO: 471880 - DNA, 1000 bp, Homo Sapiens; identical to SEQ ID NO: 341185

SEQ ID NO: 471881 - DNA, 1000 bp, Homo Sapiens; identical to SEQ ID NO: 159811

SEQ ID NO: 471882 - DNA, 1000 bp, Homo Sapiens
tttttttttttttttttgaggtgaaagaaacagtgcagttttgttgctcacagggacccgtccccacacactggagagacttgaaggtgggggctctgcccatccactggggaatatctgggccagcctaaaagtctgtggggcctaggcctgggcaggctctgggggctgtggagccgaggagccaggcagagcggggtccttgggggccaagcccatgcgtcggatgctgtcctggtacttgcggcggccgagctccaagactgcgcgcacctcttcagccacgtcctgccggtcactctgctccagggcctgcaccaggagccccacagcccctggctgcccagcctggcgctcagcccaggagaagagcatgtgacggatctgctcatccagatcatcccggaactcgtgccggatgcgctgcacctcccggtaggacacccccaggtgcagggccacggctggccagtccagacccagacgcccagccacactcagcaggttgctctgcgtcagaaagccggtctcggcatctcccagattcaagggtgccaaggagaggccagccccccgccgtggcccctcggaccctcgaagtctcggcagcttgatgggcagagtggccatccacagggcgtctgcgcccttcctctgccgggcagcctcagcctcctcgggcacccgcacaggcaccgcgccacggtagaaggacacctggccccgcacagcctgagcctcccggtccagagtggtggtcacgtatacctccttcacattcttcaggtgcgagtagaagacaaagcagattctgccctccacacagtcagggcggtcagcatccacgtcgatgccgcgctcgaaggccgcaaagaactcttcgccctcgaacatctccaccgtgtcagagggctcggggccccggtaccgctccagcagccgccgaagggtggcgtccaccttgtttcggggcaggcactgcagcaggacctgctcaggg

SEQ ID NO: 471883 - DNA, 1000 bp, Homo Sapiens
ttttttttttttttttttttttttttttttttttttccactcagacacttatttaataactgtagaaatccaaaagaattagcatcaaatcttgaagtcgtgagtgaagctgcgggttggcttgactgggctcagccactgagctgcctcaaccggccaaggaacgggattatgatgactatgcggacttctatattgtcttcatctcattgtgtgtattatgtatttagtttcaataaagcatttgtaccaatggctctggagcttggaggaagactaaaggaatgtgtagtgattctgagtaagatgtagacctacgcagcagagctatgggggagaagattaacaaagtcctttcttctaatatcaggatagtcatgagttgcagtcccatccaaaaggtcattagggctaaaaggccctctgtgtctctgaactatgagattcttgctccctccgggggagccaaggagcttgcaactgggagtttgcagtgaatgagcaccatgacacagtcatttctgatccctctatccagctgttgtgaaaagatgaagcaaaggaggcaagaaaatgcttaatttagcagacaagagaatggacagtgtgatccttgtctgtgctagccattgggtgatgcaccacttttcagctccatgatgctacttgtttcccttcatatcctgtttccatttatgcccttcagttatggtctagaatcaaacaattctaaacctcagtgtcttatgaagctgacacttcaaaacctgcagaagcaggttgcctttgaggtatttagtcacaccaagtacaactagagctgtcatagacagtgtaggtttgcagagatccacctccttgcttactggcaattagggagttaatgctctaaaattaggcaaggagcctggactgttgccattttatggaagccacataagttgggcaggactccacaggagctgcccgtgacctgatgatagcaagagatttctatctc

SEQ ID NO: 471884 - DNA, 1000 bp, Homo Sapiens; identical to SEQ ID NO: 341188

SEQ ID NO: 471885 - DNA, 1000 bp, Homo Sapiens
tttttgttgcagctctcaaatcttgcagccctttacttcctttattaataacagtgttctgcattaattcgtgccacagtgtaatcaactatcaatgtgaccattagctccgccacaagtaaagatcgacaggatccaggctgcactgtgtgcacaacagcccaggcaggtgaagagtcgtgacatcgcaaaaaggaccacggtttattaccatctctaacgcccatgttccagcaaaccgaagaaaaacactgtttcttaaaactgcagaggaatacaaaattaaatactacaaaacaaaaatcagacaggaagacgaaacaatctacctcctcctaatggtaaaataatctgaaaggagtttaaaaataaatgaactaaaatttttataactattatcttttctgccaattttgaagatgtcttcaggtgccacaacgtggggacagaaagaataaatatcaatgtataacttctagagtgataataaacaacaggaccccatctcagatggatggattttttttcctactggagccaaaaaacaagctgaactctatgtacaacagacagactatacaactaggagcatttaaaaataataagactcctctctctgccttcttccaaagaatagaatatatatttaacagcacaaaagacgacaccacttgagcttcccctttagccaacaggaagaatttccacatataaaaattaaaaatttaaactttcaaatcattcatgttttaaacataatacagacttaaaaattcttcaacattgacccataatcccaccccagcacaaaaatcaaccccaaatccagacgtcacagttttttgttcctaaaaatcccacagcactgaacttgatcttcacatcaagctgacagcacgtaagaggcccatgccatgagcaatccccgagggaagaacggaagcacagtcaatgctgcagctcttatctacctgggcggcactggtgcacctctgaggtc

SEQ ID NO: 471886 - DNA, 1000 bp, Homo Sapiens; identical to SEQ ID NO: 159812

SEQ ID NO: 471887 - DNA, 1000 bp, Homo Sapiens; identical to SEQ ID NO: 341190

SEQ ID NO: 471888 - DNA, 1000 bp, Homo Sapiens
aaggaaagagggaaaaacaaacccaaaagaaactgaaaggagcacagcacagtgctcccgctgttctggagcactgggggactaatacatatggtatacccagtaaacaatgttgaacaacccaaaggccagagggaagaggaaccgggaccacttgtcgacctttgggacgtagtcaggattaaagagatcgaaggagaacccttcagtgaaggagcacccagggcttggggggcaactatcctcagactctgagctactgtccttctcttggccatgggccatgagctcatcatcattaaggccccaggtactgttagtatcacacttgaattgctccttaatggcaaggcagtcgctcttgtcattgttgtcatcaaggtcccagcctgcttcttgcacacccttctcgccatggtgaagcatgggcttcccactggggccatggccatggcgctcatccgagctcaagctctcattggaatcttcatggtcatgggtaacaccatggccatgggcttcgacacggttgcggatttcggtaggaataatactgtcatcagcctggaaaccattaaagcgaacaccatagctgtgccgggcctgctctgaggtggaggggagatcgctcaggctttctccagtggccaggggggcctggcctgagagagaagtgagtgggctgaggctttccgaggtggccagctgggcctgctcggaggtggacgtcaaagaaccgaggctttccgggcttgccaggggggcctgcgctggggtgatggggagagagctgactccgtcttccacgttaatcaggccatcctgcacgtttcctaccaccacttgctggtagcggtagcgggcaatgactcttcggggtctcctgtgtcgcctaggctggcgccgaggtcctcgactgtagaaaagatagttgatgtagacatactccagcaaggacaggaacacaaagaacaagcacacgaggatatagatatcaatg

SEQ ID NO: 471889 - DNA, 1000 bp, Homo Sapiens; identical to SEQ ID NO: 341192

SEQ ID NO: 471890 - DNA, 1000 bp, Homo Sapiens; identical to SEQ ID NO: 246532

SEQ ID NO: 471891 - DNA, 1000 bp, Homo Sapiens; identical to SEQ ID NO: 159814

SEQ ID NO: 471892 - DNA, 860 bp, Homo Sapiens; identical to SEQ ID NO: 341196

SEQ ID NO: 471893 - DNA, 1000 bp, Homo Sapiens; identical to SEQ ID NO: 341198

SEQ ID NO: 471894 - DNA, 1000 bp, Homo Sapiens; identical to SEQ ID NO: 341199

SEQ ID NO: 471895 - DNA, 1000 bp, Homo Sapiens
ttttttttttttttttttacaaactagatagaaacctttatttcacaactttatcatcattcacattctaaaaagacacggactgggggacacagctgaaaacagtgggaggccagatgctggcatcttccagacgggagcatagccatggtcactctagccgatgtctcctggggctctcaggcggcaaggaccagatgcaccactactgtccaatcccagttttacttagagccacctccttttttggggccattagtccttatttcatgccagattttcactagcggctccctgttcttccaaatcagttcatgaccgtaagtaacataccatattccaaaaagagctcccccaagatgtgccgcatgatcaaaaaatttccatcccaggatcattcctgctgtatccatggcgataatggctttcagggcattccctgctgtgaacgtgaacatcggaaggaaaataatggcaagcctcccttctgggatcttagtgcagacagctgcgaggactgtcatgatggcaccagatgcaccaagtgatggtccatatcttcctgtggcaactttacccacgtaactgacaaaattggaaataacacctgcagataggtacactgccatgaactgctcttgacccagaatgttcactatgctggaagagaagctccacaaaacatacatatttgctgccatgtgaaataaggagaaatgactgaatgttgacagcaacattggagaacaaaggacctttgaggctggattcgatgtgaaatatctgatcattgtccgctgcagagaaggtactctccataaacagaatacaaggacatttgcagctataatacctgtcacagtccgctggccatcacttaggttattccaccacttgttaatctcctttctgaagtctccttctttttgtggtcttatgctatccaaccaatcagcttttataccatcaaaataactctggaccctggatttcagtgatt

SEQ ID NO: 471896 - DNA, 1000 bp, Homo Sapiens; identical to SEQ ID NO: 159815

SEQ ID NO: 471897 - DNA, 1000 bp, Homo Sapiens; identical to SEQ ID NO: 341201

SEQ ID NO: 471898 - DNA, 1000 bp, Homo Sapiens; identical to SEQ ID NO: 157387

SEQ ID NO: 471899 - DNA, 1000 bp, Homo Sapiens; identical to SEQ ID NO: 159817

SEQ ID NO: 471900 - DNA, 1000 bp, Homo Sapiens; identical to SEQ ID NO: 341204

SEQ ID NO: 471901 - DNA, 1000 bp, Homo Sapiens; identical to SEQ ID NO: 341205

SEQ ID NO: 471902 - DNA, 1000 bp, Homo Sapiens; identical to SEQ ID NO: 159818

SEQ ID NO: 471903 - DNA, 1000 bp, Homo Sapiens; identical to SEQ ID NO: 341207

SEQ ID NO: 471904 - DNA, 1000 bp, Homo Sapiens
ttttttttttttttttttttgagattttaaaaattatttatttaacaactggtatgtacaaaatactatctatatgggaaagaaatacatacctgacctcaaagagcctacaataagttggtataaaagtatacagacacgcaaaatttacaaggcaattaaccacagttacatattgtagcaccagtgaattcaaagcactgaggtcaaatcaagagaagttgaagaaaaataaaaaagtacttgaagaagaaagtatttcagtgatgagatggatttcaaaaattgtgagggacaaagattagcaaacagaagaaaatgttttctagatagggaacaaaactgatgaaaagttatagattaaagtttaaagagtagatggggagggccatagccaagaggcaggaaggcatgaatcagcctttttgaatgactttgtataaatggtgaaatggaggaagtagaatagaatagagaagatattatctctgtctttaaaaagcatggagtctgattatgagatgcataactaagaaatgaaatagattttaaaagttaaaatttaaaagtaaagaaaaaaaaaggaaacctacaattcaatgacatgtgtagtccttaccttcctaataatgggtaagaactggaataagttactcctactctcccaccttagtgatccaaggaaaagcaagtagggaatggtccaccgtgactactggctccgggaaaccactatgagcatcctgcttataaagacagcttaactcaaaggtcgttgctctctgtctcagagaaccataccttaagaaactgaccaagccagacctgaggacttctctccagtgtgagttcgctggtggtgattaaaagtggaacgctgactaaaggctttcccacattcactacattcataaggtttctctccggtgtggactctctggtgtacaataagctgtgagctgtcactaaaagctttcccacaatcattgcatttataggg

SEQ ID NO: 471905 - DNA, 1000 bp, Homo Sapiens; identical to SEQ ID NO: 341208

SEQ ID NO: 471906 - DNA, 1000 bp, Homo Sapiens
ttttttttttttttttttaataaagcagaaatgtatttattaggcacccttgttcctcacagaggagcaagatccaggcctgagcgcctgggaagtctcttgaggttgcaggaatctccagagaaacataggcgctgcccagccaccaccccgagaacactatttggctggagtgtgaccgccgaggtgatcctggcaggaggctggggttggctcctcgactccacaaacactgaggagtgggtggggacacccatgacacccacccaaacactggcagagagggaggcccttccagatctggggcacatgttgctgggcctgccagggggaggaggagcctggagagtcccttgcccggggccaggtcctcagggccctccccaaatccgcccgcctctcctcgccaccgctgactcagtcccacacgtaggggtttctaaagacctgagagttcttgccgtctttcggcggtgtggccgcctggtggctctgggccgagtacatgtcttcagcccgcagggtcgagttggcactgcccatcacctggctgttggcggtggcccgtgggaggatgatgtcgtaagctccttcggacggaactttgtgcatcagggccatctcagtgggctggtacacactggtcagcagctgcccattgtacccgctgtatggtgacaccggcctcttagctgcaaccggctcatccatggaaaaggccttgttctccacgaacatgctctgacccttctgctctttcaggatggtctcatagcccacgccccgggtggggtacatgtccccctggtagctttgctctgggctggacttggtcacctgggagacctcggggatgacgtagaagaggacgaaggcccaggcattggcggcgagggcgatggccagcgtggggtcatcccaggtgggactgttgtgctgcttgttgccgtaagtatacatgacgatccacaccacccatatggcaacggaggtggctgtg

SEQ ID NO: 471907 - DNA, 1000 bp, Homo Sapiens
ttatactcctcctgcatcttgctgggggcttagtttagcctgtgggatgaaacactcttgtgtgggatcaacagtctgcggctgaatgggagtaccatatgaagttaatgctacatcctcctcagctccatcactgtctcgggctctggagagctcctggttctccacttggaagctgtgttggtaggctgtgacggggcaggcattgccttgtaaagggcactcctgtctacacgatctgtagagaatgcagagctcagggacgatgtacagcagcaggaaaacccatgcgttggtgaccagagcaatgcagacgaccgggtcgtcccactggggctgtcgctggaactgcgggttgcctctcaggagcatggagatccacaccacccagatgatgatggagaagagcacagtgataaagatgagccttccatgctgcttccagttctcacacgggccacagaaggtggctttggagacgaagaatgtgagggccatcaggaagaggacatagaccaggagtacaacaaagtccacattgagctggcagggtgtcatattcacaaacatcatacctctggtcatgatgagagtcacatactcagtggcaataatgatttgcaacagactgcaaccaatagcaatgcacagaattgtcgtccaggagaaggagacacaaccccgaaccagcttcactagattggaggcatgagctaagaggcatgagaaacagagagcaaagagaaccccaaagagaaagtagcgtacgggggcagtttgttgattgagctcgatgatgaaggcaaaagcgagtccgaagagccccaggacactcaggaggaagaggagctgggtggggaggacattccactggctgcagtcttggatctttcgcatgaggaagagaaatgctaagagtagcagaattgtgaccacgatgccaagtatggccagggactccagaatgatgccccatggcccctcggcgtcacagagaaga

SEQ ID NO: 471908 - DNA, 1000 bp, Homo Sapiens; identical to SEQ ID NO: 341209

SEQ ID NO: 471909 - DNA, 1000 bp, Homo Sapiens; identical to SEQ ID NO: 341211

SEQ ID NO: 471910 - DNA, 980 bp, Homo Sapiens
ccaggaaaaggaagtgtattgtgcctgtaaattcccagaactggagaagggagagacaataagcatctttattatccaaattctagaggaaatggctctgcataacagcagaacctactagctgccagggtggatgagaagtcactcctgagggtggcctccatgctggatctgcacaagggctctgtgagtttggcgcctgttggatgtcgggctgagcccagtctgcagggaacacagctggctggtcctggagctcccaggaggaggcctggccacaggtgccccctgtatacaattgtgaaggaaaagccttcctcccaggtatgaaaatgaccaaggctccttgctgggcagaggagtgtccccggcttcatcggggcaagcagccggccacagggtccggccggggaggcactggcacaaagttcatagggcagagcagcagcgggcacatcttctcgtgctccttcagtgcctctgtcaggtgcttcagctcctctgtcagcttcccgatctctctccgcagcatggtgttttcttgctccaggctctcatattcctcatggagcttgtcagccttctgggtctgcttcttccgacttctctgagcagcaactcggtttttttctctccttcggaccttcctgtcatcatcctcagggctctgctgctgcggctgcggctgcggctggttcccgggcgccgcgacgctcctctgcaggacgctgccggcggccgggagcccttgcgacatgccgggagctcctctggcccggcccgccccgccccgcccgcgcgccctgcccgtggggctgcctacgggcgctgtcccgccgccggcatcctcgtgccgcacccacggcctcgcgccggccccgccccctcaggcttcccgctctccccgctactccacgcgtcggcccagtgtccccgcgcgccagtcccggcagccgtccttcccgtcccacgtctgcccc

SEQ ID NO: 471911 - DNA, 1000 bp, Homo Sapiens
tttttttttttttttttttttttttaagtttaaatacttctatttttattaaagaaagtataaaacactggattctatattttcaaacactattattttaagaatcagtcaaatcagtccggtctcttcatactgccaacatgtccaatacttctgtcttactatatttctaaaaaatcttgaattctctaccccactagtacagaagacattaatgaaacttcttgggccttccttgaggtctttccatttttctttccatttcccttttccgttgatgtgcctcaaacctctcagccattgatacaagctcctctggaatactctgatttgctctttccagaatattaatcaattcagaggcaaccctccaatcatttctagtcaaagttgtaatggaaacaccagtcctccctgctcttcccgtgcgccctattcggtgtacgtattcttcaatattccgtggaaagtcaaaattatagacatgtgtaacgtcatggacatcaagtcctctagaggctagatcagttgcaattagtattctcactttgcctgttttaaagttctctaatgctttctcccgatctctctgttctctatctccatgcagagactctactgatatatttccaagtattaggtcacttgataagtgatccgcaacagcttttcgagaaacgaagacaatgactttgtctgtggatgacatactctgtagaaaagtttgcatgtgactccatttctcttcctcggtggttacaattatattttgcttcactgaacttacagcaactagatccaatgtaccaacatagacaatcattggttctttcaaataagattgtgcgaggcgatgaactgaatgaggccatgtagcactggtcataactgtctgcctatctgggcgcacatctaacaaaatcttcattatctggggttcaaatcccatgtccaacatcttgtctgcttcatctaaaaccaagtaggttatattcttcag

SEQ ID NO: 471912 - DNA, 1000 bp, Homo Sapiens; identical to SEQ ID NO: 341212

SEQ ID NO: 471913 - DNA, 1000 bp, Homo Sapiens
tttttttttttttttttttttacatctgagagcagaggctttatttacaatgacattcaaacaggatttagcaaaggatgcctcttcctgctcgcatcttagcagcatgggttgtacttcataaacagaaaagagaaatatcctgggagcaggaagtgaactcttttctcagataatgttctctaaatcccaacacgttccatgctcccggctcttagcaggtagttggtggacacttggttatagcagctgggtgccagatgcctgcatctcactgaggaatgtgttcagggaagatgtcaacactggccgggaaaaacatcaggctttcacctcactcatggcctccataaggcgagcgctgtttgtgactgctgtcgtcaggaaaatgaacctgtagcctttctctctgcccaggaaccggagggctgagatctcagagaatgtacaaccacccaagaacaccaccaagatgaggcgcagggactcactggaagccttgtcttccttagtcatatctgtgaatgcaaagtcactgcagttgagcagccgtaccacctcatcaaggccctgccagcttcgccgctctagcacctgctcaatgattcggcagctcaggggcacataagcaccactgaagacgtaagccatgtctcggggcactttcagatcatactcgccgtccacacgtgggatcaaattcagctttttgctgatggcacgaaaattgctcctcttggccagagaactgaaggcatcagtaatctttcctgcagccttgtcggtcaccagcttgctcactttactctccacggctgtgagggtgtccccgggggcctgctccgttaggagcccagctcttcgcagattggagaaggttagcaggtgctcagggccatagctctgcagatactgtgttttcagagatcggtaatccttggggatcaaaccattctcagtgatggacaaaaggcacatgaggcgcaggctttctataggc

SEQ ID NO: 471914 - DNA, 1000 bp, Homo Sapiens
ttttttttttttttttttttgagttttgcctggtatattaggttgctgctaaacattcctaggaagttgagaaggttcatccttgctgatcggtgattgaaattcagcaacatccctgtggctctgcagtgtgtgccaaggtcaaatcaaatcataacgacgtcctcaatcacctccctgtaaaccgggtgccagccaggcccgtgctcacacttcctgaaacaagttcaccatctgtgccaccgatgccagacagagctccctgcgactccgaaacgtgtttctcacttcccacaagggagccactctccaggagcagctcctgagcacaagggctacggctggggctggggcaggctcaagcattcgtgctgagtttcaacagcctgtgtggcgagcagctactgcgggacagcacgtcacctggatgctgagacggcggaacaacatgaaaacatccaccatgccagaaacgtcagcccacagatgctcctagaggaagatgcagcggacacgaagggcggtatgagaacaggagaaacacagacagctgccgccaccaccggctcacacgcagcctccgacatgaaaagaaagtgcttcaagagcttccactccactggtctggcttcccttcaaccagaaagggggcacaggcacccagcaagagcctgtgctggtgacacagaatgttctttctagagcccaggggacagccccatcctctgagctggtcacaactgatgtcaccttttccttcttgaagggacatgccaggatgcaggggaacaagttaaaaagcttttcctaatttgaggtgagagacaccactgaccgccacgatcagcaacttagcgtcgcctcccccggtctcatcttcttggcatgcccgtcgggcccaggcgggggactccggcgccgctgcttcttctctagctgctgctgcagtctctcctctttcttcttcaggtaggaggtcacgttgtcgaacgtggccttg

SEQ ID NO: 471915 - DNA, 1000 bp, Homo Sapiens; identical to SEQ ID NO: 341213

SEQ ID NO: 471916 - DNA, 1000 bp, Homo Sapiens
ttttttttttttttttttgctcatttacattttattatcattgttattactaataaatcaatagaaattgaataacaaaggaaaaagctcaagataaataatttcttccttgtgaattcaaacacatgcatacacacacatcctcctctgtgtgttacttcctcctcacattctgtcctacggtacaaatagttacacaaaagtctacaaaacgcgagtagcagaccccagctgtgtaaagctcaggctgattctcagtctagatcaccagcttctccacgctaagtgtacttgtggtttcatcctcttcatttgacccaaaatatcctgggaggtccagcatcctctgctcagcctcagtgaggccaaacgacgtattgtcatagaaggcaaactcagggtgagtggggaagctttgacacttgtcttttctacactgagaagggctcagagaactgaccctctggtagttatctttgggggatatgggagaagactgcttccttgagacactcttgtgactgggggacggtccccgacgagctctgtggggctctgttctctcaattccggccactaatcctgcctggtgatccccaaggtctggtttcctcaagggctgccccaaagtgtaggatttagggagagggtttaatggaccacgggttccacttgcctcttggaaatgctccagtttttcaggaaacaggtgggcacctcgactctgaggcctaaatctgtcctctgcctgctcgcaggtccgcgtcctagagctgtaggcaggggcctgccgtggagtcagagtggacatgctcctctctcggaacggccgggcctgcctggcttcatggaaactcgctgtcctcctgaaatgggcgttcctggcatggctcctttcggacgggccccctctgctgcccacgtgccttgcctgtgacttgcggatcagagtctggctggggcttatggcacaactggcctgagtcacatttagatccag

SEQ ID NO: 471917 - DNA, 1000 bp, Homo Sapiens; identical to SEQ ID NO: 341215

SEQ ID NO: 471918 - DNA, 1000 bp, Homo Sapiens; identical to SEQ ID NO: 341216

SEQ ID NO: 471919 - DNA, 1000 bp, Homo Sapiens; identical to SEQ ID NO: 341217

SEQ ID NO: 471920 - DNA, 1000 bp, Homo Sapiens
tcaagtttgagaaatgtagttttattaatagaagggcatgtcttaccatacacactgtccccagataaataaaatcccaacatctttgaaagcacacaaacacacagttttacagggtacaatacaaagtgaactttgatgatgttcttacttgcatttactaaaaatctgagaaagactgtaatcagtctctaaataattatcttgcgtaaagagaaaagtagagcacaatatatatatatcacaaaccaaatcacactctctgtaacattacaacatggaatttacttaatcaaaaataaaagcaaactggctgaagaaggctgtatcatttttttctcaatattacgctaatttctatttttggcatgaattattaaccttttccattagtaggcaaatgtgctctgcaaattctcggatggcaccacggccaccattacatttgcaaatgtatccaacagccttctgggcagtagaacaggcatcagcaggagcgccacttaggcccactctcttcaagcactcttcatcagacacttcatttccaagatatgccacttctttccagcacaggcccatttcttttctccattcatctacaactgctagcttgtctgatacactgacttccattttgcaatccagttttaaagaagacagcgtctgctttgaacaggccctttctgagattagcctcacctcaataccacttttctttaataaacttatcccaatagcatcttttacatcataagatattatttctttttggtctcctgatacataaatgtggccattggtgagacatccatcaatattgcaaaccaaaagttttatttccttaagcttctctttgccaaaatagccatatcttaatactctttgctctgcaataggccaatcaatatccacatctatatccacactatgttcagctcgcatttcgtagtatgccatttttccaccctgcaagtaacccatctctatcaaatgtctt

SEQ ID NO: 471921 - DNA, 1000 bp, Homo Sapiens
ttttttttttttttttttgagatgccacgactctgctttaatgaggggtgtgtaggcatgaaagggtacatgtccttcctccacccctccccaatggggctacatcctctgcctttgtccccgcctgcgtctgtctctgctctgtgctcagaagtggggcccggcgccctggctgatcccagtgaacaggcagctcctccctgcacaggggcctcacggggcgtggaagtgttccttgcagcatgattggtcctcagttccatccaggcagattcaggctgggagcgccgctgtgtggagtctctcctggatctgtcgcagccgatgctgctgtgccaccatctcccgcctctgccgctgcacgtggcctgtgagggcccataggatgtggctctgcttgtcagcgtgagcctttaagacctcaaattctcggtaggcagggcccagccaggcgctcctcagctggacttctagccgctgcacgctgtcccgtagcaccttctgtgcctgggccacctcccccagcacctcagctgtggcctctgcctgcagctgcagaatatcctcctccatctgagtctccaacaggcttgcccgaagttcctgggctgcatcccggccccggctgacctcctgccccaggagttctattgtgcggccatagagacccaggctgttcctggcctttgtcagccgtccctccgtggtcctgtacacaccgttgagggcctggcccagctgcagggtcccatggaagagcagggtcagctcctcatgctgtgccagttctgggccgcccatgggggccgctgaggcaggccgggtcaccattgccagggcccagagcaggcacagagcaggcactggcatgactgagggtctaaggtataacagcctcaacttcagcagccgccagggctccgtgcgcaaccttgccgtgcgagtgcagtacatgacaggcgaggaccccagccaggctctgccggtcagtggctgtgcc

SEQ ID NO: 471922 - DNA, 1000 bp, Homo Sapiens; identical to SEQ ID NO: 341218

SEQ ID NO: 471923 - DNA, 1000 bp, Homo Sapiens; identical to SEQ ID NO: 159822

SEQ ID NO: 471924 - DNA, 1000 bp, Homo Sapiens; identical to SEQ ID NO: 341220

SEQ ID NO: 471925 - DNA, 1000 bp, Homo Sapiens; identical to SEQ ID NO: 159823

SEQ ID NO: 471926 - DNA, 1000 bp, Homo Sapiens
tgtggggcaaataacgtttattaatagggacacgtcaatgaaacctcagtttaacagataagcattttttacctccaggttcataagcttcacttaatggctcatttcttttgaatgttatttggtatgacactgcaattctaacacattcactctttaggatttgacttacctagtaattccactcattatgtcactaattttggtaaactatattcacatcaagagtataaactaacttgctgtgtatctcaatgggcctgcaatttgcatttcggggtgagatgattctttattgtatatgactgaccaaaactttgcaggacagctaacatcccttatccctgctgactaaataccagtagtagtagtaccaccactaccaccaccgtactcagtcactgtgacaagaaaacatacccataatttcaaacctgcttctagaggagcagtgtcaccccagctgagaaccatgggttaagacccaaatagaaagtttaataaaatgttaaaataaacacctagccaaaccctgcattcagtattccagcaaagctatggtcatgctatcatcaatcctgcctgtccaacgtctcatgacatttctccctcttctgttaataacacaaacagattcaatacaaactgccaaaataccatttttagccacgagggctgagtcctgtgctctttgccaatagcagcaataaagctgggcagaagctaagcccaggactgcatggaatattggctatctgtggtagtagcacaaaataagatgtataactgaatagtctatcattttgacaaatctggacttcaaaaaggatgctgggttttttttctcttaaaaagatttattatcaaaaagtttgctccctttaaatactgagccaattcatcaatgcagctccattctttttaggattattagggcccaaataatttcagactaaaacaagaaataaaaaaactggactataggttcagtaacatattc

SEQ ID NO: 471927 - DNA, 1000 bp, Homo Sapiens
ttccataggtcatcaccacagaactggcttttactaacaaaaccaaagaacctcaaacactttttgtggacttcaaattctttccttcagattttaaaatgacattatgcatgtacatatttttaaaatttagacacattttagagaacacaattgtgaatacaaatctaagaaatgaatgagatgtactgaaatctgattcaaacacttatcttaaactgacttctgtcaatcctctgtcctgtgaagtaagtcccgtttctcctttgcctggagggaccgagctggaattactgtcacatgttacagacatgaggcaggggttaatgcagaaccacggaacagcacctctgatgacatctagtggataagtaggaaggtgtcaacccaggtggcttttaaaaaaatctgtaaataaaatctcctcctttattccacagattttaatctttccctcagtgtgttagaaagactaatagtgtttttcaaacgtgtgtggatggactcacctggggagacacccgcatcctaggccacctttgtggctgctctgcagacacctggctgcacccgctgcctcctcgtctgagaggggctgccctggagagcaccgtgctggctgtgttgcctactggcttcccttgagaaatggggaggcaggacctctactgagtgctgtgatgtgttatgttttgatgtggtgggtggggaggatgggaacaatgttatttggatgagattggacatcgtgtgaggtcttcagcaaagcagctaccctcagctcattgacgacagcatcctgcctgcaggtgtgggctgctggactgcctgcaaagcccatcaacaggccctggaggccaggtaaaataggatcaggatgatttctattcacagaagtcatcaatctaacatgaaagaaaataatgactcaggagcaagggtgtctgcagcaaacagactctccaggcatcgtttagaagctgaatgtcacacatttcgg

SEQ ID NO: 471928 - DNA, 1000 bp, Homo Sapiens; identical to SEQ ID NO: 246533

SEQ ID NO: 471929 - DNA, 1000 bp, Homo Sapiens; identical to SEQ ID NO: 341224

SEQ ID NO: 471930 - DNA, 1000 bp, Homo Sapiens
tttttttttttttttttttttctttttaattttttattaaaaatgaaagaaacacagctaaacaatttatttacaattgcacaaggtttgaaacagctatcctattcctgttaaagcttcacatttaaaaatgtctacatcatatgtgcttgtacaaggcttgagtatcaaccacaaatgtgactttagcagctttattgcataatgatccacataacgctgcattatttgcttagtttagcctacatcataaagtgctattcatagatgggaaattaacagcctgctaaacactgaagttctccatgatatttgctacttgagttgagggtaaaaagctaatttaatgctaccagcctgagtaacagatttccattaaaaatataacaacaaggacaaccaaaaaaaacaggcctaaaagttttggttaccctgttaaaacatgtcaaaagcattccataaatgattactgctacaatgcataaaagtagtttctgaatattttaacctcaaaaaaataagtactttaaataaaaaccacctacttgaaagcaacacctttcaaaaacagacacacaatttagatagaatgtaattcctcaaattaaaagatattttaaagggtacacagtcattgtgatcttagttatcatttctaagtaattaaatttgtatttttacttgcttatattagaaatgcttattaccaatgagaaacagaaaatgccacataagtgaacatttaaatgttacaaaaatttataatatatgtaacgctactaaaatatataatgaacttttcaaacatgtaaatataaatcaggaaaacctgatatgtaataattgggccaaaaatgaaaatcacaaaacacagtaagggggtaaaagaataaatatgacttttaatatcagtccatctttaccaatatatctgaaaaataattctttgacataagaacaaatattttcacagaataagaaaaactaaagataaatttct

SEQ ID NO: 471931 - DNA, 1000 bp, Homo Sapiens; identical to SEQ ID NO: 341226

SEQ ID NO: 471932 - DNA, 1000 bp, Homo Sapiens; identical to SEQ ID NO: 341227

SEQ ID NO: 471933 - DNA, 1000 bp, Homo Sapiens; identical to SEQ ID NO: 341228

SEQ ID NO: 471934 - DNA, 1000 bp, Homo Sapiens; identical to SEQ ID NO: 341229

SEQ ID NO: 471935 - DNA, 1000 bp, Homo Sapiens
ttttttttttttttcaatgtccatcactgacatgttttaataagagttgaacgcacaaattggcttccttgcaatgtttacttcaagcagtaggtctgtctgctctggcctttgatgggatctgccagcttcctccctccttgtctatgtcccctgccttcaccatgggaaaaaaggctccagtaaaccaaatcccagaagtgatgttgcctgcggagaccaactcaaaaccaactggcctcccactgcttcctttgaaaacatatacatttcacacacctgagtcctcccacccctctccactccacggcaggctccatgaatggaactccaggggctgcctttgtgtaatgatcaagacgtccctggacagaggagcagcttcgcatcagggaatcctggtcccctgatccccatgggatgagatggtgggtgtagcatccttctggtttctctgcccattcagctgtctacccatgcacaaaacccaaagccctggattttggattttgtacctgcaaacctgagtaaactttttcccctcaagagtcatcattcaggccgggtgcagtggctcccacctgtaatctcagcactgtgggaggccgaggcgggtggatcacttgaggtcaggagttcgagaccagcctggccaacatggtgaaaccctgtctctactaaaaagtacaggtgggcacctgtaatcccagctactcgggaggctgagacaggagaattgcttgaacccgggaggcagagttgcagtgagccgagatcacgctactgcactccagcctgggcgacagatcaagactccgtctcaaaaaacaataaaagtcaccattcagcctgaccaaggagggggccaggaaagaagtcggaaccgtggccttcgctgcttcagaaggggaggcccgtgctctgacttcagcttgattcactttggcctcagtcctcagttcccagggggtaacggcgttctgaggttgtcacctggtgc

SEQ ID NO: 471936 - DNA, 1000 bp, Homo Sapiens; identical to SEQ ID NO: 341231

SEQ ID NO: 471937 - DNA, 1000 bp, Homo Sapiens; identical to SEQ ID NO: 341233

SEQ ID NO: 471938 - DNA, 1000 bp, Homo Sapiens; identical to SEQ ID NO: 246534

SEQ ID NO: 471939 - DNA, 1000 bp, Homo Sapiens; identical to SEQ ID NO: 341235

SEQ ID NO: 471940 - DNA, 1000 bp, Homo Sapiens; identical to SEQ ID NO: 341236

SEQ ID NO: 471941 - DNA, 1000 bp, Homo Sapiens; identical to SEQ ID NO: 341238

SEQ ID NO: 471942 - DNA, 1000 bp, Homo Sapiens; identical to SEQ ID NO: 341240

SEQ ID NO: 471943 - DNA, 1000 bp, Homo Sapiens; identical to SEQ ID NO: 341241

SEQ ID NO: 471944 - DNA, 1000 bp, Homo Sapiens
ccaagaaatggccttttacaaaatgtcaaaggttcttcataccaactgctggtcattggctggggttttgaacactgtatgacaatacttaaactacaaaattttttttacaaatacagtttcatcaaaacttgggacatacatcaacttcatttcttttcagtaccttaaaaaaaaaacatcagttctgggacataacaaagaaatactaggagaaatggtatctggacaggaacagaaatgtccacaactgcgagggattttcttttacactggccacagagcgtttattgacaccaccactcctgaaaattgggatttcttattaggttcccctaaaagttcccatgttgattacatgtaaatagtcacatatatacaatgaaggcagtttcttcagaggcaaccagggtttatagtgctaggtaaatgtcatctcttttgtgctactgactcattgtcaaacgtctctgcactgttttcagcctctccacgttgcctctgtcctgcttcttagttccttctttgtgacaaaccaaaagaataagaggatttagaacaggactgcttttcccctatgatttaaaaattccaatgactttcgcccttgggagaaatttccaaggaaatctctctcgctcgctctctccgttttcctttgtgagcttctgggggagggttagtggtgactttttgatacgaaaaaatgcattttgtgcagctggtgaggtataatccaaagcaaaagcaggggcaaaaatggacttcctgaagttatctctgctcctgctggttatcctccagaatctgtcatgttgactgagagtgcgtgcttgctttctcaggcctcctggccaataccacaggtctgctggaaatcacccacatggtttttcattgcctgtgcagtcaggtgatgcctctatgtttttggaggtccacctctgttgtttcttaaccttcccagccttcccacagttgtcccagtgatttggaagaa

SEQ ID NO: 471945 - DNA, 1000 bp, Homo Sapiens
tttttttttttttttttctttttttttttttttttttttttttttttttttttttttttttttttttttttttttttttttttttttttttttttttttttttttttggacagaaagcaatggtgcttttaatgaaacttctttcaaatctgtgaacatgctagctgtgaagtacatgcttttattctttccataggacatatttccaaataatgatcacagtattatggttaataagatgctggacagatgcgtagccaaagaatattacataacaacaaaatctcatcaatgatatatcaaatgcaaatttactaagacatcaagagaatatctgtttgtagttacatggctaaaaacaagacattattacagtaaccaagtccataaaactagaaaaaaagcactgtataacaaaaaggccttttagaagctattaaatgaacaaacattatagataaaccaattttatatctgaagcagcttatagcaccaacacgttggcaggaccagcagaggggtggggtctttggaccaaggcatctgggaacaggaagggctctcagccatcatctactgcagccacttgttttacaaatggagaaatagaggcccagagagatgaagcgccttgtccaaggtcacacagcacaggacagactgggaaatgatccagggctatgatccaggccactgacttcaggtaagtgctctattttaacatacagatataagattctatttgatttgatgtattttttccccattaacaggtctaccataaaagaaagcaataaaacccataatgtactctggtattgtatttatttcactgagaaatgactggcatgtactacgatcattttgggggcctatatagatcttacatcaaaattcagaggaattagtcagataacactattttagttataaattgagaaggtggcatttgaagagaatatttggcacatcctccactacgtaagctaccctatgcctc

SEQ ID NO: 471946 - DNA, 1000 bp, Homo Sapiens; identical to SEQ ID NO: 341242

SEQ ID NO: 471947 - DNA, 1000 bp, Homo Sapiens
tttagaggtagagctgaaattatttatttaaattataggaaagaaagacataaaatcattgtgagagaataatggtgaaaaacattcttgcctaagagtctccatcttctttggctatagttgttgtttcaagttgaaacagcatcactagtattgctgccttcgaacattttgtttctggaaaaaagcctttccaaattcatatgtactgatcataatggcacaagcaggagcaattttaattaagcgaggaattaggcctgaaaataatccggaaaatccatttttagcaacaatgttcttcattataatccaggttgacatatgcaaaggcatagaaattttatgactttcatatgtccaaagttgtgtctgcttttgtgtttttactacatcaaatggtaaagttgcaacagcagcaaaagaaccagacaatgcccctgaagtaaagttgatcataaatgttggctcatataaaccagatttctcacataaccacttctttaaaatttcatagttataccagtacattgctgagaaaggtacatctctaagaacagtaggagcccagcccctccaaagggaaatccaaccatcttcagatactttcttgctgacaaatcgatgcagttccacgtaagaaaacttcttggactgcatcttggttctaatcaattctagtggacttatcacagttactgcaccaaatctggctacaattccagcaacaattggtatgcaggtttcattttctcctaacttagatctcagaagagcacttaattgatcatagcaggtaaaataaataactgtggcaggaactgccatcactagggtaggaggaaggccactccatagagatttaatgccctcatttcgaatgattttaaaaaatgcatccaatgttccctggaaatttcctggcttcttataccatagtttgttgcctccctcttcacagacacatagatgatccatgagtccattactatatacaaaa

SEQ ID NO: 471948 - DNA, 1000 bp, Homo Sapiens; identical to SEQ ID NO: 341244

SEQ ID NO: 471949 - DNA, 1000 bp, Homo Sapiens; identical to SEQ ID NO: 159826

SEQ ID NO: 471950 - DNA, 1000 bp, Homo Sapiens
aaaatgggtagaataatttgaatttatttttaaaatatactgtagcaaaagttcataagttctgtgtcccagcctggacactgaccattgaaaaatagatgcctttctgtgccagcagctgctgatgcgtgccatgctccttgactctcccattctgaaacaccactattaagtctgcattctggatggtggacaggcggtgagcaatcacaatgcaggtgcggccttctctggctttgtccagggcttcttggacaaccttttcactttcagtatccagagctgatgtagcttcatccaacaggaggatttgaggttgtctgatgagggctcgggcaatagcaatcctctgtttttgacctcctgagagctgagtccccttatctcccactcttgtttcatatttgtggggtaacgtctcgatgaaaggatgtatgttggcagctttggctgcactcacaatttcatcctgtgatacaacccggctgttgtctccataggcaatattctcggcaatgctgcagtcaaataggataggctcctgagacacgattccgagttgagctctgagccactggacattgagtttctttgcttcttgaccatcgagaagcactgtccccgccaaggggtcgtagaaccgctccaggagctggaccaccgtgctcttcccacagccactgctgcccaccagggctagtgtctggcctttcttcacctccaggctcagcccctgaagcactggcacgtttgctcgggtgggatagttgaacacgacttcattaaatgttatatttccttcaaatttatcaggcttcagcccctcttcactgtagctgtcaatcagaggttgtctttcaaacagcatgaataagtgggctgcagacagcttagctttagcatagtctggagcaaatgaactggcatgtcctagagccactgcaccaaatacaattgcagaaaacaccctgtaaggtccatacaatttttcaacatacat

SEQ ID NO: 471951 - DNA, 1000 bp, Homo Sapiens
ttatttttccttttttttttttttttgagacagtcttgctctgttccccaggctggagagcagtggtgcaatcttggctcactgtaacctccgcctcctgggttcaagcgattctcctgcctcagactcctgagtagctggaattacaggcgcccaccaccacatccagctaatttttgtacttttagtagagacagggtttcaccatgttggccaggctggtcttcaactcctgacctcgggtgatccacccgcttcagtctcccaaagtgctagaattacaggcgtgagccaccacacccggccggcaagtgattcttgacttcacagactgggaaaatcttccttcacatcttcccagccaccattctactgccttagagcaggctcctgtcatttctctcttcaattatttcaacaatatcttaagtagtctcaacctgccttctctctaaccccctcttcaagctttcctccactcggctgccctagtgatctttctgaaatatacagtggtgatgttattcctctgcttaaaactgtccactggcttctcagggtccaggccagactctttagcaggattcccaagctgtctcgtgttctgtgaagttgcttatatacacctgttctttggcccacagacctttacccccaagtgcaataggtgttcagtgacccatcttagcaacggtaaaacagggtccagtaaatgtaagggaacctgccgaaagttatctgggcctggaaacaaagcacatttactgatatccttaaggaaagctgagactcccctttgctggggctaggtatagtgagtgttctggagcaaagccctggagcatggagctggaaggttgtgggttgtgggttcacatacccatcagatgcaggaggccgtctaatgtgttgagtgtgtcttggattgtaaccccagcgttcttggctctggtatcaaccttctgggcttctgtaatcaccatctgtactgcatccatat

SEQ ID NO: 471952 - DNA, 1000 bp, Homo Sapiens; identical to SEQ ID NO: 341247

SEQ ID NO: 471953 - DNA, 1000 bp, Homo Sapiens; identical to SEQ ID NO: 342761

SEQ ID NO: 471954 - DNA, 1000 bp, Homo Sapiens; identical to SEQ ID NO: 342761

SEQ ID NO: 471955 - DNA, 1000 bp, Homo Sapiens; identical to SEQ ID NO: 342761

SEQ ID NO: 471956 - DNA, 1000 bp, Homo Sapiens; identical to SEQ ID NO: 342761

SEQ ID NO: 471957 - DNA, 1000 bp, Homo Sapiens; identical to SEQ ID NO: 341248

SEQ ID NO: 471958 - DNA, 1000 bp, Homo Sapiens; identical to SEQ ID NO: 341248

SEQ ID NO: 471959 - DNA, 1000 bp, Homo Sapiens; identical to SEQ ID NO: 341248

SEQ ID NO: 471960 - DNA, 1000 bp, Homo Sapiens; identical to SEQ ID NO: 341248

SEQ ID NO: 471961 - DNA, 1000 bp, Homo Sapiens; identical to SEQ ID NO: 341248

SEQ ID NO: 471962 - DNA, 1000 bp, Homo Sapiens; identical to SEQ ID NO: 341248

SEQ ID NO: 471963 - DNA, 1000 bp, Homo Sapiens; identical to SEQ ID NO: 341248

SEQ ID NO: 471964 - DNA, 1000 bp, Homo Sapiens; identical to SEQ ID NO: 341248

SEQ ID NO: 471965 - DNA, 1000 bp, Homo Sapiens; identical to SEQ ID NO: 341248

SEQ ID NO: 471966 - DNA, 1000 bp, Homo Sapiens
ttttttttttttttttttttttcacatttcaaaatgttttatttttattcattttcaggcagattataattttatttcaattataaggcatagtctgttttatacatcagcaaaagttaacataagaaaatattggccaagtaaaagtagcatgcttaaagataaaataataagtatataaactaagggtattattgatgttcagtattgctcacaatatgctttgtttcattttgtcatgagcatagtagtagagaaatatttctttttaaatacatgatgtagaaataaatgacatggttttcaaacacgaatatatagaatgttagaatgagtttggaaatgtagatatgccttcttaaatagagcaagtacactatagacagaagtgattagaatcatgagatgcaagctctgaaatgaatcaaaacctcagatttctgtaatgagatataatagtaattaattccttgggcagttggaaagaattaaaaccttaacactatcatttagaaaaaaatactcattaaattaaacccagttgttattaatgcaaaaaaatgatgaaacattgtaaaaccacaggggtatactacttgaaaataatgcttgaagttgcataataacttaaatttgagatttaaaagtaaactaatagaaacatggctatgtaacacaccaaaagtatatgaaactaaaaacagactttactgaatattaaatccaaagctatttcggaaggtggaattttcttcacccttcctcccagggccctgtgcctgaatatccgaaataactggtttcaagaacttgaactcactggtcccggggcctcccgtcagacacacctcatactggtagctctgggacagggtctcagcgcccctcacgtccaccagatgccctggaaaaggaccctcgggcaccgagcagcgacccaccgaggccgccctgctcctcctgcacagccgcaccgccacgaacaggagcaccgagagga

SEQ ID NO: 471967 - DNA, 1000 bp, Homo Sapiens
taataatcagtaaattattgtacacttggaaaggattaaaaccttaaaattattcattagaaatggattaactacctgttacttaatataaaaaggatttacaatgttattcacaatgatatgcaatacttgaaaattgaaaataggcctggccgcctgtaatcccagcactttgggaggctgaggggagtgcatctcttgagctcagaagttaaaggccagcctaagaaatatggtgacgatccgtctctacaaaaaatacaagaagtagccgggcatggtggcgcacgcctgtagtcccagctacttggaggcggaggtgggctggtctcttgagcccaggaggcagaggttgcagtgagctgagatcctgccactgacctctagtctgggtgactaagactctgtatcaaaaaaaagaaaagaaaagaaaaaaaaaaggccgggcgcagtggctcacaccggtaatcacagcactttgggaggccgtggcgggtggaacatgaggtcaagagtttaaaacctgcccggccaacgtggtgaaaccccgtctctactaaagataaaaaaaaaaaaaatttagccgagcgtggtggtgggcgcctgtaatgccagctactcgggaggctgatgcaggagaattgcttgaacccgagaggcggagggtgcagtgagctgagatcacaccattgcactccagccagggcgacagaatgagactcggtctcaaaaaaaaaaaaaaaattgggggagaaaagaaaaaattaaaaatacaattagtcgtattgcataataacgtaactagtttaagactaaataatattgatatggttacataaaactaaaaaagtacatgcaaatgtaaatagcattcttactaaaaattaaatccaaagctatttcgaaaggtggagttttcttcactattcttcccaagaccttttgcctggatattagggataaccggttttaggaacttgaattcatttgtctcggaacc

SEQ ID NO: 471968 - DNA, 1000 bp, Homo Sapiens
ttttttttttttttttgctctttcaattttgttttttacttaagatttgggcagatcagagcattagtaataatagctgaaaatttacccagaaaagcaagattactggtttataagaaaatgaaatcatagataaagtttatttctaaataaagattgaacagtagtatgaatacgataaaaacttttcttctctttagttaggcagaaacttgccaggtgatatccaatgacaaaaacagtatggaatgggagcaaagtcactgacttagagtcaggcagatctaggatggatgctcagttttgtcacttattagttagtggaccttagtgaacttactgaatctctaagaccgtctatttggtcattactaaaataccatgtcacatatgtttcttctgagattaaaagtgtgaaaatagtgtatgattcataaaacaactttttttaaaaaaataaagtttaaaaaggtacactacaatctatgcttctgaaactagggtaggtatactcgaacagcattctaatcaactcagaaaacaaaagtcacagtaaatattgaaaacaatggaaagcaatttaaaatatctcaaacaagacttaccacttaatagactttatattaagcataattgtttgacataaaccattacacatgcacatttcctgctttgtgaagtgttcttggtactaaatctgtatccttttctatgtaaagaaatttatttcttgacttgaagagtatgtatttgaagtgatcaaaaatactactttacaggcacctcacgataagttcctaattataaatgtattcataaacacaggttttatttttcattctttatcagaaacccaaattattctgaaatgggggattttcttcgacttcactacctgtgctctggggtaggaagttggggataattggtttcagaaatttgaacttatttgacctggagcctccagtcacacacacctcatagtggtagctctgggaca

SEQ ID NO: 471969 - DNA, 1000 bp, Homo Sapiens
cattgttcacaagcatttatttctattaagcttgtgtgtttcaaaatatgtaaaatataatcttaactattggttgcagtaaaaaaagtttgaaaaatagtttctggtgtatatacattaaattatatgatagtacaggcaaaaatttttacacattaacacacaactccaatttatgctatatgaattattatttgggcacaggcatctgcattcaactagattgcactagagctttgtgacattaattaaaaaattatagcttcatattcccagattctgtgattggtcacaatattaatgtgcctgcacaatcctctccaggatgaatgaggaaaggatactaaaaaactggtcttctgaccctttcgaatcaagtgataacacttagagttgtatcataggatataggttttctggtttatttttgaaagcaaaaagcatatttaaaggttaactaaaaacgcactggatttacaaaaaagaaaaatgatatgtctgaataggagtcattattttaagactaaaaaaagagaatcaaatgaagaaatgctggaaaattggaatcacttccaaattgctctatttaattttaccataagcataatagtgggtgaagttcagctaaagataggggcatgaaaaaaatgtgatttggtattgctctttagggaggcaaattaattacaaattaagaccatctgggttaaagaatgaattgtcaccttttaagaaccaggaataaaggtaaatgttcactttaaaacaaagggagaaagaacatgagaaaaatcaagagtaaatccgtacaatattacatacacacaaattgggggaaataaacattggcatggaaatgccacaaaataaaatacctatggaatgtaaaagtcaactatggtcactgaatattgaacccaaagttattggggaaggtagaatttccttgtatttctttcccagggcactggggagggaagttggggataatcggcttcag

SEQ ID NO: 471970 - DNA, 1000 bp, Homo Sapiens; identical to SEQ ID NO: 159829

SEQ ID NO: 471971 - DNA, 1000 bp, Homo Sapiens; identical to SEQ ID NO: 341254

SEQ ID NO: 471972 - DNA, 1000 bp, Homo Sapiens; identical to SEQ ID NO: 341255

SEQ ID NO: 471973 - DNA, 1000 bp, Homo Sapiens
aattcagataaatttattactgttccagtctatacaaggacaaaataatatttatttcatgcaagtgcaactttggcataattgagaagttaaattaattcaaaataactgaaggttaccttaaagaacaaattaaaataattaagcatttaaaaattatttttgtaaaggctgtccatatctgcaaagtaatgtacagtgaaaaacctgagatcaactgattatcagatttaaacagaatagccaaggtgcagaagaaatttcgtgattcttttgaaagatggggagaagctgtaggaaaaccaaaaaatatacacatattaaagtatacttggatttctatttatagggagtaaaaggtagcacaaggagacctatgatgctctcaagagtcttgattttggggagaaatttagggcttatttcagattctgagatttttttttaagatgatatcaggccatgatttaacagttttatttattgaaaggttatgacaaattatatgagatttttctctttaaaaattatttataaataagttatttttacaaaatttaatattagcattcatggaacattacaatgtgctaggtaagtagcaaccaaataaacaaaataatcactagacatgtggtggtcacaagaggaaaaggaccacaattttagtgtattaccaatgtagtgaagtgcatgtttatatacaatttgtgaaaaatgagtaaactaaattttacactcatggctattaagagggcttagcctagtatagtcaaccagaaaggacaaggtaattataaagttaaatacaaaactttcaaacactctggccttgcaaacattaagttacatggtaaagacaggcacaacaaatatttagaaattcaatattcatatattcacttaaatgttccattaaaaagatgttaatttaagaatttcattaaaacataatttatttttatcctaattgagtaatttatgattacaaaaagattaa

SEQ ID NO: 471974 - DNA, 1000 bp, Homo Sapiens
ttagtaacattcagcaaatatttattaagcacttataattggcacgactttttttttaaaaaaagaccatcatgttcttacatgaggctcacaaactaatgtgttgacacttcagtaaagtctatagtcacaaaaattttggattgactattatgggatactaaaatatgcataagtatgaatggctactttagtgtttagccatcattagttcttatttttagtgttacacactgtaggagttactgcaaaatgagacattggaggattaaataatatcagatactcacattttaaacagtcctacatagcaatagtgaaacaactcttaccaatagctagaaatacaattttacttaaggatttacaatacttttttttgggggggggaagaatagataatttaatttcaaaagcttaaaattatgcaaataaaaatttactttttgttcatattgtcaagtaccctcaagtgaagtaataaactactaagcatgaacaggaaatactaagataccagtatcttactttatataaaatttcaacctaaagaatagaggtaaaataaacaagaaacagaccatgtaactttaagttaaaagagatctccaaacataagtaagatttagtaaaataatcccacacttaactgaacgggaagctattccgagaggtgggggtttcttccatttctctctcagtgccctgaggagggaagttgggcataatcggcttcaggaacttgaactcatttgtttctgagcctcccgtcagacacaccttgtactggtagctctgggatagggtcccggtgccgctcacatccaccagatgccctggaaagggaccctcgggcaccgagtagcgacccaccgaggccgccctgctcctcctgcacagccgcaccgccacgaacaggagcaccgaaaagaggaagagcgacgacaccgaggccaacgccaccaccaggtagacggtgagagagtcggcctgggcttgg

SEQ ID NO: 471975 - DNA, 1000 bp, Homo Sapiens; identical to SEQ ID NO: 159830

SEQ ID NO: 471976 - DNA, 1000 bp, Homo Sapiens
ttttttttttttttttttaaagcactttgttttaatctttattctcttcaattagaaaaatacatactacaaaagtttcacattatagaaaacagaaaaaaacaaaaattcccccagaatcccaccctcagagatggttactcctctttggtaagtattcctccaggttttttaagcatatagtagtacataagcaggaaaaagtaaaatcctactatatataagcaactgctcttgagcaagttttcaaatggttctgacagatcattctgaccaatttctccagggaactttatggattagttttcagagaagattccatgacactgtgggtagacaaacctctaagatttttcttatcatttataataaatgttgtcccaagtgttaaatgtcaaagtttttaaaaatagtaaataaatgtgatacagaggaaaaaaagttcagaaaattatcccagtttcttatcaaaatcaaaactcctaagtcccaattccaacaagtaccataaaacgtctttaaaatgcgattttgagaaacaatcacttctttatcataaaatatagctatagaagtaattctacaattttgggttttttttttgagagaaggtctcactctgttgcccagactagaacacagtagtggcatgaccaaggctcactgcagcctcaacctcccaagctcatctgatcctcccacctcagcgtttcgcatgcctggctaattttttttttctttttttttttgtagagacgacgtctcactatgttgcttcatttaacaaataaggggaggaagggcgggggcagaatggaggacacagactagagttcagcttttacaagtggcaaaggacaatttggattcggcctcccacagcttcatttgtaatgctttcaagacatcttccatctgtgttagagacttttctatttcaactctgctttcaagattaaaaagctctttatcttctgacacaatttgcttttcagaggac

SEQ ID NO: 471977 - DNA, 1000 bp, Homo Sapiens; identical to SEQ ID NO: 159831

SEQ ID NO: 471978 - DNA, 1000 bp, Homo Sapiens
cagagaatggcactttatttttaagacttgatttttttgccatgattatctaccaattcttccatgatggtgtcatcctcttcaacagtgaccaggaccttcttgcccactagattaaagatgtcttcaggaggatagcctttgggctcacccaccttcacggtgagcatgtccattgttagaatggtgccttccggaattttcactttggccaccacagacttgcccagcttctcattgcaggccatctcacagggcagcagctgcttggttggggagcccagggcacgctccacaagacgcactgaccgcaccagctcggccagttctccaggctccagcgaggccgagtggtcactccccttccaggtcttgtccaaagttatgtgacgttccaacaccttggcccccagagccactgcggccacagatatcgctatgcctgtttcatgcccagaataccctatgggaatgtcaggaaagagcttctgatattccgagatgacccgcaggttgacgtcctcaggctggagcgggtatgcgctggtacactgcaagaagcagaagttggggttgaggggcttcacgatctgataaacttgcttcatggtgtccattgactgcatcccactggagatcaccattgggcgaccttttttggctgtcttttccagataaggaaaattattagtgtctccagatccaactttgaaaaatggaacattcagttcatgcaggaattcaactgccatctcatccatgccagaggcagtgaagaagatcccaacctcctcggcgtacctctgcagctccctgtactggtcatggctgaactccagatgtcgtttgtgctccccgtacgtcttcccccaggaatgcttcgaggtgtatggcctctccaaggctttccgattaaacttgaattctagctcactcttctggaacttagcacaatcagccccacactccttggccatgcggatcatgcgcttggctacgt

SEQ ID NO: 471979 - DNA, 1000 bp, Homo Sapiens; identical to SEQ ID NO: 159832

SEQ ID NO: 471980 - DNA, 1000 bp, Homo Sapiens; identical to SEQ ID NO: 159833

SEQ ID NO: 471981 - DNA, 1000 bp, Homo Sapiens; identical to SEQ ID NO: 341260

SEQ ID NO: 471982 - DNA, 1000 bp, Homo Sapiens
ttttttttttttttttttcgagttttcacatctttattattgttgttgttgttgttattattattattattatcatcatcatcatcatcatcatcatcgaagtatttcacgtccagagctaagacaagactacaaacacaacacatagaaaattaataaaatagaactttgttttcttctgaggctcctcttcttacttctaggtagtatgtgctccttccagtggctttggggagggggtgggagagacgacaggtctgggatcagggagtcttcaaggcccccgctgaggggacagcgaatctaccattgaaccgtgcacgggggacatggacaaaatgagacgcgacagggacaagagcattttgctctgcttccaggaaacatcaagtgagtccgctcctcagttctcaccaggaagcctgatcaggctgaggcgagttcctcgggaaggaagggcgcgcgggatgctgggtgggctcgagtagtgaggcctcagagcacccgccgggagctgtgcgggcgggggcgtccaggagagcgctgggccccgcctgtctgcgccggagagcaggtctcctggctcccccacccgagagccttccttcccgggtctctctgacgcccgtggctccccacaggcctttcccctcgcgtcctccctccctttccagcaccttcactcggcctgtttttcttcctcctcctcggcactgagctgagacgcgctgagcagtttgctctcctttttccacttcatgcgtcggttctggaaccatatcttgatctgcctctccgtcaggcacagggcgtgcgcgatctcgatgcgccgccgccgcgtcaggtagcgattgtagtgaaactccttctccagctccagcgtctggtaacgtgtgtatgtctggcggcctcgccggccgctgggcccaaaggaggaactgttgcacgaattcatccgctgcatccacgggtagaccggagtggagcacttctgctcttc

SEQ ID NO: 471983 - DNA, 1000 bp, Homo Sapiens; identical to SEQ ID NO: 341261

SEQ ID NO: 471984 - DNA, 971 bp, Homo Sapiens
taccatgcaacgaaacctttattaacattttgaacaggttcagctattactgaaacttgtaatttctaaacttaagttggggcaaatggctatagtgcagagtaatgccatcactgggcactgcgaatgccatgactgaagaattaacagccacccctcaggcgcaggaccaggtgcagggtcgactctttctggatgttgtagtcagaaagagtgcggccatcttccagctgcttgcctgcaaagatgagcctctgctggtcgggggggatgccttctttatcttggatcttggccttcacattttcgatggtgtcactgggctccacctccagagtgatggtcttgccggtcagggtcttcacgaagatctgcataccacctctcagacgcaggaccaggtgcagggtcgactccttctggatgttgtagtcagaaagagtgcggccatcttccagctgcttgcctgcaaagatgagcctctgctggtcgggagggatgccttctttatcctggatcttggccttcacattttcgatggtgtcactgggctccacttccagggtgatggtcttgccggtcagggtcttcacgaagatctgcataccacctctcagacgcaggaccaggtgcagggtcgactccttctggatgttgtagtcagaaagagtacggccatcttccagctgcttgcctgcaaagatgagcctctgctggtcggggggaatgccttccttatcctggatcttggccttcacattttcgatggtgtcactgggctccacctcaagggtgatggtcttgccggtaagggttttcacgaagatctgcattttgacctgttagcggataccaggatcctgccaatcaccaaccacgtccacccacagggacacaaacaagctcacccaacaaagccaaccgcccctaaatgctccgggctggcggagcgcaaatttatgcaacgagtg

SEQ ID NO: 471985 - DNA, 1000 bp, Homo Sapiens; identical to SEQ ID NO: 341262

SEQ ID NO: 471986 - DNA, 1000 bp, Homo Sapiens
tttctaatccaaacgcacttctctttattcaaaccagggtcaaactggtcaatgggaaacgccctgaagccacgtgcctggggagaaaggcttcctactcggttcggttcagcgctgcgtgggatccacgcggctggctgtgcgcaacccccacagttcacctcagacactaccaagcaggtcagtcgacaaaagcaaggaattaaacaaaaaacagaaatacactcagtagatttcttctagaagctcccagagtttctggaccaccaagtcccaacccccaaagccaggagcgaggggactaacagcgcaccccctccaccagtgccgacggaaaccccgttttaaattaaaaaataagccagtatacatcgtagaaaatttctcttaaaaatctcacaatttgtaaatgtatattttttctttaacataaaagtttacaatataccgtaaaacaaaaggctcaggaaaataatttccaaaaaaaaggaagaaaaagaaacctgaagttttgaattaaagctgaagacattttttttaaaccctgttgttgaaccagtgacttttttttattgtgctgatgggttagagaaagaaatatttaaaaacctcagtccagacgacacccacagccgctccaaaagcctcgcgccctccccccgcccccccccccaaggttgagtcgccactttgccgccaagtttgtgattgtcacgagttcacaagtttggaatcctgggtctgggccgtgcagacgtcgcggcgccgcgggctagcgtcggtaggggtggaacccttgcacgttgtggttctgccctcgtccaaagccgctgccgccggcgggggggccccccgaccctggcacggagggacccccgtaggaaggaggctgctggctggggtctgagaagccctgtccgaagccactcaagtcctgcccgtaacctgcatactgaccataggggaagtctggctgagctgtcgggggcttgctcatgtc

SEQ ID NO: 471987 - DNA, 1000 bp, Homo Sapiens; identical to SEQ ID NO: 341263

SEQ ID NO: 471988 - DNA, 1000 bp, Homo Sapiens
ttttttttttttttttttttcacctaaaagtaatagcagtttattaggaattcttccctttctcacctgtgtatcaacatattggggatcagtaatttagatgaaagtatactacaaaaggagcaaaggacacagacttagtaggttagaatattctggcttatgctaaaaaacaaaaagccttttttttaaaacagacatgcaaccacaaatttctcaagtattttagacacttggttcatctgtataacaaaaaaaaaaaaatgcatttgacttaaaaaagaaatagaaaaccctaggtttctgtagtttagtttttcagatttacacatgcaaatcatatattcagatatttttaaatgggaaaacaacttactttcaacaacttaatttttccagtaacacgttactatgttaaaaagatgcgacagtatattcatttaatctggcaattttaatttcaacaaatacatattaacaacaaattaaatcctattgtaaatacacttctttgttataccacgaccaaattttctaatcctagtacaggccacaatgaaataggccaaacatgctaccattaaagtttgttgggatgagattgtagtaagtttactcaaagtattcaagttctaatttttaaggtgctgtagagaaacataaaagatttcactgtatctaaaaatatgactgttttgatcttaagctatacattttatttttatctaactgattaagacctgcctcttaatgaggcacatttttggcatttctgtaaatgctgctacatacaagtaaaaataaggaaaagccgtgatagtaacattcatagctttcatagaaaaatatatattccctgaattagtcatatcaagtggtcattcagtatgaactgcaatattataaacaaaatgacatcaatggactttctctaattgcctatttccaacactctacttcagaactcaataatcagtatctccagctgaaattcccaggt

SEQ ID NO: 471989 - DNA, 1000 bp, Homo Sapiens
atacagtcatggggtgtgtcaatgaagagttcagtatgtcaagttgtatactttgctttgctcgtggtagcagagctggcagcagtagaagcagtagcttgattgcctaaaaatagagggtccaaacaagctaccttggcagcaaagaaggaatgaatgcagtgaagaacagcaaataaattagaaaattccaactcctttgcttcaatctgtttagtatctggattctgaaacaaaaatttgattttgctcttgccatcatctgaagaacctttaagctgagagaatttatacctccaaaggacagcctttgttgcagcatcaaagcagataaatcctgtgctgaaatcaattgtgagtcccattagatgactttctagcacacatgcataggtcttgcactgtatccgttctacttctagaaaggttgctgtctggaaggctctttcccactgggcgaggtcactttccagctccactgagaagtacaggtcctccccagactcagactgcacggtgaagcactgtttccgtcggtccagcaggtcactgtccttgaggatcttgcacataatctcataaactgagaatgttttctctgctctcgtccagtcccaggtggtcactggaggtgccagaaacttgtagagacatgagcccctcagggccaggaaggtcggggagtacactctgtcctggagggggtcttgctcccgggcttcacaccagcccatgtagacaatctgctggtttacaggaaagtttctgttgatttttttaatattgtgctttgtgagatttgaaatgttagttgctattgcttgtagccagtcaacgcagtcttcagcagagaggcactgaataatcccagtgcagaccccatccacagcaatgacttgaaaggcattctgccgactcaaatctgtgccgggcacatactgagagaagcgcgaatgaagtagagggatcagtctgaggtcgcaccatcgcttctcccacc

SEQ ID NO: 471990 - DNA, 1000 bp, Homo Sapiens; identical to SEQ ID NO: 159834

SEQ ID NO: 471991 - DNA, 1000 bp, Homo Sapiens
ttttttttttttttttttgaattgtcacttctgagagagagagagagagagagagacagagagagagagagagagaatgagattgtagaagtggagaaggaggcagcggagacaggccccacaaaactaaatatgcctctttcccagtccctcgcccagtcctccatccttgggaggtgttggcaaaggtgcctagattacaggtggttcgaggggctggggctggagctcagaaaggaggactcctgtatgggcccctacccctcccttgctgttggccccatcacggtggccatgaccttctctctgcctgtctgcctaccagcctgcttcacatgacacagtagggttctctgggagccggggcacctcctgtgccccagcagggggcatgagtcctcaggcacttcttgaggtccttgttgagcaggaagcagacaattgggttgacggcagcctgggcgaagctcatccaaacagcagtggccaggtagcggtggggcacagcacaggctttcacaaacactcgccagtagcaggccacgatgtagggtgaccagaggagcagaaagagcagtgtgatcgcgtagaacatgcggcccagctgcttttcacccttgacctcgtccatgcccagtagccgccggctggctgcatgcccattctgccggatacccagcagggttggtggcatgggcccacggccaaagccggcgatccagttggcagcagcctggccggtggccccgggaccatggaatgtccagttctggctgatggctggcaccatctgcactggcttcatcttgcggtgacgatactcgaagaggagcagcttgccgtagacagcatgggtagctgccatgagcacagccaacataagcatgaagcccagcgtgtcattggccttgaagtagcgatgctcaaagatgcactggtcctcctcccgaataaacttgtaggtgcccacgtcaaagacaggtgggaaggccatggccac

SEQ ID NO: 471992 - DNA, 1000 bp, Homo Sapiens; identical to SEQ ID NO: 341265

SEQ ID NO: 471993 - DNA, 1000 bp, Homo Sapiens
tcataaaccaatgcctttcaggtcgcagggatgggtcgcctgggtggtccgggggctctggcagcaggggaactgggccctgaagcagtccctcagctccctgttgaagaggaagcacacgacggggttgatgccggcctgcgcgaaggtcagccacacggaggccgtcaggtaggcctgggggacggcgccgggccgcaccaggacccgcaggtagctggccacgacgtagggcccccagaggagcaggaagagcagcgtgacggcgtagaacatcttgcacagcctcttctccgtcttgaattcttccagcacgaggaggcggcgcgcgccgcggcccggccctgcgggccggatgcccacaagcgcgggcggcgtgggcccgcggccgaagcccgccgtccagttggcggccgcctggccggtggcgcccgggccgtggaaggtccagtcgtggctgacggcgggcaccaggcgcgcgggccgcatcttgcggcggtcgtggatgaagaagagcaggcggaggtagacgaggtgcgtggcgcccaccaccacggccagcagcagcaggaagcccagcgcgccgggggcgccgtcgggccgctgctccagggcgcacggcgcgtcctcgtcgtcgccaccgccgtccagcactggcgggaaggccgcggccagcgccagcgcccaggcggcgcacaccagcatggcggcgcacggccagccggccaggcgctctgcatagaagcggtggtgcgcgatggccaggtagcgggtgacgcccacgcccagcagcaggaaggcggcgtggaagcagaagagcgcggccaggaaggcgagcagcttgcagcccagcgcgcccggcggcgcccccgccgcggccgccgcacgccgcgccgccagcatgacggccgggaggcaggcgagcgcgcgcagcccgtcggccaggcacaggtcgagcagcaggtagtacggggcgcggtgcaggctgcgctcccgcacg

SEQ ID NO: 471994 - DNA, 1000 bp, Homo Sapiens; identical to SEQ ID NO: 341266

SEQ ID NO: 471995 - DNA, 532 bp, Homo Sapiens
tttttttttttttttttagaaaataaactggctctttaatgggaaatgggaggaagggctgtccgcacaggaatggggttaggctgtcagaagcgcagccccctgcgggctaagtcggctcgggcctcctgtatctggctctgcagctcgcgtgcggcgtcctcgcagtcatgaaaagtggccacacgatagcccacagtgcccagggcatagcagccggcggacaccagcaagtaggcgggcagtggccacaggacttcctggcaggacaagggcagctccaggcccaaggctcccgtggtcagggccacccaggtggagcccaggatcgctagtccccaaagccactgcgctaatttcgtcatggtcactgcgagagaaggaagcaatgctcccctgaggagcagaaaggaaaagcggaccaaactcaaccgaagcccgcccacggagagcattaaaaccagccctggccagaggggaatcgccgatcccagaggtccgaacttgagtgcccacaaaaggtggaagggcc

SEQ ID NO: 471996 - DNA, 1000 bp, Homo Sapiens; identical to SEQ ID NO: 341268

SEQ ID NO: 471997 - DNA, 1000 bp, Homo Sapiens; identical to SEQ ID NO: 341269

SEQ ID NO: 471998 - DNA, 1000 bp, Homo Sapiens; identical to SEQ ID NO: 341270

SEQ ID NO: 471999 - DNA, 1000 bp, Homo Sapiens; identical to SEQ ID NO: 159835

SEQ ID NO: 472000 - DNA, 1000 bp, Homo Sapiens; identical to SEQ ID NO: 341272

SEQ ID NO: 472001 - DNA, 1000 bp, Homo Sapiens; identical to SEQ ID NO: 341274

SEQ ID NO: 472002 - DNA, 1000 bp, Homo Sapiens; identical to SEQ ID NO: 341275

SEQ ID NO: 472003 - DNA, 1000 bp, Homo Sapiens
gactggatatcatctttaattaataatgccacagcccaatgtcttttttgttgctgtagcaaattgtgattgtgtgtgcgtgtgtgagtgtgtgtgtgtgtgtgttcctgaacagatgaagggccagcagagactcccaagcaggtctcagccaacaactctgttgagcagcaactggaagatagtctccatagaggcacagaggccagacttctgcctcctatggcattgatcctctctcctgggccacctttcgtgcattgagggcaaggctgaggcctgtaccagcccagattaaaggacttctaagcacaggtcagcctccagttcccagtactcactgcctctgaccagagggatgccctgggtagagtatagacttccaggcagaggtggataacctgcgctggccttggtcccatgtcatactggggcagcaccacaatggcccagccctggcagaaaatccagagctactggagccacttgattgattactttcagagataatcaggatgtagcaaaggccttttttggggccagctggagaaggccagactcagcttgtgggggccacaggaagttgtctccaacccaaacttaaaagcctgccctcttgccatctccattctccaattcctcaaatgcccagtaggtccacagcccaggcatggcagcatagtgtcagcgtgacagtgggttggaagataaccatgagagacctgggctgaactggacctgcggccatatgtcagcctgaaaccagccctttcccccatggtcaatgccagccagagctctctgaagccggatgggaccccccacaggcaaggcagcaagttcttggcctagtgcagagggagaaaaccaaactggctccactgtcccatctccatctgctctgtgccttatgaaggcaagaagcccaagtccccaggacggcggtatcagctgttggggaagcaccgttgtccaggtgaggcctcgggccggaagctgt

SEQ ID NO: 472004 - DNA, 1000 bp, Homo Sapiens
ttttttttttttttttttttttttttttttttttttttaaaggaaagaggattctgattggaactgaaggcttcctttctaaatccacaaagctggatgaatctcctaaaagctcttgcccagcttggtaggagagatgcgcgatagagccccaaacacctcctggctaggctcactttaccctctatttaggaattcacactgcaacactgaggcacacagctctccccagtctttgggggcagcatatgagcttatggccaaacccatactttgtgctgtcttcttggccctgcctggagagccacgtggcagggctaccttaacaccgcagtaatccctctgatactcaattccacctttactggaaatagtgttataaggtgactccttgcagttttttaattgttgacaagttcaaagggatattttattctctgctgcccctgctttggtgcagcctgtgctcttttcttgtggctcctgggagtcctgctttttgcttgctatttctgacctctctttctctaccaggtgaagggcaatgaaccaagtacaaagacacaccctcagtgcttcctatgaggaagcccaatcaatcaaaaggtggccactttgctactaagtacttttgccgttagataccttatatccaataaaaagtggcttcctggaatttgaactttctcaccagcccatcccacccccagccccagcctaacacgcttctgtggactgtgaaaatgggccttctcctgccagcagtgggaatcccgggcactgagcttgccatctgatactagtgccttgaccttgcagaaccacttggcttgcagaaggccaaggtgtgtgggatggatgaggtagggagggaagcaacccctccttgcttgtcacagtaaagggcagcagaggcagctaaaccaaaccactctcgtgcaaatacccagcagggatcatcccaggaatggcaggctctcctgaatgcttccaggctagg

SEQ ID NO: 472005 - DNA, 1000 bp, Homo Sapiens; identical to SEQ ID NO: 341276

SEQ ID NO: 472006 - DNA, 1000 bp, Homo Sapiens
ttttttttttgggggtcactcgagggtttatttcagggtaggcggcagtgactgccctgtggcaggaacaggctggcatatgccaaagtcagggcagcagcagctgcgtccaacctggcagccccacacccacacacgaccctgcctggctgcgagacaagggcaggccacaggagccacggagcagactgtaacggcaacgtggccaggctgagcacatggcctccctgctgtcagccactgcagatcagctgggctcctgatgcttctctggtcctgtggattctggcaccactgggtaggaggggtctgccaccccctcgccacagttttgcagagactgcagtgcaggaggtaaatcgcatcccatgtaaacaccgtttgtaatactgtattccagcaaagcaccaaaacaggggtctcgaacgagaacatgggggtttcccagcactatcagcaaagctttgggtctggtgattgcaacattaaatctttttgagttggacaagaaacccaaaaaatatcgatcatcttcaaatctatcttcatttgaccgtacggtcgaaatgatgatgaccagatactcttgtccttgaaactcctctactgatccaacctttatatccatcagatcaacattacgcaaaagaattctgattttctccacctgcttccggtagggcgtgatgacgccaatgtcgctggcagacacctgactggagatgctgtgggccaggaggcagcagtagcgcaggacctggacggcctcggccgggttgaaccacgatgggctttttccctcccgtgcctcgctgccccgcacaccatggaagatgagagggaagcctttcttaggcaacttctcccagcccagcaaggaggtcaccactgtggggtccgcacagacctcgagttccctgtggtagaacagccgtgagggcagcatcagcagggcctcgtgggaccggtagttcttcaccagctttgtgaccaacagggg

SEQ ID NO: 472007 - DNA, 1000 bp, Homo Sapiens
gcggccgctgctgggttccagcgggtctgtggggccgcccagccgggaggggtcccgggaggggtcggctctcctggtgctgatgatggcagcgcctacagggactccccgctgagcaggtccccaggcagcagggtggttagcggcgtggggctgcctatcaccctgctgtcgtcggcgctgggcgggccccacaggctgctggagtactggggcaccccgccccacagcagctcactgctccccttgccacccaggcacggggcgttccagtggccagcgtcgctgcgtaccaggccatgggagctgcccgctgcgctgagccgcggctggctggacgcgctgctggactgccagctggaagtgggtggcagcgcctggccttgggctaagaagcgattcacttcttcttcaccagcgaactcggccaggatggtagtgtttcccaggacgcacatgtgcagagacttctgggccttggcagcctcctccttggagctgtaccggaccacagcattgccttgagtcagattcaggtggaatgtgataagaggcccatgttgcaaacacaatgtccgcagtgtagaaccatcaatctggggagtgaggtttcgaagaacgagccagctgctggttcttcctgaggtgtcggtgctccaggcagaacccgaggagtaggagctggtccagccgagggggctggcaccccaggtggaggagggcttgggattggttaaccctggaggtggcctcgtgggtgcagtactgtttctgggcaccttccatagttcatgagacagagaggcttgcgtgtgggaggtagggccagaggaccacgtcgatttgatgtctgacagtttacctccactcttgaggaggtagcggttgacatcctggatggtggtgttgatggtaggcccagtggggacactgccaggagtgacgtcagggtcattctcagggtcaatattctgcagtcctttccatggaactcccggat

SEQ ID NO: 472008 - DNA, 939 bp, Homo Sapiens; identical to SEQ ID NO: 341280

SEQ ID NO: 472009 - DNA, 1000 bp, Homo Sapiens; identical to SEQ ID NO: 341281

SEQ ID NO: 472010 - DNA, 1000 bp, Homo Sapiens; identical to SEQ ID NO: 159837

SEQ ID NO: 472011 - DNA, 1000 bp, Homo Sapiens; identical to SEQ ID NO: 341283

SEQ ID NO: 472012 - DNA, 1000 bp, Homo Sapiens; identical to SEQ ID NO: 159838

SEQ ID NO: 472013 - DNA, 1000 bp, Homo Sapiens; identical to SEQ ID NO: 341285

SEQ ID NO: 472014 - DNA, 1000 bp, Homo Sapiens; identical to SEQ ID NO: 341286

SEQ ID NO: 472015 - DNA, 1000 bp, Homo Sapiens; identical to SEQ ID NO: 159839

SEQ ID NO: 472016 - DNA, 1000 bp, Homo Sapiens; identical to SEQ ID NO: 159841

SEQ ID NO: 472017 - DNA, 1000 bp, Homo Sapiens; identical to SEQ ID NO: 159842

SEQ ID NO: 472018 - DNA, 1000 bp, Homo Sapiens; identical to SEQ ID NO: 341289

SEQ ID NO: 472019 - DNA, 1000 bp, Homo Sapiens; identical to SEQ ID NO: 159843

SEQ ID NO: 472020 - DNA, 1000 bp, Homo Sapiens; identical to SEQ ID NO: 341292

SEQ ID NO: 472021 - DNA, 1000 bp, Homo Sapiens; identical to SEQ ID NO: 341293

SEQ ID NO: 472022 - DNA, 1000 bp, Homo Sapiens; identical to SEQ ID NO: 341294

SEQ ID NO: 472023 - DNA, 1000 bp, Homo Sapiens; identical to SEQ ID NO: 341295

SEQ ID NO: 472024 - DNA, 1000 bp, Homo Sapiens; identical to SEQ ID NO: 159844

SEQ ID NO: 472025 - DNA, 1000 bp, Homo Sapiens; identical to SEQ ID NO: 341297

SEQ ID NO: 472026 - DNA, 1000 bp, Homo Sapiens; identical to SEQ ID NO: 159845

SEQ ID NO: 472027 - DNA, 1000 bp, Homo Sapiens; identical to SEQ ID NO: 159846

SEQ ID NO: 472028 - DNA, 1000 bp, Homo Sapiens
tttttttttttttttcaactacaaaaaaaaattttttattaagtgtgaaagcaaaacaggtacatctatttaaatattttttacatatttatagatacaacaaagacaaataacttagcaaaaattacaagtttaaagaatagtactattttgaaacagccaatatagtatctgaaaatattccattttatccataatcagtgagtattatttccaaaaaaagtaacttgcattttcttgtgaaaaatatggttttttttttagatgtctgccaagatttatcagaaaagtccatctttctaaacctaaaaaattgtaatgcctttattgagaactttttttacctaatggctttaaaaaccacgtgttttcctttggacttaggtgaattctaaatctttacttcactttcaaactacagggcatcgacataaacaaaaacaaatcagattgagagttttgggttgcttttcttcatactgagcgaagaaccttctccctggctgggtgaaagaccatggtgtactgtgatgtccaatctaccacacagggcttcaccaagccaaagcagccacactgaaagaaatctgccaggttctgcatgaatccaagattgtatggtgtcttcctgagggacaacgtctgtttcatatgcttgctctgcttctgcaggctgattctctcatgggaggtcaggcccagaaaggcaatctgaaagagttgatttaataataaaaatgttgaccatgagaaatggaaagttgctagcatcaagatatataaaacccaaggggaacaggccacaatctgattgaggtaagtccataatccatcttctttgaatgttgtggcacaatgactggacaaatagatgaaagatccatatataatccagccacataccatggaaaggaaaaacaagaagaatatgtaatagtgatggttgccaaaacctatgcaccgtccagtccacaggcagtgttgatcatatcgagccaca

SEQ ID NO: 472029 - DNA, 1000 bp, Homo Sapiens; identical to SEQ ID NO: 341300

SEQ ID NO: 472030 - DNA, 1000 bp, Homo Sapiens
tttctcatttgtcatgaccatctttaataaaaaataaattagttctgggtgggaaccatttcaggaggcagggagtggggctaggggctgggcggggtggtgggggagcggatgctcacatttctctttttcaccctctgcccagctgggccttgctctggagaggcagtctctttcctcctgccttcctgagtaaggcaggattggcagtggctgaccccagccctagctaattagggaggcaggggcagagatactaggcaaatgagaaggggtcagagacacagggcggcttagaagatgtgaggtctgaacatgagaaatgaggcttagggcacaaaactggagttggtggggagaccacactctaagtagctcagattagcaaggaactgcagacttgctttcctttccacctaggaaagtctcaaggaaacaggtcttgtccttctcagtctgtgtaacctctttttgaaaagtgatacacgtttgagcacacacatatccatgcagtcccaaaagcacacctgaggcatatgtgcacacacccatcacaccaccacatgggcctgaccacagccctgaaagtcactttgtgtcagtcaccttgccaccctctgtcacctggaggacatccctgctgagactgggacaggctggagagccagggggttcagagtgggccgatcaatgggtgaccgatggtggcacagaaaaccgtgaaggtgccccggacccctttcaggagggatcctggggagaccgctccaggacatgtgcgcaagagcggcaacaggtggctgtgtagtaggggtagacgcagagccgggcctgtaccaccagggggcaatgtggagagctgtccttgcattgatcatcagggcgctggctgcagggttggctgttacaggggcgcttcctggagggccgcagttgaggagggcatcgggtgctgagggtctggttggtgctcaggcactggacctcccgtgtctgcgtt

SEQ ID NO: 472031 - DNA, 1000 bp, Homo Sapiens; identical to SEQ ID NO: 341301

SEQ ID NO: 472032 - DNA, 1000 bp, Homo Sapiens; identical to SEQ ID NO: 341302

SEQ ID NO: 472033 - DNA, 1000 bp, Homo Sapiens; identical to SEQ ID NO: 341304

SEQ ID NO: 472034 - DNA, 1000 bp, Homo Sapiens; identical to SEQ ID NO: 159848

SEQ ID NO: 472035 - DNA, 1000 bp, Homo Sapiens
ttttttttttttttttttttttttccggaaaaacgtttaacttttatttgatgcttctgaacataataaaataaatgaacctaaaacagcgctttaggcagcttggaagggaagatacattccatttaggttaaaatacatgggaacgatatgtacatttgggcagatattctgaactctactgggttaatggttatgcctgtacttgagcacatcagtgagaagtttcccatcacattttatctgaaatgaacaagatgtcagggcaatctgctagcaaaacctgcgctcggggtcagcgatgcttctccctctggaacactcatcatgcccgtccctaggacacgttgcctctcttcttttgcaaagctttcatgaggtctgacatgaaatcttgctccccgcctcctgctccgccggggtgccctgggttctcttgcctcttggggggcacaggaggcctcttggccaccgcggggggcggcctggcggagtcggggacgggggcgggcgcgggcgcgggcggcggcggcggcggcgggggcagctctgagcccgcgatccctgcgtacgacggcgggggcgggggcacgaagtctgggggcggctccatgaagtccgggggcggcggcgggagctcagggtcatcgaggggcggcggcggtggcggcggcggcaggaagtcgtcgggtggggcgggcaagcccccgccgcctgtgcccttggccttgaggggcgtggcgggactgccgctggtgtcggaggacctccgcaccggagggggcgggggcaggctggacttgggggcgtgcggggcccggggcactgccgggtcgtggtggttcccgagggctggcttcttatccttcgatgtttcagcatgtctctgggcctcttggagaacagcactgacagaatgtgtagcctggggaatctgtccattgggctgggtggtgcctgttttaggtcctgtagatggctgagctggtgcagctgcatt

SEQ ID NO: 472036 - DNA, 1000 bp, Homo Sapiens
ttttttttttttttttgtaggggaaggtataatttttattgacgtgtcctcagcacaaggtctgttttcaattttctgagaaatcaacttgagtaacgtataaaaattaaaacaacactgaactttcgttccagttgctgtcaccaccaagcctgctggctggcacctggaggagctgggaacaaaaggtaccatggcaggtgaaaggcccaagtgaccaacactacatgggctgatcatttcagctaaatgccttctgtttactgaaaaacatcttggatagcccagttctgcggtcaagtgtgctgtatctgcctccctgggccacctgctgggtacttgtgcagtaggaactgtgttttacacgtctctgaatcttcctcagtgcttatttctcagtggttgctgaactaatacttgctaaacaaatgaattcttctttattcagagtccatacaaatacaggtaccttcataagcgcaatgttactggagacataaaagttgaatcaacagagaacaagtactccctatattcttcataggatgatgggtgttatccaagccacgtgtttactgtctgactccatcaacagcagccaacagagatgaatggaagcaaagaggagaaagaaaacatccaggttgttgaaatcatcacaactgcatctctctactgtcgctttcagaaccatttcatgatcttgtaggtgatatacggtgcttaaaagtaaaatcaatgacatacagccacggctggggatgttcaggaggccttcgctttcaccttggacagcagcatctcgttcttgcggccctcctccttgaactctttcacagtcttaaagtatagcctctgcttttctaacagctccaagtactggtcgttcaactggtctcttctcattttgttctcttgctttttcttttccatcttcattctactttgcttaattccttccacaatctgttccatctgacgtaaaaactggtcccgggca

SEQ ID NO: 472037 - DNA, 1000 bp, Homo Sapiens; identical to SEQ ID NO: 341306

SEQ ID NO: 472038 - DNA, 1000 bp, Homo Sapiens; identical to SEQ ID NO: 341307

SEQ ID NO: 472039 - DNA, 1000 bp, Homo Sapiens; identical to SEQ ID NO: 341308

SEQ ID NO: 472040 - DNA, 1000 bp, Homo Sapiens; identical to SEQ ID NO: 341309

SEQ ID NO: 472041 - DNA, 1000 bp, Homo Sapiens
tttttttttttttttttttttttttttttcactttaacaaatctactttaattctaaaagaaattaatctagaactgtcagtaatacacaacatacttttatgtttcttttataggtatctatctaataaaagtttatttgtgtatgtgcaatgcataactctatcttagatatgaatcctaacaggatgaaaatactttcttgcaactactttatgcttatgaaaggtgtgaacttgcaatgtcctcctgtcttaaacccaagttgacagtgccctctcaaaacttttcataaataatgacctaatttcatttaaaaaatggtttcagcaaatatgaaaatagaaagtccgttatttgtccatttgtaatatgagaaaaaaaaagatgatacattcctctacagaaaaagtgggtttagagaacagttctggtagtatttcacatggtaaagtatcaaaagatctaatgagcagcccccttgctcagggaaagacagtgatttcaatgtgtttctcttccgaattgcttagtaactccaagtgattttcaaattggggggcagattactggcactgagttcatcaaatttagatctatcttgaatagggacattatagaaatcaagaacatctctaaccctgcacatctggtggagtctggagttagggactacatgacccaagtcatcagctaaatgagccagaagattgaactttagacgactatcttccagggagatgtcttgccaattactaggaagagatgaaccaaaaacttctttaacgtaagattccaaacgactctggagatcttcaggtggtgtgtatgctcggcttcgtaaaggtggacacactaggataggttcctttttctcttctactgtctcaacaaccactggctctttctcttttctgaatcgagaccaaaattctctacatggtgtccctgagactgtccacatgaagactcttctggtaatgcccgacacagatcgcgcc

SEQ ID NO: 472042 - DNA, 1000 bp, Homo Sapiens; identical to SEQ ID NO: 159849

SEQ ID NO: 472043 - DNA, 953 bp, Homo Sapiens; identical to SEQ ID NO: 159850

SEQ ID NO: 472044 - DNA, 1000 bp, Homo Sapiens; identical to SEQ ID NO: 341312

SEQ ID NO: 472045 - DNA, 699 bp, Homo Sapiens
tttttcaggaggtagaagctttattatgacatcttcaaaagacaatcaaatcaataggcatttgctgagcacctgctgtgtgcaagcccgtgtagacagtagggtccagtgtcccacgcatggctctcgaatccccggggagaaaaatcacatcggggtcagggagttttgcgtggctgagaacaaagtgggtttctgaacatcaaagtgcaattcgctttacggggcaaactccgaggcccagccccgcgtgggagccgcagcggggcgggcccgctctgggctgggcgggtttctctagcgcagcgctgggggttgcgggcctctcagcagccggagcagcatcctgagctccggttgttggagcgctgggacctctggctgccgcccccgcagcagcagcaaccactactccgctgtcgacggcgtctccttgggaagcagcagcaactggtggagctggagccgcagcagcctgagtcgccgcagcagcccctgccggagccacagcaggaggaggaggaggcgggcgccggggtgggcgccggggcgggacacggagcggggccctgggacgaccccttggaaaagcctttggcggaaacggcgctctgttgagaggacatcgcggagctcctcacgacaaaccagaccctggctccactgaaagactcactacgttctccaactggaatgggc

SEQ ID NO: 472046 - DNA, 1000 bp, Homo Sapiens; identical to SEQ ID NO: 159851

SEQ ID NO: 472047 - DNA, 1000 bp, Homo Sapiens
tttttttttttttttttttaaattgcaaaaagaatggaattccagttctattctacaatggcatcaatactgcaatactttcatcaagttatataaagaaaaaccaagaacattggaataagaggaacaggagcttcccccatcttgtcatgttcaagtagtttgtgtctgctcccctagccaccaacagttttagctatgctatcccaagggcaagtgcaagcctgtcatccaagcgtgtaattcttgacccaggctggccatctcggttgtggcttgcaagtcccgctggcatgtgatttcccaaaggagccagtcttagtccgtaaccccttaccctgttcattgtggaagtccgggggcccaagggcagaaagggctgcagggatagcctcatcagagggcactcaggcaatggaagagatgtggctgtgtttctgctctctgcagaagagagtcctggaggagggccagcagctgccccgggtgctggggagacagcagaagagggtggacatcagcagggccagggcgatgatgaaggtgagcacccatcgtaagacacccgggtagatgaagggcccgatgaggataatgagcaaggccagcaggagtaggtgcgcggccaggcgccgggctgccacgtggtttgcacttacttcatcctgtccatcctctcccaccaagctggggtgtcctgctgccaagtcagcaggatccaccagcccctgaggacagagcgatacctctgtgcatggctgggccagctgccccaccaccgcctcatggtcgcgcaggctgcagatgaggcccccggggacggcggtgaccttgcggcacagcgggcaggtgatggaccaggtgttgtcctgcacgcacagcaggagcttcaggcagatggcgcagaaggcatgctggcaggccagcagcttgggcaaccggggacagctgtagggctcccggcacaccagacactccaggtcacattctgtggagccag

SEQ ID NO: 472048 - DNA, 1000 bp, Homo Sapiens; identical to SEQ ID NO: 159852

SEQ ID NO: 472049 - DNA, 1000 bp, Homo Sapiens
tcattcttatcttgcccacaatgcgttaaacctaatcatcccacagtgccaaggccagtcgccttatttacacctctgctccccagacttcacctttccttgtccatgctcaggaaagtcaattccagcacagggaggcaggggtcagttgtggggggtttctcccctacccttgggctctcttccttggattcaatattttaaaaaatatgcaggaacaaggaaggcgctaagcaaattctcaccctttagttttttgttttttgtttttcttcctttttctaaataaaccaaatgcttggtggagaagttgagcaggggagatgggcagtagaggttgccaagacagggcagggggtctggatgaggctgtccgatgcctgccagccacagtgatggtgcatggagggaaggaggagcagagagagaagataggcgtggcctccgggatgcccattctttttgcagagagcagcggcagtgggtccaggggtcctggaggggctggaagggggcagctggctggacatccagaagctttttcttccctcggccacgcctgcctggcggcctccagtccttagcctccgctccctctctctctccagatgcccgccccactccgtgtccatagcagtgacacagccacttccccagctccgtgtaattcccaagggagcagtgaaccccaccatctcaaagctgaagagctgctggccacacacatcctctcacggttttctccctccttctgaacgccggctttgctggccctggaatctctggaaaaataaactcaggaggtgaaaagttgacttggtttcttggtgtttttgttttctggcaggcagtgagaggaggggtgaaggaggagtttggtgccatttctctttctgctttttcctcttctgatgtcaaacaaatgatgaaaatcctgctatgggagcccgggagcctggggccaggctgctggggggacggtagagggtgctctgctgac

SEQ ID NO: 472050 - DNA, 1000 bp, Homo Sapiens
ttttttttttttttttttttttttttttttttcccaaccagggtttatttggcgcctgggcacagtggtggctacctggctaggttgggcactacaggggcatgactcctactaggtagaagaatgtcaccgaagagggcagggtgtggtcagtgtgggtcatgcgtggccatgtgaggggtaggggagaggccaggaccaggaggcaggggtgctggctccaggaagccgcccccttcaaccttgggcttcaccaggacctggcagcacagacactgctctgccttctcaggtgggggcaggggcggcctccttcacttaacaacagggaaacaccttcttgtggaggatggattgaaaagaagcttctgcaccaaagtgtctgtctagaaaaaaacgggatttccttcacaagaagaaggggctggtgggctcctccacgggcctctgggaggctgtcagtcccgtcccaccgtgcaccaagcagctggcaccaagatcctggagagggcctcaggctggctcagtgtgtccaccttgacgtgccggaacgccttacacagggggctctgcaggtgcctcttccacgcctcctctgtctcccagaactcatagatgacaaaggtgaagccatctgagagcctcacggcagtgatgtggaagcagttcctcacgccagtggtcccccgcagatactggcgcagagagtccagaaactcgctcagttgctcggggcacacggccatctcctgccggaccagctgcaggtgcatgttggtgccatcttcatctgacaggcgctgctgcaggtcgaaccacagtgctttgctctccagcctcccaatcagctctgccaagcggctgatctgggcttccagaccctcttcctttgcatcctccgtggcagatggaagggtcttgccttgttccatagccatgagcttgtggttgggggcagaggcgggagtggggcttccacaccaggtctgtgccgcgctgt

SEQ ID NO: 472051 - DNA, 1000 bp, Homo Sapiens; identical to SEQ ID NO: 341316

SEQ ID NO: 472052 - DNA, 1000 bp, Homo Sapiens; identical to SEQ ID NO: 246535

SEQ ID NO: 472053 - DNA, 1000 bp, Homo Sapiens; identical to SEQ ID NO: 159853

SEQ ID NO: 472054 - DNA, 1000 bp, Homo Sapiens
gaaatggagtcttgctctgtcacccaggctggagtgcagagagactccatctcaagaaaaaaaaaaaaaaaaattagctgggcatggtggtgggcgcccgtaatcccagctacctgggagcttaaggctcgagaatcactcgaatccaggaggtggaggttgcagtgagctgacactgcaacaccactctagcctggcaaaagagcaagactccatctcaaaaaaaccccacaaaatttatattacttcctttttcagttttccctcgtaaaacttgtgaagtcattacatgtcagcaccaatttcattattaataaacaaaaaatatactctagttggaattaaactctcatcatcaatgtagttagacccatgcaattaatacctaatgccccttttctccactaactaatatggcatctaatttataataaaatattttaagtctcctgttatatttaaattgcatcaaatttaaattatgttaattataagactggcatgccaagccaaattatcacagaagattacatgaacaagcaatgttagtgatagatgctttttgttatccatcaaataattactaagttttctttttaaaaaaaatcagtgtttatgggcacagaattaaataccatttagaaaatccttaacttaggaccaggtcactggcttagttaaagtatatttatatttgatagtttccaaggtaaggttaccattggggaaattgtgataattaagtcaaacagttgtaccactgacctaaccagtacattaaggatttctaaatgtatcttattgtgtatttagcataagtggccatgctaatattatcaataccaaactgcagacaagattagttaagaactatgcagaaaacctgagcatcctacctttactttctatacattcgcattaccaattttttcttttcaaaacatcccttgcatcaagtgctactttctaacagctcttaagattctctgttcaccagaac

SEQ ID NO: 472055 - DNA, 1000 bp, Homo Sapiens; identical to SEQ ID NO: 341318

SEQ ID NO: 472056 - DNA, 1000 bp, Homo Sapiens; identical to SEQ ID NO: 159854

SEQ ID NO: 472057 - DNA, 1000 bp, Homo Sapiens; identical to SEQ ID NO: 335208

SEQ ID NO: 472058 - DNA, 1000 bp, Homo Sapiens; identical to SEQ ID NO: 341319

SEQ ID NO: 472059 - DNA, 1000 bp, Homo Sapiens; identical to SEQ ID NO: 159856

SEQ ID NO: 472060 - DNA, 1000 bp, Homo Sapiens; identical to SEQ ID NO: 159857

SEQ ID NO: 472061 - DNA, 1000 bp, Homo Sapiens; identical to SEQ ID NO: 341322

SEQ ID NO: 472062 - DNA, 1000 bp, Homo Sapiens; identical to SEQ ID NO: 341323

SEQ ID NO: 472063 - DNA, 1000 bp, Homo Sapiens; identical to SEQ ID NO: 341324

SEQ ID NO: 472064 - DNA, 1000 bp, Homo Sapiens
ttttttttttttttttttttttttttttttttttgttggagtttcacttgtttaatggtctgggcttattttggaaaaaaaaaaaacaaacaaaaaaaacgaattctgaccttcgttgtgctacattttgtgggaaaccattggccctgcctctggcctgtgtttctaagcctcaagccaagatccttgagcacctgggggttgcgggaggtatgtgctgggctgaatgacatcataggggctgggaggggaagtaaagagaagttgactttattaacagcaaaggtttgggggtggggaacaaacaagtgaaaggctcacaaacagaccactagaaaagtgctttgctgctcacaataatggtgtctgaaccagccctgaatgccctgggactcagtcactgtcactatcagcttcactggaatcagaagctgcagcttcactgccatcctcctgggccgagtgctcgctgccactggggaagggactggcgctgcggctgtggctccggctccgctggccacccccattgctgccgctgtctgaatcattgtcactgccaccttgggcctgtcctctgtcctcatcatcagagtcggcatcgtcctcagaatcagcatcactgccaaagatctcctctttgtcacgggcagcccgggcctcatcctcgctgctctcgtcctcaccactgccactcttgtcactggcctcgtccctgtcaccttcctcccgttcactctcgctgcccgagtgctcatcttcactgccctccttctcactgctgctgcccttctcctgctcctcatctgagcccccagcttctttctcttctgtctccatctcctcttcctcttcctcctccggttcgtggttttctagctgggccttccgtgcctcctgagcttccagttccttctcattcatgtcccgatgtttgaccacaagcagggcgttggtgcctgactgaaccccagccttggcccggcgcttactaaggcgg

SEQ ID NO: 472065 - DNA, 1000 bp, Homo Sapiens; identical to SEQ ID NO: 341326

SEQ ID NO: 472066 - DNA, 1000 bp, Homo Sapiens; identical to SEQ ID NO: 159858

SEQ ID NO: 472067 - DNA, 1000 bp, Homo Sapiens; identical to SEQ ID NO: 341328

SEQ ID NO: 472068 - DNA, 1000 bp, Homo Sapiens
tttttttttttttttgttttttttaggtaaaaagtgaatgtttatttgcattgaacagaaaatatgttctgggtgttagcaatgggattgaaaaagaaaggataattagaaagatttaaaaagaaaaagaatttggtggcaccaaatcaacaataaaagagttcttgaattttcttagattttagtctgatggattggaaataaattgatattatctgaaacaggatagcttgggggggaaaataactgccaggcgaaaagcataaattgcaatggtcttgtattttaatatcatttgaataaattacagggtgtaaagggaaagcatattgctcacaagttgaggacttttgtccttttcttttcctattatcagatgcttcagccctattctaccttttgtttctgggtttttaaatcaccctttttatacgcaattcactctttctgcatacaaactcccatttatcaaataaatactatttaacaatttgtccatattcccttaaatcctgaaaaaaccaaccatcctttagtaaaacttgttatattttgtgatactctaacactacatgcaaaaacggtgactctatcaaatgatgcagtttattatagtgattgatttgtacatggtttgctaaatgcatctatgttgtaggctttttggctaatatgatttgttaaaaccctctcagcaaagtgctgtaacagtgaccatctttgggggacttggaaatagcctcattacacagaacttgatgttatacactaatggcatttattagaatggaatttctatatgtattattacttccgacaccagcctggcctttgtagcctcctcacagcatgcaacgtcggtaattatgctaatgctagctaattcatgaggacaacttctaaagtgcccttaattaacttggagattttgtaaacagctatacatgtaggttccggaaattgtggggatatgtcaatctgacatgtgtagagtctgcct

SEQ ID NO: 472069 - DNA, 1000 bp, Homo Sapiens
ttttttttttttttttttccaactcagcagctctatttacgtaacagcgtcgcccacaccccgtggggcctctcacggcttcttggctttcttcacggaagatgagctggaggccgactcccgtcgctttctcgaattgggcgtgaggggtgcgcccaccacatcaatgatggtgtccttggggtcaggaccaagtccgggttcagtcactgccggctcagcagaggccgggcctgggcctgatgctggtgtggcagggccccctagcacaccagcccgggccagtgcctcatgacggtgccgcagcatctgcagctcatactcgcagttggcacaggcctgcttgagctcgtagagcagcaccaggtcgcttcgcagctcattgaacatgtgcaccagctcctccgtaggtgtcgggctcagctccacaccaagctccagcagcatctgttccagggccttgatcttcttctgtcccacagagcttggcagcttcatccgttggctccgcagcgtgacacctgcagacttgaagtctggaaacttgatgcctgcagtctcaggaacagccggcttctcagcctcctttttctggggtagcttctttttgggggccttgcgttccgtgcgccgctgctctgcagtggtgtctgccgctgtgatcagcttctgcaggtcctggctgcgtttctcccgctccttcttccgggcctcaatcttgcgcagctcctgtagcaggtactcctcctctgccacctgctctggggtccggttgtagagacgctcaagctgttccttccgccgtcgttcgtgcccagcatcaaatactggtatcttaaggtctgtgcctggcacagcccgcacgttggcaagcttagcacagatgtggtagtaccgctccttcaggtcttccacagaacgcttcttgaactgctggtggtcataccggtcatggataacaacaaaacgcaggtcaaagcggcggctgaggtcaaagagg

SEQ ID NO: 472070 - DNA, 929 bp, Homo Sapiens; identical to SEQ ID NO: 159862

SEQ ID NO: 472071 - DNA, 1000 bp, Homo Sapiens; identical to SEQ ID NO: 341330

SEQ ID NO: 472072 - DNA, 1000 bp, Homo Sapiens; identical to SEQ ID NO: 159863

SEQ ID NO: 472073 - DNA, 1000 bp, Homo Sapiens; identical to SEQ ID NO: 341332

SEQ ID NO: 472074 - DNA, 1000 bp, Homo Sapiens
tttttttttttttttttccacccaagatcatcaaaatagtttattgtgttcagaaaaatcacagtttgaggaaaccttaaacaataagtacacaagagatgccccatggggcattccatagcagagacagactcctgtatgttttattccagaggcattgcatggtgataataaaatgataggaaatagaggaaaatagatacaggaaaaggcaatagacagggaagccagctagatgttagagtacggagcaatcgaagaggcatatccacacttggggtggctatagggctggaaaatgctgaagatgactgctttcactgaggtcaaggattgtaatattgccagctttgtaaagccattaaagcagaagtttcttcagtgatcttctctctaagaaacaccatcacctccatgtgccttacagaggccccctgcgttctgctgcattgcttttgcgcaatcccttgatgatgaagatggtcccaataatgatgcccaccagacccacagtcaggcccagggcacacaccacgttctctgtagtctctgggagagggcttggagcatcaaactcccagtgcttgagaagaggctcatccaagccccagtgctccaccctgcagtcgtaaacgtcctcagttgagggcaggaaggggagatagtggaacttgcggaaaaggtggtcttccctgggcaggaagactgtctctgacactcctgtggtgacaggttttccatttcgaagccacgtgacattgaccactggtggggtgaacttgtctatgaaacagatgaggacgttgggctctctcagttccacagggctgttcgtgagcacagttacctctggaggtacattggtgatcggagtatagttggagcgctttgtcatgatttccaggttggctttgtccacagctatgttggccaatgcaccttgagcctcaaagctggcaaatcgtccaaattcttcaagccgccagaccgtctccttctt

SEQ ID NO: 472075 - DNA, 1000 bp, Homo Sapiens; identical to SEQ ID NO: 341333

SEQ ID NO: 472076 - DNA, 1000 bp, Homo Sapiens; identical to SEQ ID NO: 159865

SEQ ID NO: 472077 - DNA, 1000 bp, Homo Sapiens; identical to SEQ ID NO: 341334

SEQ ID NO: 472078 - DNA, 1000 bp, Homo Sapiens; identical to SEQ ID NO: 341335

SEQ ID NO: 472079 - DNA, 1000 bp, Homo Sapiens; identical to SEQ ID NO: 341336

SEQ ID NO: 472080 - DNA, 1000 bp, Homo Sapiens
ttactttaactgaaggctgaaaccaaagccattcctaaagttagagttttgttccatttctggcccaaaagaatggccctgaatattaggtaatactggtttcaggaactggaactcattcgtccctgagcctcctgccaggcacacctcgtactgatagttctgagacaggctcccggtgcccctcacgtccaccagatgccctggaaaggggccctcaggcactgagcagcgacccaccgaggccgccctgctcctcctacacagcagcaccgccacgaacaggagcaccgagaagaggaagagcgaagacaccgaggccaacgccaccaccaggtagacggtgagagagtcggcctggccctgggctggggcagcctccggaagcggcaggtagggctgggagaagccgtccaccaggagcaagtgcagcgtggcggtggccgagcacggaggctcgccattgtccttgaccagcaccaccagcctctgcttggccgcgtcgcgctcgctcagcagcctggcggtgcgcacctcgccattgtgcgcccacacaccgaacagcccgggctccgtggccttgagcagctggtacgacagccaggcgttctggcccgagtcgccgtccaccgccaccaccttggtcaccaggtagcccggctcggccgcccggggcaccagctcggtgcagggcgcggagccattctgcagcgggtacagcacgaagggcgagttgtcgttggcgtccagcaccagcacgcgcaccagcgcctcgctgctcaaagccggggagccgcggtctgaagcgcccacccggaactcgaacgcctgcagggcctcgtagtccagcgacctgagggcgaacaggtggccgttgtctgtgttgatggagaccagggaggcgaggggcaggtgcggatcctggggcggcagcagcgagtaggtgacctgggcgttggtgcccgagtctctgtctgtggcgctgacgctgccgatgtgc

SEQ ID NO: 472081 - DNA, 507 bp, Homo Sapiens
aaacttccaagaatctttattgaacttgctcagcatcaagcacgtgtctgaaggagccagggtggaaaaaaaaaagtgcccactggcgacagggagggccccagctggcagaccccccaaccacatcagaggagttttcatttcttcctgggctgcttatctgggaagccttcaaagaattcgttacacatcatggcgatgcaggacaggaagacacagtactcttggaagtccacctcgttgtccctgttgctgtccaagttgctcatcagcttctggaaagcagcttcatctgtccttttccccaagaagctgggcagctcccgggtcagcagctcctttagttctgacttgttgagcttgaacttgtcaccctctttgcccgagtacttgtggaaggtggacaccatcacatccagggccttctccagagggcacgccatgacagcagtcaggatcacacgtactatagcaacagcgtgtgcaagcccacatctcagaagcacc

SEQ ID NO: 472082 - DNA, 1000 bp, Homo Sapiens; identical to SEQ ID NO: 159866

SEQ ID NO: 472083 - DNA, 1000 bp, Homo Sapiens; identical to SEQ ID NO: 341339

SEQ ID NO: 472084 - DNA, 1000 bp, Homo Sapiens; identical to SEQ ID NO: 341340

SEQ ID NO: 472085 - DNA, 1000 bp, Homo Sapiens; identical to SEQ ID NO: 159868

SEQ ID NO: 472086 - DNA, 1000 bp, Homo Sapiens; identical to SEQ ID NO: 341342

SEQ ID NO: 472087 - DNA, 1000 bp, Homo Sapiens; identical to SEQ ID NO: 341343

SEQ ID NO: 472088 - DNA, 1000 bp, Homo Sapiens; identical to SEQ ID NO: 159869

SEQ ID NO: 472089 - DNA, 1000 bp, Homo Sapiens; identical to SEQ ID NO: 341345

SEQ ID NO: 472090 - DNA, 1000 bp, Homo Sapiens; identical to SEQ ID NO: 341346

SEQ ID NO: 472091 - DNA, 1000 bp, Homo Sapiens; identical to SEQ ID NO: 341347

SEQ ID NO: 472092 - DNA, 1000 bp, Homo Sapiens; identical to SEQ ID NO: 159870

SEQ ID NO: 472093 - DNA, 1000 bp, Homo Sapiens; identical to SEQ ID NO: 159871

SEQ ID NO: 472094 - DNA, 1000 bp, Homo Sapiens; identical to SEQ ID NO: 159872

SEQ ID NO: 472095 - DNA, 1000 bp, Homo Sapiens; identical to SEQ ID NO: 341350

SEQ ID NO: 472096 - DNA, 1000 bp, Homo Sapiens; identical to SEQ ID NO: 341351

SEQ ID NO: 472097 - DNA, 1000 bp, Homo Sapiens; identical to SEQ ID NO: 159873

SEQ ID NO: 472098 - DNA, 1000 bp, Homo Sapiens; identical to SEQ ID NO: 341352

SEQ ID NO: 472099 - DNA, 1000 bp, Homo Sapiens
tttttttttttttttgttggtaatttggattttgttaagacttagtttgtgggtgaggcaggggggcggggctgcactctttatttctcttctgagtcgtgtttcttccagctgtccagaatgtacttaagaaggaggccgagcttcctgcaggttgagagtggggcttcctccccacctccctccccggagccccccttttccacgccattgtcactggccacttccaagctgacctccggctgcggctcgtcatcctccagggccttgatgcggacacgctgggcgtcctcagccatctcgttgaggcagccctggagcatggtgtagacagcgccaaagctgatgccgccagccaccagcgtcccaaacacagggatgcccctctcaaaggcgcgggccacccgcatggcgccgtcggacgactgggaatagagccgcaggacagtctcaggcgagacctcgttggccagtggggagcggatgaccgagcgcaggtcacctgcctgtttgcccacctgctcggccagcttggccagcgagtcgtcgtccagaccaaagctgcggtggtagccacgcagtgagtggatgagcaacgcatcatcgtaggcggccgccagccctgggaccggcagggcctggatgacgcccaacaccagggcggtcttgaggacttgctcttgaagcatggccttcttcttctgcaaggcctccagcgagatgtcggggagcgacagcaggccagcgtggcgccggtgggagggcaggtcgtgctcccaggtggacaccagcgtgggaaagtcgtagcgggccggcgagaggttggacaccaggaagatgcgagggtcagccacgccggcctcccgcagccgctcggcacagtggtctcggatctcctgcaggacagcggcctctctgaagcccgacggccgctgggtgcgcgtggccgccaggtcctcgtccaccttggtgcgcacaaagtagaacttcttgccctggc

SEQ ID NO: 472100 - DNA, 1000 bp, Homo Sapiens; identical to SEQ ID NO: 159874

SEQ ID NO: 472101 - DNA, 1000 bp, Homo Sapiens; identical to SEQ ID NO: 341356

SEQ ID NO: 472102 - DNA, 758 bp, Homo Sapiens; identical to SEQ ID NO: 341357

SEQ ID NO: 472103 - DNA, 1000 bp, Homo Sapiens; identical to SEQ ID NO: 159875

SEQ ID NO: 472104 - DNA, 1000 bp, Homo Sapiens
ttaggggtaagaggtagtacactttattgaccgggttctctcaacatgttgcaacctctggcaaagccagatcctgggctttgccaccatcccatccaccaaagacagaagagaatgcatctcatgaacatccacgtggcctccagacagcagagcacaggggcgggtgtggggagggaggctgccagccaggggtgggtggacgaggggcgaaagcgctgggtgccgggctgggggcacccctgaggcccctccagacctggccagcccctcactcccccagttgaggtttcgtgtggttcacagtgagactggcttagattggcagcgggcgatggcagacagatgccctccacgctccctacccgccctggccagactcacagagctggcaagagggagagacggaaaatcccgttccccgtgtctccctccgggacagggaagccccttctctggaggggtaaaggggagaggcctagtctctggacatcccccaggctactaaggaagggccattcactcctggctcagaagtttctagaacatcttggtgaaagtgcccgccattactcccaattagaaaaaggtttttgaaatctaggagttgactggggtgcctcaaaccaaacagtaaaaaccctggtaagacctaggtttaaaaaggcagctctacctttgcttaggaggctagggaggtccgtgaaggcgttggctcagggcagcaggggtaaggagtgccctgggaatggggcagggaccaggggcaagatgcaggaagcggtgatccatgggacatggcaggtcgtctttcagtgctgcaggcctgggctcggagggcagctgggggcctccgtgggcacatctgccaggcaggcaccgggtcctctgccccaccgggagaagcaggggccccccatcaggccttgtgactgccgttggctacaggctcgttgtggccagctgtgaagtctgcggcgggctgaagccccagcatctg

SEQ ID NO: 472105 - DNA, 1000 bp, Homo Sapiens; identical to SEQ ID NO: 341359

SEQ ID NO: 472106 - DNA, 1000 bp, Homo Sapiens
tattagcagctgttgatagccattgtgtttaaatatacattatggcctaatcttgaaaatgtagtttgtatttagtcacaaagcagaaatgcctgaaatttgaaggtgtttactcccataatttcaaaatacagtgtcaaatcttctaaatgacctaaacttgacatattcatacaccccatagcattagctgtgtttggtttctcaggctttttaactcaaggtacattactaaatgagtgggttaatgtcgatgcaccttggaattttagccatccctaaacatgcattttcatgcaattaaaaggtaacgggcttataaactgcctttcatgttcttcccgattcttgcaatttcaactttttagaagggctttcgaaatagttcatgcaatgatatgtatggctaaagaactgctatgcctggaaagaaaatgaagaacttatttcagtttgacatgaggcaagctgagggcatctgtactttctcctgccttacaaatgctctgagatgatcgtgaccttccagtccttagagagtctgatgcaaaggcagcttccctggcaggctgcggtgcggcatcaaaagtgtctgtctctgtctcttcgggacccacctcttcatcagttataaacaatttggattccctccatttggggtaaaaatcttggctgcctctggagccacttgactcactccctgaaagttgtatattcagttcctcggtcgacctgatcaggttttgcacagacaaagatttgcccaagtccttcggcaccatgggacagacagacaacagagtttctcctcccatgtcaaagcttttcctcatagaacggtccttggtgagatttgactgtgcaacctgaacattttccttggaggcaacaaggcaggtggtgacgtcagaaatgctttcctgtaagcctgcagggttagggtgcagagtttctggcctgggcagatgcttgatggctgggagaggaggtgggatctgta

SEQ ID NO: 472107 - DNA, 1000 bp, Homo Sapiens; identical to SEQ ID NO: 341360

SEQ ID NO: 472108 - DNA, 1000 bp, Homo Sapiens; identical to SEQ ID NO: 341361

SEQ ID NO: 472109 - DNA, 1000 bp, Homo Sapiens; identical to SEQ ID NO: 341362

SEQ ID NO: 472110 - DNA, 1000 bp, Homo Sapiens; identical to SEQ ID NO: 341363

SEQ ID NO: 472111 - DNA, 1000 bp, Homo Sapiens
ttttttttttttttttttttaacagccagccctgtttatttataggccttttcaggaagagctagcagggcagtgctaagacaggaaacccagtccacattttagggcttccttaaaacaggcttctgagagtcgtatcttttttcttttttttccagaaaaaaacaaaacaaaacttttttgccaaaacacctcctcaataaacaacatgtaaacagaaacaactgcttcagtctctacaaaaatctcattgtggcttcgagggcttgtctgtggcaggcagcagggagggtgggcaggggccattctcctcctcttcgggggcgtcctgggggtagaccacgaaacacagctcctggccccagtgtgtcatggactctgtgagtctgtgcacacactttggtttgcttctccagaacactcccagaaagaaaatgggcacccccgtaaggatgatgatgacgccgaccccacagaccataggctctgagatgaagctgaagaccagcaggaaggcccagaagaccaagtacgccacggggatgagaaggttcaccttgatgggcctgtggagtgcaggccgcctccagcgcagcagcagcaggcccaggatggtgacgccgtagcagaggtagttgatgaaggacacatagttgatgagcgtgtacgtgtcgcccacgagcatgatgacggctgtggccccgcaacagacgaggagggcggggatgggggtgcagtgtctgacgtggatcatggccagcaggctgggcaggtgcccctcgcgggctccagagaagcacagcctggagtaggtgaacaggtaaccattgatccctccgaaggttgacagagccacggagacaggcatgacccaagaaaagtagcccagcagcttctccccgaaggtcacagccaccgcattggaggagagcagctcctggggggacatggccgtgaagtaggcaatgttggtgaacgtgtacacgaaggtcaccagtgg

SEQ ID NO: 472112 - DNA, 1000 bp, Homo Sapiens; identical to SEQ ID NO: 341364

SEQ ID NO: 472113 - DNA, 1000 bp, Homo Sapiens; identical to SEQ ID NO: 341365

SEQ ID NO: 472114 - DNA, 1000 bp, Homo Sapiens; identical to SEQ ID NO: 159876

SEQ ID NO: 472115 - DNA, 1000 bp, Homo Sapiens
ccatggcaacacttcagactttaatacatattgctaggggtgatggaagctgagtagggcatctggtcacttggatgggagagagcagggccttctgagccccaaatctagcgcccgtctccccagagtctggaggcagctgccctactctcggccagaatgaggtgttactcactcaggctttctcctctgagttcagcaggcctgcttgggctcacagggtcagctggggaaagatggggttgcctgggccccaggatcctccccaagcccttgcactttcttcaccccccgtcagggagcagcgtctccctgcgcttagtcccaaaggaagtccaacggctctgctctcaggggacccaagggagagtcggcggggtgagaggcccagtggccggggccgacgaggagagtgccctggtgaggcagtcggagaaggcagaggtgtctcatcgatgaaggtggtgatctcctcccggaagaagccaggaccccgtgggggtcccccacctgaccccagaaccccactctccaagaattggcgaaggctggccagccccccaccttcagcctcttcctcgtcctcctcgtcctccaacctgtgtctttgtcccaggtactcaggaggacccccgagggcccggctctgggctgggaggacccggatgtcatcagaggatgaccacttgtgcaggaaggagcctggttcccgaggggtagagaagatgtttgtctcatcatgggacagacgccgggatagggggacctgtaagtagtggactctctcaagaggagggaagagcatgtgccttccaggcagcagcttcacctgggcggggtcccggctccctggtcctgtggctccgttagcatcaaagcgaactttgcaaactcggccctctgcatagtcgtcacagcccccatcgtcatctccatcctcctcagacatgatggccacgcattgctcccacactgtgcgcacgtcggcgcggtagcgctc

SEQ ID NO: 472116 - DNA, 1000 bp, Homo Sapiens; identical to SEQ ID NO: 341369

SEQ ID NO: 472117 - DNA, 1000 bp, Homo Sapiens; identical to SEQ ID NO: 341370

SEQ ID NO: 472118 - DNA, 1000 bp, Homo Sapiens
ttttttttttttttttttttcattaacatgactccagagtcatttaatagtatgattacaaaaacgccagacagaaaaattttaaagtaaaagtgtgtttcagttcattagggttttcccagcccagggagaaaaattacttctttttaaaaatcagttctgggtagagggagacggagctatttgaaggacagctggatgagtcaggttaaaaacaatactgcccagacctattattatttaataatattattaagtaatttaatcaagacaggactgcacttggcccttattcacattgatgttttcgtccagacacctgctggtgtgaaatggtaccaaatcacatctcttctttgttgtgaggatgccttgttgaaatggctccagcagtggcaggttcagcctgggaactaaagctcttcctattttacagccataaatatccacattgcactgtcacttccttactggaaacttcatctcaaccaatgcgtccgtcattattgaacagctcatgatattcctgctcagcagaattgcacagcagttgttggtagcaagtcaagtcccagactctgagagtgtgacagattgcccccacagcgctgcttctccagtgctggggcagcatgccgagtgcccctgttcgtggtgactgacccggatccgtgccggggacagggatgggaggctacgtggcgccgtcggcatccatctccagcggcgtctccccttccctgggctgctccgcgtcgccctcctctccgctgcgagggtaggcgagcagacgcatggctggagcgcaggcggcctccacctggcgcacctgctctcggctcaggcgctcgcgccaggcgtgcaccgcctcccgggcgtcgcgcgctgacaggtggaagggccggtcggcgccgtaggccgcgccgcgagtcatgttgagcgcgaaggcatcgagcgctgcgagcgcgcgtagcccggagaagcgcagcaggcggcgcag

SEQ ID NO: 472119 - DNA, 1000 bp, Homo Sapiens; identical to SEQ ID NO: 341371

SEQ ID NO: 472120 - DNA, 1000 bp, Homo Sapiens; identical to SEQ ID NO: 341372

SEQ ID NO: 472121 - DNA, 1000 bp, Homo Sapiens; identical to SEQ ID NO: 341373

SEQ ID NO: 472122 - DNA, 1000 bp, Homo Sapiens
ttttttttttttttttccagagatgttacacagctctttaataatagtggccatagctgtaataacaatgacaacagtaggtaacggtagtcataccaacagtagggcagtgcattttatattacaactggtttcttgctctagtaggcttggggatgggtgaagacggacagggctggcgcagaccctttccttctcctctccagcccacagtgatctgggcttttacaagacagcctgcttccattcagtagtgtgggaaagttccttcttggcttagcaatacccctgagaccttgttcagtgggctgtgtctctccctgggatgctgggagcaccaagtgtggccgagctagggctgctgacttcctctgggcgcctctgggctgcgagggtctcttacaggaattgaggccctttgctgctccaagaaatgctgaggctgtgggcagaggggtgtacccaaggggactcttgctctgtgtctgactttgggggatccccaggtgggcagggcaggaaggaagcggctcccagcactgcaaaggggcagcagcattacagctcagccttccagacattgtagatccagttgagataggctgagaccttggtgtatactcctggggtgctcgggcccccgcagccatagccccagctaacgatgcccaccacatgccactggtcagattggtacatcaggggcccaccactgtcaccctggcaggtgtccacacccccttccgggatgcctgcacacatcatcttctcggtgacttccccctggtacgcatcgtctgcattgcaccgtgtgctgtcaatgacctggactgacgcctgcagcagtatgtcagacatcttccctccattctgcttcgtaaagccccatccaatgatccagagtggggtggctggagtgagctcctcatcaaagaagggcagacagatgggcctgactgtgcctgagaaagtgagtgggaactgcagcttcatgagggcg

SEQ ID NO: 472123 - DNA, 1000 bp, Homo Sapiens; identical to SEQ ID NO: 341374

SEQ ID NO: 472124 - DNA, 710 bp, Homo Sapiens
ttttttttcttttttgaggttgatcaaaaacctttattctggtcctcatcattcaggaagccacttatgcagaacactttcttcatctctgctctaagcagcagcagctgcatccaggcttgatatggaagacagacagaaatagtggaagaccttgcagagaagagctaattgatgagatctctgcttatcccggcataggtgaaggcagaacaggaagagtgtgtgtaagtgcaaagactccgttcttcaaagctgaggcctgtgcagaggggtgaactgaaggcttcagatgaaggctcacaaaactgccccgctcggcaatcaatctaaagtaccttccagaaaagcaaattcatccacagcttctattgcattatccaagtctctcctctgaagggttttcctttttccctgctgagcgcaacagtaggcatcttttgcaatggtctccacaaacagttccgcggctcgtgccagaatgaagatggcttcctgtcccgctagcgtcacgtcgggatctgccttcaccaaggccttcactcgcgccagaggcaacctcgagagacgagccccaggcacactcgttggggcctggggctgcgaggccgctgcctccccagcaggtccctcctcctctcggggcgtcccgcttcctgccgccgccgccgccgccatcccggccttgagcgtgctgcgcgcggccgccg

SEQ ID NO: 472125 - DNA, 1000 bp, Homo Sapiens; identical to SEQ ID NO: 341375

SEQ ID NO: 472126 - DNA, 1000 bp, Homo Sapiens; identical to SEQ ID NO: 159877

SEQ ID NO: 472127 - DNA, 1000 bp, Homo Sapiens; identical to SEQ ID NO: 159878

SEQ ID NO: 472128 - DNA, 1000 bp, Homo Sapiens; identical to SEQ ID NO: 335431

SEQ ID NO: 472129 - DNA, 1000 bp, Homo Sapiens
ttttttttttttttttttttctttttttttttttttttttttttttttttttttttttttttttttttttttttttttttttttttttttttttttttttttttttttttttttttttttttttttttttttttttgttggttttggcaaagataaattacatttattttacagggatggagaaggagggggaaaggagaggtggccaaagccccggtgggcgggatgggtaggaggcagacctcatgcaggcgataccgaggacacagatgagacctccgttttggaggcgctggagagttcagagccatcgtcaaccttcttcccgaaaagctgcaagatgcagtttcgaaactgccggttcataaagacatagataacggggttgtagatagtggcacttttggcaaagtaggccggcagggcagccatcaaagggtggaaggcgtaaccagggttggcagcagcaaagcatgcgaagaaggtgtagggtccccagcagacgcagtacgcaaagatcatcaccaccaccatgcgcgtcacttccttctctgccttctgggtggattcagactctttctgctgctttgccaccgctcggatggccagccacacttggaggtagcagagcatgatgatagcgagtgggatgatgcagcaggtgaccatgaggacaatcatgtaagactgcaccccggggtacgagctgccgctgaacacgtctgggccgcatgaagtcttcaggccgtggggccagtacctgctccaaccaaagatgggcggggctgtccacacagcagaccagatccaggagaaggcaatgcccacgatggccagcttggcatcaaatctcacattgccaaagggcttgcacaccaccagccacctctcccaggaaatgatggccagagaccagagacctgtgatcccacacagggagacggtgtagccctccaggacacacatagggtggcccagcacgaagtagccagagacctgg

SEQ ID NO: 472130 - DNA, 1000 bp, Homo Sapiens; identical to SEQ ID NO: 159879

SEQ ID NO: 472131 - DNA, 1000 bp, Homo Sapiens
gtcatttgtaagaagtttatttcgacatttaaaaaagagagaacccgagaggcctggctgcccccggaccggggctgaggctgggggctggggtcggggtgggtgggcaagccccctcggccccttcctgccccgcctgggagtggggagggcacaggccacagactcactaatccacggacacggtcacgggctcatgggtcacgaataaataacttcatatacactttgcacacggtatgtacagctcagccgctggcccaggtgctcgaggggtagggagacggggctccgcactccccttctctccctggcgggggcgcggggagaggggctgttctccacctggagcgtagaaggggcgtgggagagagcgaagcctgggaatcagccgcacccgctcctggggagaaaggggttgcctaggggagccggcagaggctgggggtggggagtggcagagacgcgtatgtacacccggcgggtggggatggctcccggacagagcggccgcgagagaggacgccgaggggggctggggagacgcagtccggggtccgggcctcagtggacttggcatttggcccttcggggggcactgggctggggcgccagggagggccgggcagggccccctcccgggaaagggcgtcgaacctgcgccctcagaaaggcgggcggaaggggccacgccgagcccgcgggaggaggccccggagccgacgggcgcctcaccgaggctgcgcggcgcgtgggaggacgccggccagggggggcagcggcgggggcggctcgctggcgccctggagtccgtggatgaggatgcggggcaccagaggtctctggagagcaggcggcggcgcgctggggccgcggtacaggtagagcgccgcgccggggtccaggttggaaaccagactctgcgggtagaaataaggcgacgggaacatccgctggagcgctgagtaattgcctgcctccgccagcagctccaacccga

SEQ ID NO: 472132 - DNA, 1000 bp, Homo Sapiens
ttttttttttttcttttgcaagtatctttattcttttattattcattttattttcatataaattaacatcctagaaaaattgaaatagaaacactaaatacagtattgcacatagcgatctttgttaaatgccctattatttcattggagaatggtaatatacacactggagggactgaaggggacaggaagactacaaaacaatagaaaaaaaaccactactgtttctttgcacttaaactacaaactaaaaagtaagagaccatactttacataaatacaaacaattatgatttagaacattggttttcttaagttgctttccataattggtttgcaagagcaataaattctcccctttatccacaactataacttgcaacgaagatcattaaaagtaatggaaaaaaacacccagctcatacaaaaccatcacaatgcattacgagctgacccaagtcattatatgacttcagtaaaaaaaatgaccattttctttcacaaatacatagttatggagagcaacccaagagttgggaaagcactgattataaacggttcttaaattttaaaatagaaaatttatacttagacatgaaactgatacaaacaattcactagaaataacattttacccatatgtctaaatgctgtgatgtggaggactggttgtcagtagaaaggaaagtgtttttgctgtgacgaggaatattctcacaacagtgaattgtagttaatgtttagcatgttgagaattagtgcagatactgcctcttacacatgctgttttggtctatcggtataataccataaacttttacaaaaagaaaaggtgtcaaattctccactggtctagtacgtttgcatttttatatgaatatacagtaaaattcaacaattagtgaactgtctagaaaacaaaaagattatgcaagaggtcaagaagaaacatgagcagaatgacggtagtttccctcccactctcaggtcagctgaattt

SEQ ID NO: 472133 - DNA, 993 bp, Homo Sapiens
tttttttttttttttgctttaaccatgtgaaatttattgaaaaaaaaatcaggaatattgagagaaagagttggagcagggaagacaggacagagaagaatggataaaagcatgaatagaagaagaaagataggatgtttgagcatcctaatgctcaggcagaggcagatgtggtcagttgttgactggggaaggaactaaatataaaatgagccaaatagagtgatggaggctttttactgcctgagtcaaaacaagcaagggcccaggcttctagatcttattgcagaaagattgatttcgacagcatataatttgcatcctcgttccatgggagaagaggttcatagatgggcacatgttctcacacccttgaaccatgaattggagttttccaccttcaaagatcttctttaacatgcactgctgggaattctgagtgatgcaggttccctctccacgaagacattttccttgatcattcatataagcacatgtgtagcaatttaatattgtgcctgtagatgtgcttgaaattggtgcacctgaagcctgttcccctgaagcgtgctcacctgaaggctgttcacccgaggcctgctcacctggaagttgctgaactgaagtttgatgatctatggagccagaaagctcattaggctgacttgatgttcctctggcagatccaagcagataaagactcattagcaagagaaacctgttcatctggatttaggaaaagaggggaccccagtgtgggccacagcttcttcacagagctatgaagcaaactgcgagcaaaagcttccagtgctgaagcagagcttctgggaattctagaacctcagaagtaacccatgtttcttcacaatgggttgggctctgaggttcttgtgtagcctgttcaggcaagttggcccttagcaacccactgcttatttcactagtgaagaccaatgattattttctgtgtgcagggtagtgtgttggggc

SEQ ID NO: 472134 - DNA, 1000 bp, Homo Sapiens
ttttttttttttttcttttttttttttttttttttttttaaaatgtaagaggtttattctccttttatcaagcagtgtctacagacagagcatccacatggtgtaagctacaaaagaaggatgtatgcgacagacttacatgaaatcattaagtcacagacactttatatggttcatgttcacaaggaagaaaattgctaaaaagtaaagcagattcaataagtagaaacataagctgatttttgttgtttattaaatctacctcgcatgtttctgctaagaagaaatctactgtatcacacagctcaggatgctatatacacataagatattacacactataaaatttcaggtttctaagcagttttatacaatttaaacttgagtaaaatttgtatatttaaaaaagaccttattggattaccttaagtaaatggaggtcatttcaacagcccattaacatttttttgcaacaataaaaacaaaaataagtacaaggattttcaaaacatgtaagctattactttaagcctggataattatctgcttattttaataaaccagctctctagttttaatctacttctgctggccttctcatttcctcttaaaagaaaacagaagcaacaatttttacttttctacagtgtctcaagtaggaggattcgttaggtttcaaactacagcacatagtgagaagatgcttttaggattacaagaagatggataaaaggaatcatttgtggaaattttagaataaaggtttttgatacattatatttaaatagcaaaaacaatggagtactacatttttacttaccactgtcgggctacccctttattcccaacttatattactaattcttctaagccactaatacctcatcaattctcttgccagttttcttttcctaggtgttaatttccctatatattgtttactttagcagacaaaagtaatgtttcttttttaaaaccgaaagttcctgatgatgaaaca

SEQ ID NO: 472135 - DNA, 1000 bp, Homo Sapiens; identical to SEQ ID NO: 341381

SEQ ID NO: 472136 - DNA, 1000 bp, Homo Sapiens; identical to SEQ ID NO: 341382

SEQ ID NO: 472137 - DNA, 1000 bp, Homo Sapiens; identical to SEQ ID NO: 341384

SEQ ID NO: 472138 - DNA, 1000 bp, Homo Sapiens; identical to SEQ ID NO: 159882

SEQ ID NO: 472139 - DNA, 1000 bp, Homo Sapiens; identical to SEQ ID NO: 159883

SEQ ID NO: 472140 - DNA, 1000 bp, Homo Sapiens; identical to SEQ ID NO: 159884

SEQ ID NO: 472141 - DNA, 1000 bp, Homo Sapiens; identical to SEQ ID NO: 341389

SEQ ID NO: 472142 - DNA, 1000 bp, Homo Sapiens
cggccgcgtcgaccctctctcagcaggcatgaggcctcttgccagtcacacaggaggagcgctgagtctctgtccagcaggaagaagttataggaagccatgcgtgtgtgtgtgtgtgtgtgtgtgtgtgtgtgtgtggtggcaggtgaagacaggggaaggcaaggggagtgctgggagtgatcaggggcagagaggggaaaggacacctgcttcctgaagggctggcatctctggggctagcatcccaggcccccttttggaatgtgggaaactagacaaggaggggaggggaaggggaaagggccagggcctcccgcagcccagaagactgcaggcggggaaaagagaggcctgtgagcccagccccctccaccacccctgccctgtgctgtctggttggtgtcaagtgcagcgtctcctaaggaccacatctattcctgtcgctattctatgctagtgacacaagcaccgttatttttcacaggatgcacaaacaagtcaaaccaaactactgcgcaaaccaaacgtgcaaaacaaaaccatttacacgcgcctggcaccagcctcgagccccgcccagctacccttctgggcctgtgacccccccgagggtgtgggcggggcgcaggagaagctggcgaggggcaccaggagtcccagccacccccatccctgcccctacacagggccagaggtgggttgggggagataggacgtcctgggcatggctgggaagctgacatctgtctgacttgggaaatgtcaccacggggcctaaggggtgggggaggaggcctttactttgaaaccacatctgctaaagtgctctgggcaactggccagtcagccagggggcagggcactaaagtctgggctttcccaaagccagcggaggcaggagtgagaggaagggctggccagggctctatgcattgggctctgtgcatagtgtgggcttcctgggccccagaaaagcccgccgaggccaaggcagaaa

SEQ ID NO: 472143 - DNA, 1000 bp, Homo Sapiens; identical to SEQ ID NO: 159886

SEQ ID NO: 472144 - DNA, 1000 bp, Homo Sapiens; identical to SEQ ID NO: 341390

SEQ ID NO: 472145 - DNA, 1000 bp, Homo Sapiens; identical to SEQ ID NO: 341391

SEQ ID NO: 472146 - DNA, 1000 bp, Homo Sapiens
cattatatgtctcttgtatgttttgaaactcttgtatttatgatatagcttatatgatttttttgccttggtatacattttaaaatatgaatttaaaaaatttttgtaaaaataaaattcacaaaattgttttgaaaaacatttttggattgtttcattctttgcttgtcatttatctgttgattagaccactaaagtgaaggattcaagctaaatacatcaacctttctatttaggctttatcagctatatgtaaattcaattctatcaaaattttctgagtgcctcctcagtgtgtctctctgatggttcctgcccggtatggctggcatgaagaagatccacggacttgcgaatgctaacgcggggcttggggatgggtttggagggtttgttttcaaagctttctggaagtgtggaggagtgtcccccttttcttgcttgtagtgctagctggtaagcgacttcgaatgcctgtcccagggttaggatgatttcataggctaaattcacatcaaaggcagtaaacacatgacagtagtggtgattagacttcaaatcttttgtgatataggcaaatgttgagaggtcttctgggtcctgggcagcacaggagatattacgaatttcatgctcagcaattatgttcttatttgttgcatcaataaatttgactcctttatatgagacagaaagaataatagtagggaccttcttcatttgctctgtagacttctgacagttagcccgcatttttgcacaagcatcttgggttgattctgtccccctaagctcttttatcagcatagaacctaaataaaaagctttgtaatcacacgactggaagataagcttttctgggtgatgctgccagtactgtaccggggtagaggctgtggcttcattcggaggtcgcaaggtaatggaaggttctccccagtctcctgtcctgagggtgatggaccgagggggcttctgtgggggatcgtcgtgcagcctg

SEQ ID NO: 472147 - DNA, 1000 bp, Homo Sapiens; identical to SEQ ID NO: 159887

SEQ ID NO: 472148 - DNA, 1000 bp, Homo Sapiens; identical to SEQ ID NO: 341394

SEQ ID NO: 472149 - DNA, 1000 bp, Homo Sapiens; identical to SEQ ID NO: 159888

SEQ ID NO: 472150 - DNA, 1000 bp, Homo Sapiens; identical to SEQ ID NO: 341397

SEQ ID NO: 472151 - DNA, 1000 bp, Homo Sapiens; identical to SEQ ID NO: 159889

SEQ ID NO: 472152 - DNA, 1000 bp, Homo Sapiens; identical to SEQ ID NO: 341399

SEQ ID NO: 472153 - DNA, 1000 bp, Homo Sapiens
ttttgatccatgtttaatgaaaaagaagttacatgaatagaaatggacatataacaaagagttcaatttgagaaaatgtggtgataggtagaacaaggagaaattgtttcaattctgaatttactcgcatattcctattagctgttactgatctaaaacatctccttaaatccaaaacaaaacaatagttacaagttcactgatgttttcatgggcactcacccaagtaatgtccaaacaatatttttccatgtcccccctcccccagaacacacacaggcaaaggcagagatgtttactgtgaggtcacatggcatgaagcaaatgcagccttatctgtttattattacaacagccagttagcattggcaaatgtgctttggttacaaacatggtttctgctaataatttcatgaagaagcttttaggatatgtgaccatttattcttagtataatcaatcattgaaggataaaaatcagagtataaaagtttatactctggcaaatataaatacatgcagagaagtttctgacagtttaaatttgagcatatttgaaatattaaaggcatgaaatttaaaaatacacatacgtgaaactatggtgaacatgttatgggtttgtcccatggtttaactctgctcagcccacgattcttagctgggtcagtcaatagtctatttttatcattttctaccctgttgtacagcatgatcatatcttcctaaaaaagaaaaaaacatatatctttggaaaagaattctgatctccaaaaacatatactagtaatagtttcacgttaatgatctcatttaaaatatcccttctctcaagctagaagctggcaagcagtaaactcattatagacagttgtcatgtgggtaatacagagaagcaatagatctgactcactattcatttaaaataaaaatcttttggccagcacagggcagtcatcagcctcgtatgctcacactgaaaaatttaaagttaggacga

SEQ ID NO: 472154 - DNA, 1000 bp, Homo Sapiens
ttttttttttttttttttttttttctggattaagatgttttaattaatatacataatgtatagtagttcatataatttattaatggcattttctataggacactgtaattaattcagtgacatcaatattgacctcatacagacaaaagatgaaagctgggttttctcgtgtaccaagtacaaaacatgtgctaaaaagttaacatacacagttgtaagagatcaacgtcgggatgactcaagtttatagtagttgcttcacacggttttccaagacttggatgccacccagtgttgccgtgtttgtgcaaatgccagctctggacggcctgactacctccttttgccagccccacttttgcctgttttactgctgccgctgctagatttgccagatgattttgaagagaagagtcttgtcatgaactcagaaacatcaggcaactcatggttggaattcagcatattcattgactgctccatttcccgtctcatgtcaggatcacttgtgttgaccactttaggcagaagcacaaatatcaataaaggaagaaccatcatcataaccattgggttcattagaaagtctgtccagccccacgattcccttttaataaagtaagaaggtggacctgaagatttcatttggagaggatagggcagtctgacaacctctgatgttttgatgtaattcacatatcttgctctcatttttcctttcgaagtgatatccactcgaacgggatcaaatctgtaagctggagatacaacttccactacataagatccagaaggtatatcatgaaccacaaaactcccatctgtcttaaggaaaccgacgtgctcttctccgtctaccagcactcgggccgccgagatccagtcctgaggcttcacccctggaacaactgcacgcccctcaatcttgaagcgatctcctatgccgaccccactccctcccgatccctcagcagcagccccgggcacctccgagctctgg

SEQ ID NO: 472155 - DNA, 1000 bp, Homo Sapiens; identical to SEQ ID NO: 159890

SEQ ID NO: 472156 - DNA, 1000 bp, Homo Sapiens; identical to SEQ ID NO: 341401

SEQ ID NO: 472157 - DNA, 1000 bp, Homo Sapiens
tgacattaagtagaggcattttaattatatgcaaacaaagaaaaactcatgactacatcaaaagaattatattaataacacaaaatcaaagcatatttccagttaaatatagaaaaacttgtgggcccatcaggaccacaaaacctgcatcctcctcagatttcttgatatatcacacttgactagaggaatttgcacaggaagaggaaattcaaagttgaaatagaagtagagaaaataacctacagacttttttttttctgggtcttttgatgacttgcagcttgaataatatccagcaaggatacatattaagggaaaactattccattaaaaatatttccataaactaccttcccctattaaatatacacatacttctttaaaattgggggagaagtaaattgatcatttagaaggcaagttattcaactgaaatcatttttgagatttttctaaatgacaaattagagacatcatccaaacatctatgggtccaaaaactcttcttcccccaacagctttacctccaaaaggcatcaaatattaaaagtaacaaaaatactagaatactctttgataatacagaccttttattaataattcaattggccagagagacaaatgagtagaaaacatcatgtctaaagggaagacatacgacccacctattttatatatggcaaatcaaagagctgggaagaattactacttagaaataactacacatacatgatctgttatatgcatccccctgtaagaggagattctctaggttgaaaaaataattttctggtctcaatttacccatttgagctcaacatttccccgctctagctcgtgggcagaccaggccagcaggaaacaagatttgagttgaaaatcctcttttatctgccacctccaacccctaagcccttgctcttctgtaaggtaacaaattcttaaaacgtcagtccaaaattacagacatgcattttttggccacttttgctctttt

SEQ ID NO: 472158 - DNA, 1000 bp, Homo Sapiens; identical to SEQ ID NO: 159891

SEQ ID NO: 472159 - DNA, 1000 bp, Homo Sapiens
ttttttttttttttttcgtgtttttaagactttatcattaaaaaaaagaagaaattagagaagggaggtaggggggacaggagagtgaaggaatctctccaaaatgtcggatccgggcgaccctccttccctgactgcccagccaccccgtcccttctctgtcctggcggcgaggccctagccgccatcttctggggaccaaggcccaggagcccagctcgggtcccaggcagaggtgaaggcagaagtggggctcagggcctggaggccttgccggtgtccttgagagcccttggatgggcactcaggcccccatgtcccagcagggccctagggaggtaggcattgagcagaggggcctttggaggtggggtcctgaagctggaggaccaggcgggaaccagaggcaggtgtgaggctgggggtcacagccggaggctgggtctctcctgcatcagcctctatagataatgccattctccttccaagttcaaactcatccccactgatcccggaggccggacggccacgtgtggctgcgtctcggtatagcccccgatgggctggccctctgggctgaaggctgcaccctgccctgtgcggttggattgatcgatcataggttgcacgatgcgtctccgggcgttaatgaaccagttgttgacttgcaggatggtgagccccgtgtcctgcgccagctgtttcttctgctcctccgaggggtacgggtgctgcagccaccagcaagagtcactctgcctgcctggccggccgcagtctgaaccccaaggtctggcccaccggggtccgggggatggggagcccaggcccaggcagacgtctgggagaaccggcgcttctgagcgtctcgagaggtgctggaacaaccaggctcgcatgatgttggtggccaccttggggaagatccccctcttcttgtttcgccgtcgctcctggtccaagtcctcatcttctccaccagaactgggagaggccacgc

SEQ ID NO: 472160 - DNA, 1000 bp, Homo Sapiens; identical to SEQ ID NO: 341403

SEQ ID NO: 472161 - DNA, 1000 bp, Homo Sapiens; identical to SEQ ID NO: 341404

SEQ ID NO: 472162 - DNA, 1000 bp, Homo Sapiens
ggatgggagggctcttcattttcagctcatgtgcgcagcatcagtccatttagtacaatacacagatacacagtaatgatataattatgtgatgcaaatattaacttcatccctttccttgtaaattcagcttttctcaccagagctcaggggcagtcatgacaataaaaataacaatagtaattacaagaaatgtgctctgagtacagagaaaccacaaggcccatctcaacacacaaatacaaaaacaactcgcatttacggggcgtttccaggagttaatagcatacagtaccatgggtagggtgtggttggcagaagctgtccactttttctaagtgcaggtgttcgttgctgaggatcttgtgctcctcctcccttcgttttctagagtaacttcccagaggaccctgcctggagcctgccaagccagagtccagcgtaaaggcccggagggctgtttgtgtctttctggcctccctagggtagagggcagagctggctgcagctctgataccctttcctggagctctgcactctctcctcccctctttaatcccctctgtctcccctcccttctgctcttcagcccccatcctttcctcctctcctcctctgccttgaccagctgacctcccagcagacagcaccgcaggctggaaggcttctcagggcgttgataggttaatctcagtgcttctggttcatttattacatggtcaaaggggagaacggagggactatttcaggtcccagttctctggaggtgccaggggtaagggaaagataaaacccaaggcagtctgggtttgagtttcaatagggcagggaaccctggcttgctttttatctttttttcccctcctttctttgtcttggttgttttaatggagggaatctcaaacccagtgctcttatctccttccagccagttttgtgtgtcatgaatgtgttcatgtgcaggctgggaacaacttttcatttagtcctcctcctcccc

SEQ ID NO: 472163 - DNA, 1000 bp, Homo Sapiens; identical to SEQ ID NO: 342963

SEQ ID NO: 472164 - DNA, 1000 bp, Homo Sapiens; identical to SEQ ID NO: 341405

SEQ ID NO: 472165 - DNA, 1000 bp, Homo Sapiens; identical to SEQ ID NO: 341406

SEQ ID NO: 472166 - DNA, 1000 bp, Homo Sapiens; identical to SEQ ID NO: 341407

SEQ ID NO: 472167 - DNA, 1000 bp, Homo Sapiens
ttttttttttttttttttttgggctttgaacactcaatttaatttaaaacaggcacaagtgcaaacaattcacaaaaatttctagggaagatgcttttgttttgaaaactctgacccttaaaaaaaagtccttgcaatttctttgcccccaggtaggtcactagggagcagaagaatctaaaaatattatctagatagaaagggtccagacacctgaagttctttcctggaattccatctcacagcagccctgaagtggggcagggccgaggaggacaaggagacagcagtctgtggaggcagctggggcagatggtttgcacacatggatgcctgtgaccttgacatgatggaaacccggaggtggttcgccttctctcccagatagggttctgaagagaacaatgggtccctgatgacctggttattgagataaacttgaaaggtaacacagttgccaatccttacattcctgtctctggccctcacgatgcacagtacaggagaagctcagaagcctcctgagctcccaggagtgttagacttagcatggaccactccactggccaggtagacacaggagtggagaggtggaagccaggccaagaaagcaggtcccttcaggccagaacttagtgggagagaggggcagccttcctgaaactggctgtgggtgacctggagggacctgggctgtcaaggtggctttcctccccttacacacacacacacacacacacacacacacacacacacacacacacacacgatgttctctccattctgtaaagtgagagcaccttcaccaccgaccccattctttctctttcactcagaaattgtcccctcactccctgcccccagccatggcctggagcaggccattcacagttctgggcggggaggggctgtacaggtgggactgcaccttcaggacatcagacgtgagggaggaagcgggattccggtcataaaaaccaccccgtggccctctcgagac

SEQ ID NO: 472168 - DNA, 1000 bp, Homo Sapiens; identical to SEQ ID NO: 341409

SEQ ID NO: 472169 - DNA, 1000 bp, Homo Sapiens
ccctcccctaggccgaggcgccaggctgggttaccggggacggctgggcctggtcccggccctcggattcagctgggctcccaggctcccgcatgggggctccagcccccatctcctcggacgtgcgtgattttggggactgctcagcaggccagggggatgtggctggttcttcgctgggcggctgcggggagagtggcgtggcagagtctttgggaggctgcgggccgtcggctggtgctggggcccacggagatggaggtaggactttcgcaaagccgctgcccgtccagaacacgcccagctcccggcgccagagcgccacagcgcagctcgtcaccagcgtgcagggcaccaggtagaggagagcgggctggccacgctgcatcagggccagtgccacgaatgtcacaaggaggccaacgccataggcgatggtgcaggccacgaagtataccctggaggactgtacctggatgtcaaacctgtggcagtaggccaccagcagccctggcaccaaaatgtctccgaaacccaggagggagaagggccggtcacacagggccagaggtgaggagttcagcctgggcaccttcaggaccatgggcagcttctcacgggtggctgagtccgagggcccagtggccacctccaccatgatgctgctcccactcttggtcaggaagggcgtgatgaacacgaagaagatgtcgtagaggaacagcaccagcagcagcagcgtgcaggccttgaaggtgggcagacggatggtcttcagcatgtagaggcagaaggcgatgcccagggcatcctggaggacccaggcccactggtcctcgttgcggaagacgccccacaccacgctgacggccacgcagaagagcgccaggagcagcatacgggcctgcgggcgcttgtggaagtagggcaggctgttgttggggatcctgcacttgccgaagggcagccgccgcacacagggcgccaggcagctgtagag

SEQ ID NO: 472170 - DNA, 1000 bp, Homo Sapiens; identical to SEQ ID NO: 159892

SEQ ID NO: 472171 - DNA, 1000 bp, Homo Sapiens; identical to SEQ ID NO: 159893

SEQ ID NO: 472172 - DNA, 1000 bp, Homo Sapiens; identical to SEQ ID NO: 341411

SEQ ID NO: 472173 - DNA, 1000 bp, Homo Sapiens; identical to SEQ ID NO: 345543

SEQ ID NO: 472174 - DNA, 1000 bp, Homo Sapiens; identical to SEQ ID NO: 341412

SEQ ID NO: 472175 - DNA, 1000 bp, Homo Sapiens; identical to SEQ ID NO: 341413

SEQ ID NO: 472176 - DNA, 1000 bp, Homo Sapiens
ttttttttttttttttttttttttttttttttaaacttggctaagttgccctttattaacgaaaacatagagctttcggtcaattccaccacggagaacacaaaccagagataaaacccacaccaagggctatttcccaagctggggaatttgagaacacacgggcagagttcacgccacacaactacactgggctcgtccttgggaggcgttcacaggaagcaatcacgagcgccaagccacccacaaggcagtgcggcaaggctcccgggatccttacaggcatccaagcgaggtacagaaacctccacagcagtggggataaggggaaaatattttctcttgctaaagaatatccttagttctcaacataaacatgactacgtatatattcagcttcaaatgaaaaacaagtttacaaatcactactggatacttaaactctatgttgcttttctttttggcagcaccagcctaaactctgtgggtttgcaatatttcagaaacttcaggtacattacagtcttctgagaaaggcccagaacttcagaattcctggagcggccagaatgtttttggcttcttctgcatcctgcaaagggctctctccatattcttccttcagccactgccgatactgatggacctcatgcttctcaaactcctggagctgtctctggaagcccacgttggggttggcacaggatctcccagcacgcacggtgtgcagggcatcctcccagccaaagtcagtgacggtcatgatgtatgcgatcaccagtgtcacgctcctggagaccccggccaggcagtgtacaaggcagctctcaccgcggagccggcactcgtgaatgaatttaatactttctttgaaatgtcttgtcaggttttgagatggtgaatccgctgctgggatgcacaggtatttaactccctccaacataggcctggcactatcatggacagacagaatatgtgtcaccttgttcttgctcaattg

SEQ ID NO: 472177 - DNA, 957 bp, Homo Sapiens
tttttttttttttatactttgtatagtttattatacaaatgattgatagtaaaatagtgaattttaaagcttcttcctaacctttcattgtgaatgaacagtgatgcagggagaagagacattcagaagaaaaatcatgtatgtattattaaactagaagtgataaaatgttcagaatgacaatgtatttaaaaaataataaccttgttggaattgtacatctatcattatcacaacatgcttatttgatgaagctaaagaaaagccagaagactaatatggctggatgagaatagcattttaaaacattttcagcaaaattctagaaatttgctgtttagttccaaaactgaattttatacaagtgctattattccaatagtttttttcaattgtcactagtgatcttgatccatatactgcaatcataatatccaaaataaaagagtatttcattaataacaggtgttttcaaagcttaaatatatttcaaaaaccaatgacagttaaagtaggggttctaaatttttgcatgtcttattaagctttgttgtatagactaaaattttggtttcatagactcagaaatactaaattgcctattgggttttgtggcttcttgcatcagctcctgcaactgtccaatttgttcatcacgaaagtcattaagtttttcttctgggaggaaggtgccaaaacatgcttttccagttgaattttgtctgttttcgttagcctgttgcaataacgctgttgcatacacctcccattcttgcaagaaacgctgtgcctcgtcagaaccaacggtcttatgtctcctaaattcgtctttcacgtactggtcgcccagggatttgaggtccgggggcagaacacggtgcagctgcaagacgcgcttgtacaatgcccggactcgagaaacgtgccgccccggcatagcgccccacgccgacgcgc

SEQ ID NO: 472178 - DNA, 1000 bp, Homo Sapiens
tttttttttttttttttttttttttttttttttttagtaaaataaatgtatttttaaaatatttttaggaagctgcagaatggcgactgagtgcttcttgataagtctgcagtgttagttctatataggctcccttctgtgcttctgtttttgcaaagaccttgattaaatttattccctcagcagcctgatccttggccccttgagccgactggccatctggatggagcacgtgatacagctggaccaagttggttgcatcatcgattaaatctctctgaatctggtcaatcagcaaaccatcaatctttttattatttacaaaataccacaccattccaccaaagtatcttgttgaacgtaaaaggtcatattttccacgtttatctatatcttcataggtcttgtgatgaaccttgatatactctgtggaatctggctcaaactgggcaaagcagagattgaggacatcaacatgcctgtcctggctatacatagtcctaagattttcttccttgaaaattattggtgtcaaaattttacgaccttcttttgggaaataaacttgtatcattcggtcccgttcttcccaagaggctttgcgtagtgtgccacttggttctctgacgacaataaaacgctcccggtgtggtatgctatatgatatatcagtaaacacatatttggttgtttctgttccttccaaaatcttatcttcagctaacacatcatttattggtactcgctcttccagaactggtggcatttttaatcgtactttagctgcctcaactgcctgtcttgtagcctcttccaactgtgcctgagtcattagcttataggttggtggcttcagttcttgtatagctggcttaaaagtcttctgcaagttcaagcctgtcattttcgtgagtatgctttgaacttcctcatccataaatgtaggtttcttggtctctgggctaccagattctgcggcctcggagctgaaccggcggcg

SEQ ID NO: 472179 - DNA, 1000 bp, Homo Sapiens; identical to SEQ ID NO: 159894

SEQ ID NO: 472180 - DNA, 1000 bp, Homo Sapiens
tttttttttttttttttttagtgagacaatttatttttattgcctaaactgcagagcattctctacacagcgtaaaggagaagtggggcagctgcaggacatgtagagaaaccaaactgggaaatcttacaaggagttgaaaagattaatgtcccaacctgatgagattacggccttgagacaataaggtggagcaacagaacaatgggaaagaggactgggagaggaatctaagaaccagatggcttcagctctctagaggagctgagcctattcacagtgcctaacctggaagcctgtgaggaacaggcctcaggcccttgccacgacctacttaggctacaatttcctttaaggcagcccctagctctgggaaggaatactggtagccagtggccagtgttcgctgtgggatcaccttctggccctccagcagcatgatggcacgctgtcgcccaaagacagcttgcaccacagcgctggggagagggatgaaggctcggcggcccagggcagcacccaaggtctgggcaaactcagcattagtggcggaggatggagccactccattcaggaccccgtgcacgtggtttgcttcaagggcatgggtcaggattcctgccaggtccccgatgtgtatccaggggaagaattggtggcctgagccgatggggccccccaggcccaggcgaaagggcagcagcatgtggcccatggcaccacccccacggcccagcacaacccctgagcgcaccaccacctggcgtgtagaatctccaggaagcctggctgcagcttcccatttggttacgaggttggagaaaaagtcaaagtcccctcctgggctgtcttcatcatactccgcagtcagactgggctggtagtaagctacacctgtgactaagacccaggccttggggggttgtggggctttggtgatggctttagccagcaattgggtggtctctaggcggctgccgagaacctctttttggaaggt

SEQ ID NO: 472181 - DNA, 1000 bp, Homo Sapiens; identical to SEQ ID NO: 341418

SEQ ID NO: 472182 - DNA, 1000 bp, Homo Sapiens
tttttttttttttttttttttttttttgagattttgtcaatcactttaatagatgtccataggtagttcatatgaatgcttaagttacaaaattagctgccatggtccaaatgtatgggactttaggaaagcttttcttactcaaaagataactaagactatcaactttgatttctaaaatgtaatttaaaggtttgtaaaacaaggccactactataattatataatattaaagtaattaagttttatgttagttattttaataacaacttcatgaactgttaaaaatattacatttgcatctctcagtttacatatttctgtattaacttggagaaaaacccatgtgaaaagtttccatgcagttacaaaggcagcagcacatgctgttttcacagcaacttgttattgcctcagaacaggcctgcactaaagcatcaacaaaaaatacccaccaccccactcccaccagaaaacccaacccttacccatccccggcaaaaattacctggtacaagcaatgacctaaaaatgctttcttggtaagaagcatttataaaatgcagagatctgaacaagctaagtgctcgtgcagatacatgggcctctcctccaagagttggttccgcaagaggtggaaagaactctcaatagtttaggaaagctcattttcaaaagtatacttacacatattcatggccatttctttgaaagaacatacccagcctcaactgtggaaaagataaaagcagagggagaagcaacggcacacagccataatatagagaacagagcttctccatgaacatccacccaggctgcagcaaccaagaaggaaaaaacatttgtgatttcacacagaccaatgatcttacctaggtgaagcattaatttttcatgcatttgttactcaagaaaataaacatacaaccacttaaaatacagcattcacgttgtcactggttcgtggtatcaggtaaggaaaaaatgatgctcctgt

SEQ ID NO: 472183 - DNA, 1000 bp, Homo Sapiens; identical to SEQ ID NO: 341419

SEQ ID NO: 472184 - DNA, 1000 bp, Homo Sapiens; identical to SEQ ID NO: 341420

SEQ ID NO: 472185 - DNA, 1000 bp, Homo Sapiens
ttttttttttttcccaacctaaagaactttggttttattgactgagaacctcctttgcccattcctccccaagacttctgcccacctcccacccccacacaccaaaccttcccctgctactttctcttaggtccctggatgggacccaggaggttataagacagaatcgccatcttttccccttgtacctcaaacctcatcaagtcaagctctgcagaggaatagtacagcccctgaggtgccatccagccccgacctgctcttgccagcctggcagcactcctgtgtgcacacacttaaaagtttccagccaggctcccacaaacattactgcattttccccctcaacatggggactgtgttcttgatgagccaattagttgagcttaactttgtttagcctccttgcccttcagtgttccacccgttcagaacctgtgcaccaggagctccccatccggttcccgctccctcctcctcagttcttccctgtaacaacaggaacagaagttgtttgtctcagggtgtccatagaagctgcagttcggttgtttgcatttggtctgagttgggggaaggccccggagacctccagcccatccatctggctcagggggctctctgtagccattgctataggaatcagccactcggtaggggggtggtaacaaggcacccctgtgaagtccatccttagagtggctgcctggctccagagaagggatgctgtcctggtgggggtagggtcgcccaggagggcactgtctggggaaggtggcatatggtggtaggcccccgacacatggaccccctgccaactgcctccggggttcctggcagtggactccgcccccagacggccgagggatagtaaagtccccagggtagccagtggaaaatgccattgccctggactctgctgggggaccggtcggctgctcttccctagcatctggctctggctttttggctggaggagggccaccccctattcctccat

SEQ ID NO: 472186 - DNA, 1000 bp, Homo Sapiens; identical to SEQ ID NO: 341422

SEQ ID NO: 472187 - DNA, 1000 bp, Homo Sapiens; identical to SEQ ID NO: 341955

SEQ ID NO: 472188 - DNA, 1000 bp, Homo Sapiens; identical to SEQ ID NO: 159895

SEQ ID NO: 472189 - DNA, 1000 bp, Homo Sapiens; identical to SEQ ID NO: 341423

SEQ ID NO: 472190 - DNA, 1000 bp, Homo Sapiens
ttttttttttttttttttccattttattgttttatttacaaacagggtgaagtcaaagggaaagtcaggggatggagtcagtctgggccatccgaatgtggagtagttcttgggtcaagctctaccatgaaggccacctcttacatatccttttcctgccccttggtaatggccccttgattcctcagggcagcctcagctgctgtacctgaacacttttatgagggcagatggatcctggggtaacaggggtggtacgagggctggggccccctcagtttgtgtaaacctgagttccgatcacacgcatgatttccttctgtatcttggggtcctgagtattaatgttggcatcgcccacctgaccatcctcatatacaaagaagaatcttgtgcagacatggtcggacacagggcacacccagatgttcccatgcttctggaggtccttagatgtaatcacttcacaaagtgctatacagtttagattccgactctgcaggaaccgtgactgaatggatcgggtctgggggatggtattcatcctgttgtatctctggaccagctcatccttggagggcatcctgtgctgtccttttcccattcctgagtatccaaaggaaatactggagatggggctcaggtagatgcctttgccataggctgctccatgcagctgcagtttggtgtaggatgcattgaccagcccattgcgcaggatcgaatgccagttctcaatgtgggacccatggaaggcaaaggtgctgccatagagcttcttggcggtccggaaccgagcctccttggcaggagggctgctcagcaggaggaactggtgtgaggtgtgcatgaacttcagcctgctgagaggtagtttgacaatgtgtgacctgttgctagagatgatccactgcaggagaggatgggccaggggatccaacttgtccatctgtttcttgatttccaaatatgagccaaaacaacatgcaggtgggtctcc

SEQ ID NO: 472191 - DNA, 1000 bp, Homo Sapiens; identical to SEQ ID NO: 159896

SEQ ID NO: 472192 - DNA, 1000 bp, Homo Sapiens; identical to SEQ ID NO: 159897

SEQ ID NO: 472193 - DNA, 1000 bp, Homo Sapiens; identical to SEQ ID NO: 341426

SEQ ID NO: 472194 - DNA, 1000 bp, Homo Sapiens
tgcagcaaaggctcatttattgctgaatgaatgcatagtttggggaaggggaggacaagctgaggccacatttgggacgggtgctggggtggggtggagaagggagctgctgcccagagggactcagtaagattcagggtgggggccaagaccagcagctggcagcaggttctgagaggggctgggcctgcctgaacagggaaggggtccagcagccgtggtcaccttgctgggactggtgtgtggggccacaggcctgtgaggctgggcctctctgccacctgaggcccgcatggtggggtgtctgccttgtcctaaggggagaagactctgagggtcactagtggagttggggtagggcattgaggacagacagttgggagcccagccaactgcctgggaggcaggcctgaggccaccatcttgtccccagatatccagatcttgggggactttggcatggaaaggggccagagcctgcctttcacaggcacatggcccaggccagcttgcttgaaggaacagaccgaaggcgggcgtgcattcaggggctgcacaaggacctgggcctgttacagtctcctgtccccctgccaggacacctgccccatgtgctgctgagtctttggctgagtccacctcatcggccccacagcccccaatggccttgtcctgctggtctcaggtgtgaggctcccagaggagggctggggccttgtcttctccctggctggcctggcccaggacccatcaggaagttggcaccagctggcagtagggggcagggtcggggtttagcaggtcctgctggtactggtggttctctggctccgcctgcaggtgtgggggtgtgggcaggggccgggctgggtttatggaccttgtgtcactgatgggggacaccaggaggactggagagggcatcacttcatagatgttgttgtcaccagcatcatgagcagggcccaattctggcttctctgtggtcgccatccatgtg

SEQ ID NO: 472195 - DNA, 1000 bp, Homo Sapiens; identical to SEQ ID NO: 341427

SEQ ID NO: 472196 - DNA, 1000 bp, Homo Sapiens; identical to SEQ ID NO: 341428

SEQ ID NO: 472197 - DNA, 1000 bp, Homo Sapiens
tttttttttttttttttttttttttttttttttttttttttttttttttttttttttttttttttttttttttgctttgaagaaaatagtcatttattgtcaaagcatccaacatactcggataaactataaagtttaataaatatttccagggataaaagaaacacataactattcagactccatttcactggcacaaaattacactttgtattaaaagaaaatacatatgtacataattgatgacattcttcattgaagtccattatcatttcattatacatgcacttccccctggaaactcaaattgaatggtgatccctttttattcattttgtttatttttgtaggaacacaaactgtcatcaagaaatgcagaaagcatctcaccctcctcctttactttatatctaaaataaattttgcccttacatataattattacatctaaatcgtaagtgcttaataatttaagtagaaacgtatgacaaatgcatcaatatgttgcaatatatgacattttaaaaaatgtacctttgttttggggaaagtgaaaatgcgtgcattcaaaagaaaaccccctcaaacaacccacccaatcaaaactccaccatcctggctcttgtgtgtgagtgtgtctgtgtgtgtgtgtgggggggggtgtgtgtcccgggtaaatatttgaatgaggttcctgggaggagaggacgtgtgtgtgcgcgttgggggggcgggggggcggtgaatgtatgtgtctttgtgcagggtttcggggtgcaaggaagcggtggatgttctcgcgtgtttattcctgcaggtggcttaactgtgcttgcgcgcgcgtggaaagctggggtcctttccgagtcaattatgcgaggtcatgtgcctggagaggtggtggcgctccctgaaggactcattgcagatggggcacttgagtttctcctctcgccgccgcttcaccaagggctccatcgcatactcctttttgtggtgc

SEQ ID NO: 472198 - DNA, 1000 bp, Homo Sapiens
ttgctaagaatccttcgttcgagtgttcagtttccttaggattttgagcgttgttcctaacacacccttgaaaccccccacactcacacagttacctacacggagggcacatacccccacacccgaacacatatatacacacacgcgtgttcttgtctggctttcacatcttgggctacagagattggaggagatcaggagaggagactggggagccaagggagagtatggcagcagaggagaggtgtccattaggagaagaagccacacttcccaggagaccagggaactccctttcctgctgcgactttctagaatcttacatttctcttcctggacttgggaatcgattctccaataattaaaccagacggactccaagtttatgtctttctgggggttgaattcctgtggagtcttgagctgaacacatgagttctctgtggcccttctggactcttcttgccttcagtgataagggaagaatgaggtacacacttggggttcagatttgtatggagacaaaatttattagaacaggaggcaaaaaaacaaacaaaaaatggaggggatcagtgcgggaaagaaccacacatgctgatgtcccccgaacacttacagaactatcccttgttcttcctcatctctagtcatgaaagtggcggatttgtttaatcagttatttccgatctctttatactctcggggaatataaggggtcagcagacttccgctgaagccacctcacagctggggtgtgcaagtgtgtggtgaccacatttgtctttttgtggctattgagatgaggttttattactaatgacttactcatcctccctgcagacgtagggcttctcccctgtgtgtgtcctctggtgatagcagaggcttgacctatcgctaaagccccgcccacactccctgcagacgtagggcttctcccctgtgtgtgtcctctggtgtctgaggaggtgtgacttattgcgaaagccccgcccac

SEQ ID NO: 472199 - DNA, 1000 bp, Homo Sapiens; identical to SEQ ID NO: 246536

SEQ ID NO: 472200 - DNA, 1000 bp, Homo Sapiens; identical to SEQ ID NO: 341431

SEQ ID NO: 472201 - DNA, 1000 bp, Homo Sapiens; identical to SEQ ID NO: 341433

SEQ ID NO: 472202 - DNA, 1000 bp, Homo Sapiens; identical to SEQ ID NO: 159898

SEQ ID NO: 472203 - DNA, 1000 bp, Homo Sapiens
ccttttctactcagacctcatacttcaccagcacataaatactctcaagtccatttgcacttgagcagcacgggtggagcctggggaatggagagggtaggggactaagtggcagggccgtgtcaagacccaggtctttcccaatgaacaaactcccctttacaaacagggagcaccccaaaaaataggaaggagctccacctgccccatcgtgacagtaactgacgtgttcctcaagggttatccaggcagtggaaccactcactgcagcagcatctccgagggtgggggcctgcacctggtgatcctgaggcacaccgcaggtgatggaacagtaccttcgtcctgcaggccactggtggcccaagacacacagctacagggctgggactgaggcgcccagtcttcatggtatcaacagcaggcttgaaggaatatactttattaatctacctcccaaacgctaaaatgccaaagactaaaatgctaacattcagctaaattaaaacaactatttacagagcactgtctgcaggccatgtggggctgggcccatttcttccccacccacccacccagcccatcctccaaacaggcctggggccacctgccacctgcagcagaaacacccagcacagaggacgtttatatacacctggccaagccctccacaatggcatgccaagaaggagggcaacagaccaagacacagaccgacagacagacagatagacatggacaggaggcgaggctgccaagaaggccgcaggccagcctcagtgcttcttcaggctgtaggccaggctgctggggaccctggcgccctgcaggggcggtgagttccagacagcagagctggtgcgcttgtgatagcggggcttgctcttcttgaagatatcctccaagtccagtgggagaatggttccaaagagctccagaaggttcggtggctggtagtactggtgaatgatagcctggctgagcggggtgcctcgggccc

SEQ ID NO: 472204 - DNA, 1000 bp, Homo Sapiens; identical to SEQ ID NO: 341434

SEQ ID NO: 472205 - DNA, 1000 bp, Homo Sapiens; identical to SEQ ID NO: 341436

SEQ ID NO: 472206 - DNA, 1000 bp, Homo Sapiens; identical to SEQ ID NO: 341437

SEQ ID NO: 472207 - DNA, 1000 bp, Homo Sapiens
taagcaatgaaatattttatttgctgaaataggtataacacttaaataaaaattaaacaaatgtttaatatctccttccatgaaacagcagcagcaagagatagcaagtgttcggaagtctcttcaatccatgttattctgatgactctttgaagaaagaacttgaacctgttcaggtgcttgatgacatgcagtcttgaatatatttagatgaaggtgtcttgaaatttgcaggcacaaagcactaaagtatatcaccatatcaaatgaagaaatcaccattgccatccatagaacaacatattcgtctataaagttattaaagtactggtctaaaaacaaaagacctggccccaaaaagacagtgtcttgaagatatagttcacttttggtcatgtgagctaccactaatttttgtgagactttagcaaagacacatccaaacattaggatataaagacaaggatgcttttcaaacacatcagttgctgactttttatagatcattattgccagtataataattagtcctatgtggagtccaggtgacaagacactggtgcctgctatagtggatccattcttgccaacaccaccatggaggataacatggaaataatttgaacaggaaaatattactccacctagaaatccaagaactggaaggatcttcaattttatttctagaataggaatcgtatagtcccacattgttgctcctccaaatgcagacaacacaaagacaatcactaaagctatctgaatttcagttacatccacttttccaaatctcaacatgcctgaaacataagtctgccaatgagcgcaataaaacacaaacatcccaataaaagagcagaaaaaaaaccagtcaggataagttcctaagcgagcggcaattgaagctcccactgccataaatactgtggaaagagagtcacagccatggtcaaagagctcccctaaaggggaacaagagtttgttcttctggcttgtttc

SEQ ID NO: 472208 - DNA, 1000 bp, Homo Sapiens; identical to SEQ ID NO: 157483

SEQ ID NO: 472209 - DNA, 1000 bp, Homo Sapiens; identical to SEQ ID NO: 159899

SEQ ID NO: 472210 - DNA, 1000 bp, Homo Sapiens
ttttttttttttttttttatgattattattttttttattgatctttacatcctcagtgttggcagagtttctgatgcttaataaacatttgttctgatcagataagtggaaaaaattgtcatttccttattcaagccatgcttttctgtgatattctgatcctagttgaacatacagaaataaatgtctaaaacagcacctcgattctcgtctataacaggactaagttcactgtgatcttaaataagcttggctaaaatgggacatgagtggaggtagtcacacttcagcgaagaaagagaatctcctgtataatctcaccaggagattcaacctcaatattctgcatcgaagggatagtcttccaaatgagaggattgcaacacgttacaggccctccagtttctgttgaagctgagtatggttgccatctcctcatcactcaatttaaagtcaaagacctgaatgttctcaacaatgcgtgctggtgtcacagacttggggatgacaatcacattcctctggatatggaaacggatcagaacctgggctgcggtttttttgtgctttgcagcaatctccttaatcttgggatcctccagcagggaagggtcttctggcttggcccaaggtctatccggagagcccagggggctgtaggccgtaacggtgatgcccttggagtggcagtactggatcagtttctcctgtgtgaggtatgggtgacactcaacctggttagtcactggtttatatttcagtccaggtttgttcaagagcttctcgatctggaagtggctgaaattggagaccccaagggctttcaccagcccctcatccaccagctcctccatggcctcccaggcatccaagaacgttgcttttccaccgatggcattacctttatcatctttggggaaaaggtcatccccagacttgaatccctgtggccagtgaataagatagacgtccagatagctcagcttcaggtccttgaggg

SEQ ID NO: 472211 - DNA, 953 bp, Homo Sapiens; identical to SEQ ID NO: 341439

SEQ ID NO: 472212 - DNA, 1000 bp, Homo Sapiens; identical to SEQ ID NO: 341440

SEQ ID NO: 472213 - DNA, 1000 bp, Homo Sapiens
tttttttttttgcctatacaccaaagcttttattgggagtggggcagggcaggatttacagtcacagagacagagacacaaagacacaaccctgcactgggaaaaaacacccctgtctcctgccccattccctttcatgggattctgtgacttctctataggttccccaaattctaagctgaaagaggggtgtctgagaggggaaggatcccagattttgagtcattaagcccctgagggacacaacaaatggccactgagaaacagggtagttcgaaaccacccaggagaataaagtgcgaggaattggggagggggcatcatgaaaccaccatgggggagttcaatggtggtagcttcaaacctttgagttcatggactggagcagccactatttagacctgaaaaccatgtcagaaaaagtgcacgggggtagagaggcatattgttaaaattgcgattttggttgtttccccagacattatgctaagctagggagaagagggtcttgagaaatttggtgctttcgcagaatctgctggtaggggagatgtgaagtgggcacggaatcggggacttgaaaccgccattttccatcagaaacgctggtgagaatcaatccctggaatggcggggacgagtaattggttaaaccaatctggaagatgcagaacagagttgggagagatttgaaacttctagaggaggaccttgaatttttctgaaaggagatgggagctgagtgatctcaaaggttagcctgagagtccctggagataaaggaaagcggggggtgtgggtgcctcaaaaccacaagagagagtaagaggtcgaactgtccattcaaataaagccctgaaaggagagatttgaaaccactgaggcagaacgggtggagagggaacctttaggggaatttgggtatccttgaaactgtcagtctgcagcttcactacccctgagaggcaattgggaaggaaagaggatttgacagcactgg

SEQ ID NO: 472214 - DNA, 1000 bp, Homo Sapiens
ttttttttttttttttttttttttggcagctccatctcaggtttcagtgcaggtttatttcagttttatattttattccaggcaagtgcttattacatggatagtattcatgtctcggtaactaaagtcttggagcatgaacagccactagaatacagttcaatagtaaaaatacagtatgtacaaaattagggtttttgtagtttttttttttttccacacagcagatgtatccaaacacataaaaatctctacagtctggggtcgctacagtttatatttcaggaaacagagacacagtggccgagtcctcactgtaaacaagggccacctctgggggttgggggtgggaccctgggatggggggagaagcagctgtttctggagagagaaggggtcatggtggccccccagttaccctccaggcattccctgccttctttggccccccaaggaaccaacctccccctctccccgaggtaaggactcccagccagtgagccactctgaacatcaaaaggtaaaacacgcatgagaggtaagatgtgtgcgtgtgcgtgcgtgtgtgtgtgtgtgtgtgtgtgtgtgtgtcccaggctggaagggctagggagggagggccaggcggtcccacagggtgaggacagatgtggtcccgacagcactctgggggagacgcccaaggaagggctgggtggtgactgcccacttgggcacacagcatcacagcgttcacaaacgacaagaaaaacagcaacacccatcgtcaccaatctggacatagtcattcggcactagatttgcaggcccccgatgctgggggacagggacggggaggggcagcgggtggatgatgaggtatctgtgcaggcccgggggccactggcctcaggatgcagggagaggtgggcaggctgaggggaggggcgagctccacgaggctgctctaactgccccgtgggtcaggcctgccatcgctgtcacaatgggaatagcaaag

SEQ ID NO: 472215 - DNA, 1000 bp, Homo Sapiens; identical to SEQ ID NO: 341441

SEQ ID NO: 472216 - DNA, 1000 bp, Homo Sapiens; identical to SEQ ID NO: 159901

SEQ ID NO: 472217 - DNA, 1000 bp, Homo Sapiens; identical to SEQ ID NO: 159902

SEQ ID NO: 472218 - DNA, 1000 bp, Homo Sapiens; identical to SEQ ID NO: 159903

SEQ ID NO: 472219 - DNA, 1000 bp, Homo Sapiens; identical to SEQ ID NO: 341446

SEQ ID NO: 472220 - DNA, 1000 bp, Homo Sapiens
tttttttttttttttttttgtttttcttgtatttatttttagttactttccatctatgttaagtgtaaaatttcacttaaaaatccatttaaacttaaaaggtttgtttttaaaaatattaagtaactcaagtactagaagtacagaagcctggcaaaaattatgaaggtaaggaaggtaatacatagacaactgaactggaggggcactggtctgagtgaggactttgggcacagtaactccacctcatgctttgtgctttctgggttttgtctaatttgctgttgttgttccctaatatagactatttttttagaaaacccaaccttattttggctaaggggaaagggatttactttcatttgggttaaggtagggcagaccaaaggcccctggaagttagtggttcaggttctaactacacaacactggcaagtggaaagggagatgtggggagaagtgaaaaaccctgggcataagattccagaacagcagagtgtgcttcccttcccaccaagctgtcaaatacaaatctggagattcaataaaaaagatcattccatgatagagaagacagaaagctgtaattctttttaatgtttaacttttctttgtaaaaaacttattaaaaaacttaaatggtcagttaaagttaaaaatctattgctgcacaatttaactgattaaaagatttccagatctcttgactccaagagtcatttctttcatttcttacagatctcacacttccagatttctctttagcaaacatgatctgaaatcatttgtaggtaatcagcacttcaagcatatggaggctctggctgaggcagcagagtcctgggagactgaacactgggagattcagtgtcccccacagaaacctagacctgggctcagcccaccactgctaggggtcctgcacaggacccatgtggctcctgcacgggatctatgtggcgaacctgagctcgatcttcgctgtcagtcctcctggtct

SEQ ID NO: 472221 - DNA, 1000 bp, Homo Sapiens; identical to SEQ ID NO: 159905

SEQ ID NO: 472222 - DNA, 1000 bp, Homo Sapiens
ttttttttttttttttggagtgatttgtttttatttttacagtgatcacctatcaaactgttctgctgtgttatagttcccaaactggagttcaacagtcttagaaattcagtggtctaagaactgcagttcttgagtccaacctcctggaaaagtgaagtataaaactctggctccagctgcttgttccggtacttgttgacaatgtcggtgattttctgtttccggcggacatgggggggactgtaggagtcactttccagtctctttcttctacaaatgttaattacagtctgcctcaccagaaagccaagagctcgcctgctgacaatcatcccatccacaagagggatgaccatattaaattttccagtggctccttgaatttttatccggaataatccagtgtttaaagggtggatgaagatgacaggaacttctttttcaagagttgtagatctcagtgaagtgctactatttgcagtagtttccacaccagtactgatctctgtcatcagctctgagaggggaaagttttctatatcatcatagcgttccacccagactacagaaactcttgtctcaggtccaaggggaggaacagggcgaccctgaggcagcttcctcattctggaactgggactgagcctctgtgaggaattaagattgtctgtatgattggggaaaagctcaagtgtcagggatggctgtttcagaattcctggcataagatccatatttgaatcactatcttggtccgagatgttactttccaatgaatcagttaaggactccacaggagaaggaaccacaaaagcaatttctgtaagggcatcagcataatacagcaccttcttctgtccattgaaaatgctagctccaatatcttcagaggaaatcacttcttgttgagatccttcaccatcatcacaacaattaatagaccaactggtagaaacatgcccagtccaaccagggtgtctgcccacatctactgacc

SEQ ID NO: 472223 - DNA, 1000 bp, Homo Sapiens; identical to SEQ ID NO: 159906

SEQ ID NO: 472224 - DNA, 1000 bp, Homo Sapiens; identical to SEQ ID NO: 341451

SEQ ID NO: 472225 - DNA, 1000 bp, Homo Sapiens; identical to SEQ ID NO: 341452

SEQ ID NO: 472226 - DNA, 1000 bp, Homo Sapiens; identical to SEQ ID NO: 341453

SEQ ID NO: 472227 - DNA, 1000 bp, Homo Sapiens
cctgtgaagtgaatgggcccagtgtgaatccatctctcctcaaattcaccaaggagggacacttggcacccagggctgtgtgccagctgcctcttctcaagaggtcaaggagcccagagcccagagtgtggagggaccattcatgctgctggtgcaagatatggcttttcctgctagatggagacggggcatgtaagaattctgtcttctaggagaacgctcaccaccaggaacacaaagtagaggccaaacatgatgaagcccaggattttgttcattcgccacttgcagagggcgatagagaggatgacgaagagcagcatgatgaagagaaggacgatggcacagaaaaggccattgctgctgacagccactggctggaatctgtgaatgacggtgtacaggagccagggcagtgggagccctacagtgatgtcaaaaatgttgcttccaacagagctggacacagccatgtcccctaaccccttccgggccactatgacactggtgataagatcagggatggaggtcccagcagccaagatggtcaggcccataatctcttcactgatgccaattgtctctccaacctggtgcgcccaccagaccatcaagtaagagaatactgcaatccaggtaatggagccaaagaacgtgatgggaaaaaacttcctcgatgaaggtttgcgaacgtcaggtaacgtaatccagagaggaaacactatggggaaaacaatcagaaacgtgacttgcttgcgggtttcagaaggccaggcaaggctgagaggctggtcctcctcctcatcagcggtctgggcttctgcaccttcaatgttgtgggagagatttccattttgtacaggttctgaagcatcactggatggtgtcatttcaacatctgtgctggtgctgtttggaagctcaattttttccacgtggttggcagccccattctgccgctcgttctcatccacatgacatttcttcttggcgatcttgt

SEQ ID NO: 472228 - DNA, 1000 bp, Homo Sapiens; identical to SEQ ID NO: 341454

SEQ ID NO: 472229 - DNA, 1000 bp, Homo Sapiens
tttttttttttttttttttttttttaaaaaaggataaatagagcattttattaacacttttttgctgcaacaaaatgacagtccacatattttcattcaacacaacaaaagctgtgatcacattacatcactttgaggcacaaagcaaagggtattttttttttcttaaggtaaagaatgatttgcatttttttaaacaaactttaggttttatatttgcagtagcagggcctccagtcactagcacagtacattaaacagatcaaatatccagaatagacaaaatacaccaataatattttgagttgaattgggaaatgtattatcataattttaggacattataaaggggtctgatgttagcttttttaaaagaaaaataaaattattccaaccacccaaacagctactacaagcaaaatgaaggtaatatacagacaggaaattttatgcattgcacttattgcttggtacacaaatgttgcaattcttgttgagttatattaagaaatgacaagcaaaatgcctcttccccacctaaaattctatgactctatgaaagtagaaattgcaattccctaacccaacattaggtgtatgctatttttggtttcgtgtgaagattgtttattatgtttctgtgtatggacatgtataagatatacagatatatatagagagagaccattttaatataatgtattgtcctatatatttaagacaaatatttcttaataggactttaaataataaaattacctacttacaatatctctatgaagttaatcttttcatattacatatagctctgtggcacaagtttcatatagtatttaattatgaaggaagaaagatatctaaaccattttctatttctttgttcttaatattgcattttaagggctatatctccataataaatttcttattagattctttgtggtttatatatctcttttttttttctaatgcaagttacaaccagtacaaagttgtaata

SEQ ID NO: 472230 - DNA, 1000 bp, Homo Sapiens; identical to SEQ ID NO: 246537

SEQ ID NO: 472231 - DNA, 1000 bp, Homo Sapiens; identical to SEQ ID NO: 341456

SEQ ID NO: 472232 - DNA, 1000 bp, Homo Sapiens; identical to SEQ ID NO: 341458

SEQ ID NO: 472233 - DNA, 1000 bp, Homo Sapiens; identical to SEQ ID NO: 341459

SEQ ID NO: 472234 - DNA, 1000 bp, Homo Sapiens
ggtgagcagaggaggaagggaggtagacagtcctcatcccagtgtccctctgaactgccgcgtgtgttgctccagcttctcagcctccgcctggaggtgccccagcgcggcagggctggggtatgtgagcacggcattcttagtggccagcgctacgtccttgagcaggctgcagaggtgactgctgccgcggaggatctcattgcgcacgtccctctcctgggtctccatgcacagcgtgtccaccagcttctgtcccaccatgatgaccagcttgctctgagtgatgatctccgcgggctggctgctgctgaggctgccgtgaaatgcgctgatggctttgaagagcgccccaaagtacagccggcagtgttcagataagcggggtttcctctcaggagtctgttgactcgaaggctgaggtataagagggccaggattctgtccacagatatttgccctatttttctttaatagttcagaagagtgttcatcttccctttgcttagtggaaggggtactcttttggtgtgattcagtttctctttggggaggctggatgtatttttcacacttaaattctgcatttggggtcaactgcacagtctcttccttttcacagttccgcttaaaaaggagccttccattggcaatgacaatggaggcaaacctcttgatgtcttctggaagcatccgtgccaccatgacaaacctctcaaggtcatctgggctgttctggacactgtcagtcacaagaacttccagaggccaattgcgattatccaagctttcctttgtttcaagcaggatgcggtaggagttggagatggtctgcatctggtcccgaattctgttctgaaggttactgtcagtgaggttacaggcagtcccatggactcctcgggcaaaatccagaaattctcttacagattcttctatgtgatcagtggacctgtggattgcatcaatgttggcctccagatagtctcggaatctccac

SEQ ID NO: 472235 - DNA, 1000 bp, Homo Sapiens
ccaaaaagttacaaagtttatatgaatgtaacatataaagatgcagcctttttcctagggcaagggaaggaagggcagttacataaggcacaggaatcgcagcaagcaccagctgaaggcagggccctagtgggagaggaagttggcactggggtccccctgcagctgttgatggggaggtagagaccccctcaaagtgccatggtctgaggctgaactaattggccaagcagatgctaggcagcggcgggggggcggtggctatatccaccgtctttggtgcagcttgcccttccacaccccagccctcttgtaaaaccccagagtcctgggttccagaggcctcctttggagcagaggccctggaagggggtgggagagagtgcatggggaaagtgtgaaagctgatatgcctgtgtgccgagggactgctgggacagtggtgggaggtagcaggagagcggctctcatacatacccctccttgggaaccacaggggcaggcggccagggagtagggtagggatggggccccccttctgtcccctgcagtgtacatggaggaaaggggctgcccagaggaggggccagggcaggtgaccatctggagttctggtcgaggtgatggtctcctcacaccatggtggcctctaactggtgacggcagagggcccagcgcctcctcgcttctcaaagaacatgtagtcaatgaggaatgtggctcccagcagcacagccttcaccctcacatccaggtccagcgggaactgtaggccaaagtcatctgcatctgtgagggcttctcggaccaggcccccccactgcttgctgatgcggcccacactgcgggattcatcccgagtcttcacctcaaagttggtgtctgtgccacagccacaggtccagcagggccccaccactcgcaagactgtctggcgatcggcatcctggatggagaacttggggaggaagggatgccaggtctgtagcacgtggccaat

SEQ ID NO: 472236 - DNA, 1000 bp, Homo Sapiens; identical to SEQ ID NO: 341462

SEQ ID NO: 472237 - DNA, 1000 bp, Homo Sapiens
tttttttttttttttttttttttttttttttacctttggaagcccttctttattgggaaataaatacagagttaaacaggtgggccggccaacatctgtggctttggaggccaaaaggaaggagtctgacttgctcagaactcagatctccatgagctggtcattccccacgatcacctcattcactcgtttagctttggcttcaatcctctggccacttccaatcaagcagtccttgatgtctgcacccttctcgatcacagcattgttgcagatgacactgccttggatattgcttccttcctccacagtgactgagttcatgagaaggcaattggtaatagtcactctatcttttatgagacaggatgagccaatgactgagcgcttaatggatgacttctctccaatctgtgtctctggcccaatgaggctgtcaactccaaccaggtgtttgctgacaatctgggctgacgaatggactggtggttcttctggacagagagcagacagcaatttgggcacctgtctgtttgcttccatgtagagtcccagtgtgctcactcgagagcagagcccctctttcatgatgtggacatagcagcgcacctgtgatctggacaagtcttcccacctgtctcctcgacaggcattccagcaggcatcatagggagccaggttcagtgtattggcttcttttataaaactgtagatatctaaggacttcagctcctttttctttagatcctcctctttttcttcttgtccctgttgtgaggaagctgaggaaaactgttttctcactaaatatggaatcagttcactccggatagaagttattgacccattttccattaggaaatccacgatgtattttttcaaacagtagaggtgggcatccacaagacccgtgtggaaacgtattctaggatgcttctgtaggatggatcccttaatgaccagctcttcatccaagtctgcttcattagccatgaagagc

SEQ ID NO: 472238 - DNA, 1000 bp, Homo Sapiens; identical to SEQ ID NO: 159907

SEQ ID NO: 472239 - DNA, 1000 bp, Homo Sapiens; identical to SEQ ID NO: 246538

SEQ ID NO: 472240 - DNA, 1000 bp, Homo Sapiens
tccatgttaacattaagcccatttattaacaagtatctggcccaataattatagttaggtaaataaaatacttcagaactattttataggctgccttacaaataagataactgtcaaagatgcattctctttatgtgaaaagttacacatgttctaagtttaacactccacaatgaactgtgaaatttccctaagctaatacttaatattggaaaacttcaacagaatattggaaaacttcaacatcatctcttttctcaagcaccttcatattgctcccatagttcttataaattgtccaataacccagacaaatttccttgtggacaagaatttttaaaatttaaagtattatatattaatacaatgactttagttaaaagtaaaaatttattgatccaaaactgccaaaaaccttatgctaagcaaaaacttcatttaagcttaatgctctttttaactcctgcacgaatgccagataattcaccactataacgttgctcttctttacgaacttcacgaacctggcctcttcttctaattttggctcttctgaacttctctctgtgtttcactctgggattgcgatcaatcttctttctcctaggagtaagtcccctatttttagcaatttgataggtaatagctctctttgcattttgatcttcaagagcctgttcttcagtgctattttcttctttctttctctttagcttttgcctgtcttctatttctttatagtacttcagttttgctttttcatcaaaatcagaatcatcagaaagatctgtaacagcacaggcagcagcagaagtctttgaaacagactttggtttgggcttggtggattttgcttttggaatcagttctttctttacagcatcatccttaagtgtcaacagatgacgaatttctgaggacagcttctgatccacaacggacagcttgttgatcaaatttcggtaggtaacaagcctttctatgacaggatgtccatgtg

SEQ ID NO: 472241 - DNA, 1000 bp, Homo Sapiens
ggcctgttgtgatgtattgttgcataaaacaggtgttttgctaaactgggtaggaaaagttgtaacagatgttcttctcttggatcttgactctgaggttcctggtccatttagtgtagtagtttttcctggaggatttggattttggtaggtgacatcccattgacctaaaattcccagatacactctctggtaatgtcttcactgtctgccaacagggtgccactttggtcggctcgcatgtagaagccattgggggccagtacagtgagtaagttgctcccctgaagctcgatacagaagttgagggcaaacttgccccaagggcgaaaggtgccaaaggatgttattgaccagaaggatcccccctgtgcctggaagtggtagatacccggtcggcagggtagtagatgaatgcggtcgggctgatcctggttgcactgtatgaggtcatggcccgatgaggagcccacatagccataacgacctcgcaatacaaggaaggagcgattggcaaataaaatcccaaattcctcatttgggcctggaaggatgacattggccatcagcaggctgttgggtgcaatgcccaggaagcgccccctgcaggactgcaggatgatcctgccacagttccagtgcattcggaagaacgtgtcagactccagggggtgcccatcagccattactgccctgtggcgcctctgggataggtagtagccattggctgaacgaagctgcacagtggggctctcactgtcacattcaaactggaacaaggacattcggtttaagcgctcagaagcagcacgcacctcaccatcgtagatgactgagatgaaccgcccagtctttgacctgaggctgacccaggttgggcagtgctgtaggatgaaccactcctcacccctcatggggttgcagcccatgcccaagagcagatgcgtgccctgtggatataacatgcctccttctccatcacacagtgccacaagccctc

SEQ ID NO: 472242 - DNA, 1000 bp, Homo Sapiens; identical to SEQ ID NO: 341465

SEQ ID NO: 472243 - DNA, 1000 bp, Homo Sapiens; identical to SEQ ID NO: 159908

SEQ ID NO: 472244 - DNA, 1000 bp, Homo Sapiens
tttttttttttttgtatttttaaaatttttattgtattttttttcagaatattttccatccacagttggttgaacagagtgccatctgtacctagaatgctgtctcagcccaaggtaccttcttcacatcattcatgaagtgctttaaaccactccccctcaagaagccctttagaacactcagaaaaagatcctcatctcataattcttggtccaaatacaaaactccagactcctcaattactgcatcactaaaattcccaccatttcagtgcatataattagctttttaagttatatatttattattagcttggtgtttgtgtgtttccatcagtggtaacaccataaacatgattcttccaattttactacttctgtaacacagttgcatgtggaaaacggacattcgataaatttatcctgacttcacatgccaaatagtacctttacacagccctcagttaaagccaccagtttataagtaacttagtggaatagcctagaggtgacaaaggaagagttgggcagcagcattcaacaaacatccgtgaatgaaactttgctcctccattccgatatctgggctgcactgatctaccactctcctggtttctgcctctgtcttccctgctttgcattagaatcagtctcagtgattaacagtggtgcctgaaagacaatttctccaagagaactgtataggctctaagggcaaaacacctgccttcttggcagaatcgccaggctccctgacaaataatttggagagttttagtgtctaatggacatactgctggagtgggtgttcttagggttgtctttagtgttgttacctggacaaacctttccctcgagtagaaaattaagacacattctgttataggaaagcactctgcttgccaacagtttctataatagttattacactgaggcatattaatgaagggcgttttgtttcttgtcatcaagacatgccatcttatgacaccaaatgccc

SEQ ID NO: 472245 - DNA, 1000 bp, Homo Sapiens
gctttacataaacttataaggattttttatttaaaggatttaaaaatataacacagtcaatataaacatgtactgggaattataaaccattctttcttctaagcactggatgagatactaaaaacatacagtatcttaccaatagccattaaaataggctaaaatgaaaaagaaaccgttgtaacaaggttactaatcccccaactttcaatgctgagttccttcatcatccatgtgcaatccagagatgacatctagcagggtggtaaaattattctggaaaatgccaactgtacttggacaaaataagttaattctatatggttgtccattaaagttttatgtggctatggttccactggagctaaaaattggcttttaactgtttccaaatcaggactagcagaggagagaagtaaataaagccaatggcactcccttcagaggctcaaattggttagattttgatgcagatttaaccttagcgagtttcagtcagtccatttagatgatcctgtaggttcatacaaatacactgaaccgttggtttaacttctcttccttcctcaaagtttatgataaagagactcatccctgtattgggagtgactgacataagttcagatctgctcagagtggctggtaaggaacacttaaggtcagtcagaaaataatcaaacagacttctcatgtaagcaccgtgactcacaactaagacactggctgctaatcctggaataccgctgtctgaattaactttagagctgtgattttttcctaaaggaaatatctctgccaaagaagtttccagacagttgcttggagatccttgggaaaactgttctttttgatccgcttctttcaggattagttgacaaagaaattcaaaaaagtctattccacgcattttcacctggtccagcgtctctcctccgggcggtgtaaacacagggcactcttccctggctgctttggccatggccctcagctcacttagcgc

SEQ ID NO: 472246 - DNA, 1000 bp, Homo Sapiens; identical to SEQ ID NO: 159909

SEQ ID NO: 472247 - DNA, 1000 bp, Homo Sapiens
gtttagtatgatgactgacttagtccctccctactttcagaatgccatatcacctccaccctttactgtactatgagtcaacaactctgaagagaaacttttggttttcttgtgagagtgaggagggggaggaaattggtaggaaaggacagcttttattcagactttcaaccaatcttcctggaagtttacaagggtagtggtggggagagcacccagccaacacttctgcacagagatttttaaaactcttactagctgtgtaaacttaaacaagcttcttaatttctctaagcttcaatttcttcagctgtaaaatggaactcagagctttggtgtgaatgtcaaatgggatcaacaaatgtaaagtgcctggcataatctgccctgcagggagactgcattcaattgttgtcagtacaatggtcatggtgatagtagttggtagtatccttagccttgtttcagtggacagaaaggaacctctcacactatctagtgtttttctacactatctcaaaagggaaggcagcatctccctactcatcttctgcggaaatgttaatagaatttcaggagtgcaacaacttttgctatttgccctctactccatctttcccttgagtgctcaaccctaatcctcagaggcacctcttttatttttggcttccatcccaatgaattaatgggaaggagaactgcagcaaggtcaactaacctgcatctcaaagaaaatttgagatacatgtccttgatgatcccccttccattctatacacaattctttcatttcctagggcaatgccccagatcctcctcctacttttcctgtccttcctaataccctggcaagagagaaacagtagaaatagggttgccttcagtgtgttagaacctctctcccaatgcaaaatgaaattcttccttcccctacttattgccagttctcttttgctccaatccttctcccccttttctctcactgtccttacttgggact

SEQ ID NO: 472248 - DNA, 1000 bp, Homo Sapiens; identical to SEQ ID NO: 341470

SEQ ID NO: 472249 - DNA, 1000 bp, Homo Sapiens; identical to SEQ ID NO: 341471

SEQ ID NO: 472250 - DNA, 1000 bp, Homo Sapiens; identical to SEQ ID NO: 341472

SEQ ID NO: 472251 - DNA, 1000 bp, Homo Sapiens; identical to SEQ ID NO: 341474

SEQ ID NO: 472252 - DNA, 1000 bp, Homo Sapiens
atgtatgggattattctcacatggttcatgcagctttttctgtataaaatgtataggtcaacttacttgttcggttgagctatctccagaagccatctctttagaccctgaagtacattccaaatggcttgggaaatcattacacagatccttgagcttctcatctcttggcaatgttgatgcccacacagtagagctttctagtccaatttcttttacagtttctaaattaggagaatagtagtttccttctttgcttttaatatcaccaagaatatgtggcttttcttccatcatctcagatgtagaacatgctttttgattaaagtctccaacatgttctattttctctgaatatccatcagcaagcagtttgtagaaaatattttcaagctgcagtggaagtactttagacgtaatgcctcttttctctaggtcatactccatatgagttaattctctcatcaattcaaatactcctgtaattttttggctatgttgatcttgcttcaatatattaaggagaagctcagacttaagatttccaatacagaaaggatcatctctactttctggctttagttctgatgagttagtcatgggggaaactccagaagagtcactcatttgagagtcgctgggcacagtagatgcctcatttaccaactgtgatgtggtaatccttttaattaaattttgaattaaaattttagtgtctgcacaggctgaaggttcttcaacctcttgagggttcatatgaccttctttcaacctgctttttaagatatcctttacatcctccacaaatacctgagacaattcaggaatctgaacctccttttcttgggatcttggagacaaggcttgttcttttggtagctgttgctcaattctttctttcttattattaatttctaagaatgaatagtcagtatttaaagtgttactggagttatcatttcctaatccatttgcacaccgctccgactgcagaaaatca

SEQ ID NO: 472253 - DNA, 1000 bp, Homo Sapiens; identical to SEQ ID NO: 341476

SEQ ID NO: 472254 - DNA, 1000 bp, Homo Sapiens; identical to SEQ ID NO: 341477

SEQ ID NO: 472255 - DNA, 880 bp, Homo Sapiens; identical to SEQ ID NO: 341478

SEQ ID NO: 472256 - DNA, 887 bp, Homo Sapiens; identical to SEQ ID NO: 341479

SEQ ID NO: 472257 - DNA, 1000 bp, Homo Sapiens
tttttttgagagggagtctcaatctgtcacccaggctggagtgcagtggtgtgatctcagctcattgcaacctccgcttcctgggttcaagtgattctcctgcctcagcctcccaagtagctgacattacaggtgctcgccaccacacccggctaatttttatattttagtagagatggggtttcaccatgttggtcaggctggtcttaaaactcctgaactcaaacagtcctcctgcctcagcctcccaaagtgttgggattacaggcgtgagccactgcacccagcccagtgattacatgttaaaaaaagtcctagggtcgcatgacatgggattaagtatagaaagcgcctggcaaacaggaggtgctcggcagatgccggctccctcctctccaccccaggctcgtcttcagtgtcagctgagggattctggttttgctacatacgcacagtctttttggctggccaaactgaggctgctcgaaacacttgcatttgaactgtccaggctgctgccgaggtgtagttttctcatatgtctgacgacggccgtggcattaaatgcttgtctccatttgctcttggcaaagtttttccggatctgggcgctgacggactcgtggatgtttttgttgagggctgtgtcaccagcgatccatgggtgccgagctgcctgctcacacgtgtatcttttattcgggtccttctccatcaggttccgaatgaagtcttttgcagagtcggagatgtcatcccagtagggagagtcaaactcatattccgccttgaggatctgctcaaagagcttggagtcattttcatcataaaaaggagggtagccgcagagcaagatgtaggcaatcactccgatggaccagcagtcaacggctttgctgtaaggtttctgggcgaggacttcaggagcgacatagcctggagttccacaggcagtggacatcacatctcctttgccctccatttttgacaatccaaagtc

SEQ ID NO: 472258 - DNA, 1000 bp, Homo Sapiens; identical to SEQ ID NO: 341480

SEQ ID NO: 472259 - DNA, 1000 bp, Homo Sapiens; identical to SEQ ID NO: 341481

SEQ ID NO: 472260 - DNA, 1000 bp, Homo Sapiens; identical to SEQ ID NO: 341482

SEQ ID NO: 472261 - DNA, 1000 bp, Homo Sapiens
ttttttttttttttttttccttgggtaaggttgacaccccatttattggagaagaccccagcacccgccccctgaggtcttaagggctttggtgtatccttggtcacgagcgctgggccaggaagcagagttcctgagagccaagtctagtggttgagagaggaccctggctgggcctggggagcaggaagccatctgtccagctgggcagcccccatgggtccctggtgcagccccggccatgtgtccagcgccccatactccatgaggggggtctgcaccccatcacacgctggttctgcaggtctgcacccctgtgaggctgcccctggggggcatgggttctgttgggctcttgctcccagcatggatgacccagcgatagcagtcagtgatgcgcttgttgggtgcatgggggccacagcgggtgcagtacacgatgcccagtgcaagcaggaccaccaaaaagacacacgttggcaccaggagtgccaccagcagccaccggtcatccctctggctgtgctcggcaagaccagcctcccccagggctgttggggctgctgtgggagctggtgagggcagccacagggccaacttgggactggggccatcttcccttgggatttggggggctttggaatggggatgtgtagggctgatgggtgaggtctggttagtggggctctgagagggcaggagggtggggagggctgcgggctgggtggcagcaggcacagagatttgatgggcaggagacacaggggacctggaggtggtggtcagagagggctgggcagttgggataatgggaagctgggtggcctgggttctgaggacaagggcatctggggcttgagggggtagctgggcaccgagggtggtgaccagaggggcatggttaggtgggattccaggcaaatgagtggtggtctgggtgccagcgacccgggtgtctggaaacatgggggactggtgggcagggaagagctccggatat

SEQ ID NO: 472262 - DNA, 1000 bp, Homo Sapiens; identical to SEQ ID NO: 341483

SEQ ID NO: 472263 - DNA, 1000 bp, Homo Sapiens
ttttttttttttttttttagagacagtggcgtttatcaccctcaaccaggcctggcttgggcttcactgtaactgtgtgacgtggggccagtggatcacttgggtgcctcaatttggcctcttctacccatgtgcaggctggtagggcagtcgggttgggcatctggtgaggttccccctattgtacccagttacggccccactccccaccatttcccagcctcctgttgcccctctccctgtggagacgctgcctgtggaaaggggcctccttctggctcatggctcccttcttgcagctggaggaatgggagctcaaaaagaacttcctagtagcagccagtcagcatcttcgaaaaggagcgtgtcctctcaggggctggcagtgggttaggcctgagtgtctgcctcctccaccctcagaggtctctgggctttatcctcatgctcgccaggcacctgccagtgaacttggtcctcgtagtgctgggagtctgggggggagtccagaaagggtagcttcagcaggagccctccaaggcccccgcccacagaggcaaacatcagtgtgacaaacagcccgaagagctggtgcatggcctgtgacgtggcactgcgctggccctcggctatgagtggaaacacactctccaggccatctccgtaagcttcatgggtggcaagtccagccacaaggacccccaggagggcccccaggacccccggcatcccatggaggttgtggactccacatgtgtcttggactttgaattttgattcaaggatgggcgtgaagaacttgtaccccagcgtggagacagtcccagccaagaagccagctgccagagccccaaagggtgtcagcatcatttcacttgaggtccccaccacaacccctccagccagcgctgcattttggatgtggaccatgtcaagcctcccatcttcccctacaagggctgacaaggcaaaggtgccaagggtgctggcagccagggag

SEQ ID NO: 472264 - DNA, 1000 bp, Homo Sapiens; identical to SEQ ID NO: 341485

SEQ ID NO: 472265 - DNA, 905 bp, Homo Sapiens
ttacctctcaatgtcagtgagcctggaggaatcccggaatcctttggcaaaaggattgctatctattttcagcttcgttatcagttgattctggtaggcagtgactgccgtaaaaactgtttctggaaagatgaaagttctaaattcttcagacttcaggttgagcaatgaggctgtgtggtctttcttcttaatgatgtgcacccttggctggtacttatgcattgagttcaaaattatatggccatgttgatccagttcattgttggtgagtttcaccttttcaaaagacaccatctgtttgagtagttgctcaccggtaaaaggagaatctggatgcacatagagcctggctggcaacggcgggtcggccttgccagccaccagccaggaggaccggtggtaggcgtagcggtacctcttgttgtccacagggacgatgtccatcaggactatgtacttggcctcaggatccacccccgaaaaggacacccggatggttggaaacatcctcctgcccgacttggtgatgatcatctcggtgcccagctcatggaatttgtcccaaagctccttggtctccaggctgcaggcaattttggccatttcctcactggggatgatgggggtggtggggatcagtggctcagtgcacagagaggaggaggacgggctgctgccactgcctccaccaaactccccatgagcatccaggctggtcagctcacccaggggctgggcacaggacgacttctccacaaattgctccaggggtttgattgtgttctccgtcgcctccttctccttagagccgccgctcgacatgagcgcggcaatggagaaggcgttggcccgagaggagagttggggcttgggggacgccgtgaactccatggtccccagca

SEQ ID NO: 472266 - DNA, 1000 bp, Homo Sapiens; identical to SEQ ID NO: 341487

SEQ ID NO: 472267 - DNA, 1000 bp, Homo Sapiens; identical to SEQ ID NO: 341489

SEQ ID NO: 472268 - DNA, 872 bp, Homo Sapiens
gcagagcgagtgctttaatatttcgataaatataaagatttctttattgtggtcctcagtttacaaataacagacaggaaccaggggactgggtccagatgggagtaaggaggaagccaagaaaaccatttattcctggggctctggtcagttttagttgtaaatgggaagggaagaaaataacatgaagtggaggcagtaggaagaagaaatgaagaatccctgagtgaggacaggagtcttggaatgactccacggtgcacccgcaccctgtttcatctcaggcggcatcctgtcagccagtagaagagtggccggcctgaacagtgcaacctccattctacccagttgttcatcccccgtgctccggacacaatcctttttgcgcagtggatgcctgcaagaaggttgggattcagcagatcttgacagtctacgtggcaaaggttttccgagtaactcttataatcgttgcaccagtagtggctgttgatctggaagaggccatagtcaaagcttccatctgcattttcatttatctttgatatgttgaacttgctttccacaaaagccaggcacagccagtcactcagggagtaaccctcaaacccatccaagtcctccagctgcagcacctgggccaagtcacagcgactgatgaggctggcctgatttagggcaagaaagctgctgaccaaatagatgagtagcgcctttgtcatccttggaggggaggaggtgcagctgagggctgatggttcttagggtcttgcagactttctgctgatcttctctgagagcctggggaatctggagagggcagccaggtttccttactcactcactgctccaacctggctgtttccaatctc

SEQ ID NO: 472269 - DNA, 1000 bp, Homo Sapiens; identical to SEQ ID NO: 159918

SEQ ID NO: 472270 - DNA, 1000 bp, Homo Sapiens; identical to SEQ ID NO: 341492

SEQ ID NO: 472271 - DNA, 1000 bp, Homo Sapiens; identical to SEQ ID NO: 341493

SEQ ID NO: 472272 - DNA, 1000 bp, Homo Sapiens; identical to SEQ ID NO: 341494

SEQ ID NO: 472273 - DNA, 1000 bp, Homo Sapiens
tttttttttttttttttccgtgagcagatgcgggtttattattgcacagactgcagcatcctgaaccccaaacccaaccccaaacaccagcccccaaacttggcctgggagctttggcaggcacaggcttgtccccagcaccagccaaaaaaaaacaacagaaaaaaaacaggacaagaatctccgagacggagcccgtcagcacagagcagtggccccgccccattcccctcatgctccaggagtcttgagaagctcagatgcagatgcagagctgtgggccatggccagctgaggatggaagaatctgcaggttcttctccatgaaaatacagtcctggattccagccaagccacaaggtcccagcagggcttgaaacggcaagtgtgaagctaagggagaaggttcccaagcattgaagggaaatgggaaagctgaccctatcagaagcaaactcctaggtcccagagctgcctggggaggccctgccacaaagccaaagcctccaaggtccacagaaatgaagggaggacagcagcagttccctctggctcagcttggatgccacgtccttccccaggcttggaggggcctggaagccctttctctccattctcctggaggcaggaaaccatagcctttggccctcaccccacccacaggaagcacaagggcccagagacctagtgtggtacaaaacatctttaagtgaggtacatccaagtagccatcttctaccaagtaagccaaaggggcttataactgcacccaggctgtacccagttggagccccagacttgcccctctcttgccgggaaatgcttcttgacaagcagcttgtcttcaacacctgccttagtgtctgccccagggacatctccctgggcttccatgggcttctgtgctcccctgagctttcggtgggccctgatgggggaggagacaagccatttcacagggcatcacaggagatttctcgccggccccaggcctcctgca

SEQ ID NO: 472274 - DNA, 1000 bp, Homo Sapiens; identical to SEQ ID NO: 341495

SEQ ID NO: 472275 - DNA, 1000 bp, Homo Sapiens
ttttggtatgcattttttttttattttttcaactttttgcaaagcagcatagcaacaatcgtgattgtagcacttgcctgaggttgtggtcacaaccaacgtagtaaacatcatttgcatatcagtaagaaaaagaaaacaggaggagatgagttcttacaaaacaaagcagattctagagatttcactgtgtctgcattgctccttccacgcaagttctcccttagctgaccgcaatcttgttttcttccaggaagtgaggaaactggtgtttgggaacgccgtcagtagcacttggtttttccacatctgcactgatacccgactgggagccatccatcttggagacagtggcgttattcacaacggaggtggcccccaaggaaaccgggagggtaggaacccccccactctggatcacagagatctcattggtcttcacggccagaccgccattgagcatgctggtgtactggttccacacaacagggtccacattcactgaaggggccaggatttccttgggaaagatttctgagactctttttccgtccgtacctaacagagccatggtgttctcgatggccaacttccttccacggcgggctgagttattgttcgccccgtgtgtcatgtagtgaacctttaagttgcctttggtggtaaaagctcgcccacaaatgttgcacacaaaaggcttctctccagtgtgagtccgctcgtggatctgaagagcgctagcagacgagaagttcttcccacaccgtgtgcagccatgttgcttggcctgtcggcgtggctgggctgctaacaaaggggtcatccctggggacaatgtcgagggtcccacaaatgtgccaggaacttcaaccttgacataggtcggcggggctcggataaacgtggaagggagactgctccgaccttccatctcagtgcggctgttctcggagctctctgctttgctcccagcatcgggagactttgacttgatgctttc

SEQ ID NO: 472276 - DNA, 1000 bp, Homo Sapiens; identical to SEQ ID NO: 159919

SEQ ID NO: 472277 - DNA, 1000 bp, Homo Sapiens
ttttttttttttttttttttttttttttttttttttttttttttttttttgccagagtttacggttttattttaaaacagtagtaaacaatttcattgatttttcttaaatcaaaccacctcatactcggcttgtctcaggcaaaaagtaaaaaataaaaataacgggagggaaacatggaaaccgacctaccttccctagaaataagcccctggtcttggcatctggaatggcttttggacactgcctttaacaaatgagaaaagcaagcaccaaaacattgtgcttcagcagcaggttaggaaactccacaaagaaaggggtggggaggattcgaacacagatcccgagtgacccagttcagtcctcaaaacttctgagagtctggaggcgtctcctctccacaactccctttcagagtgacttagagatgggggtccctttaggaagagccctcccacgaaccaggctgatagggatctgtgagcccacaccccagacacaggtttgagggggaccccaagcaggttcccagctggtcagagatgggtcaggaaggacaaggacatattcagagcacacagagggaaggacgagggacttcgggtgcctgttgcctcactcctctcctcacggctccttcccattttgttcacgtggggatgaagactaactgctactggatggcaggacaagaaagagctgtaaacagcttgggtctgctcacccaaatgtgcaggctcctttgtcagaaagcgattattgtcttagggacaggggaccagagaaagcccttgtggtgttgggtcagtacggggtagaacacaacgacagcagccgccagacgcgtgctcgctctgggccctgcccccagacagggaaacactgaccgaggttctggaacggcaacggtggcagggagggtgtggggtatgctcccctcctcctggcacccaggccaccccggcccagggagaggcagtctgccctctgggcatag

SEQ ID NO: 472278 - DNA, 1000 bp, Homo Sapiens; identical to SEQ ID NO: 341497

SEQ ID NO: 472279 - DNA, 1000 bp, Homo Sapiens; identical to SEQ ID NO: 159921

SEQ ID NO: 472280 - DNA, 1000 bp, Homo Sapiens; identical to SEQ ID NO: 159922

SEQ ID NO: 472281 - DNA, 1000 bp, Homo Sapiens
tttttttttttttttttttttttttttttttttttttttgagaaagtagtaaggatttttattgtcaaaacgagatcataatagaagacacaaataaattaattgttctcataattttagactccagggcctctctatggaaaggccagcttcttatacagacaaggtactatccaaaacaaaaagcaggtatttgagacagtgttcaagacaacaagtgaacttgtacacagtgaagagaaataaaaaggtggcttccgtatttccctccctcagtaaggttatgtgttgcataaagggatgaggctcattttggtgaaaaatgctttcatacagaaaattttgaattgagtgacctccccgcacaggcgttccaggccctgacctgaacaaggaaatcaaagtaagttaacaccactggcttcacatgaacctcaagactataatctaacggtatctaccatctcctttactttaaaaaagtttaatgtccatttacctataccaaatcagtagacttaattttctctcttaggaagtttttaaccaaattacagctaaattaatctcactttaaagtgcaagaaaggctctgctagagtagtgtttgttctgtggcatagaaagaggagcatgcctcctccggcactggcctaagaggccccacatgaagaactagctgcaagacagtgatccattaggtctgccaaaaagcagggggactcaaggttcagcctagaaagaggggtccctgccaagtctggcttttacctgtacccaggtcccaaacaaaccttgggtcccctaactgataaggctggagcacagcaccagtcatcaacagggccaaagtcgtcttagcgagtcagtgagcacctctaagccatgatttgtcaatgctcacatggatagtggtaaaggaataaagaagcctgggttttggaacagtacaaacattctttacctagtaagcagtgatcaaagttcttacctagggtaa

SEQ ID NO: 472282 - DNA, 1000 bp, Homo Sapiens; identical to SEQ ID NO: 341502

SEQ ID NO: 472283 - DNA, 1000 bp, Homo Sapiens; identical to SEQ ID NO: 341503

SEQ ID NO: 472284 - DNA, 1000 bp, Homo Sapiens; identical to SEQ ID NO: 159923

SEQ ID NO: 472285 - DNA, 1000 bp, Homo Sapiens; identical to SEQ ID NO: 159924

SEQ ID NO: 472286 - DNA, 1000 bp, Homo Sapiens; identical to SEQ ID NO: 246539

SEQ ID NO: 472287 - DNA, 1000 bp, Homo Sapiens; identical to SEQ ID NO: 341507

SEQ ID NO: 472288 - DNA, 1000 bp, Homo Sapiens; identical to SEQ ID NO: 159925

SEQ ID NO: 472289 - DNA, 1000 bp, Homo Sapiens
ttttttttttttttagggttcaagtcagactgtttcccaaggcaccaacaaagaaatccaggaaggccctcttggcccagccaagagaacgagggctgcagctgcagaggcgttcactaaagatgtatttccctgaggccccgcacctgatgccactgttgccccaccctgacccacgttccctgctgcctctccctctggccagcccctccctccctgcggctgcagcgtcgtcagagctctctggggatgatggagaagggcagtacagggctgctggcctccagctcaagggcggtgaggaagcagtcaacggcagcctcgttctggccctgggcctgcagcacctcgcccaggccctgccacgcctcgtggcacgtactctgcctctccacggcatcacgaagcaccttctgggccaagctcttgtggcccagccgactcagcatcagacccaggctatgcatgatgcgcacgccatctgggttcaccgtgagcgcctccttgtacagctgcttggcctcctccaggttgcccttcacctcagccagccggccccgcatatagagtactgagtgagaagtggggaagaggcccgccgcctcctggatgcagaaacctgcttccttgaggtgctgctgctccatgaacagctcagcagcctgcagccagatctgttccagcgtggtccacagctgcatggggccctgcttcaggaccgaagagggcatagtcagctctgacatggcctcctccagccgggaggcggcgatggacgaagcccgccgggagccagagtctgcatcatgggcatcaggcaaagtcaggtgcatgccactctgcttcttcatggtgaggccctcaccgaagctgccatccttttctaggcctcccagctgggagaagctgtacagggtctgccacagcctcagcacttgtctgcaggtcacgagggcttcctctgggcctttcagcacctgctccagcttcaccttggtga

SEQ ID NO: 472290 - DNA, 1000 bp, Homo Sapiens; identical to SEQ ID NO: 341509

SEQ ID NO: 472291 - DNA, 1000 bp, Homo Sapiens; identical to SEQ ID NO: 341510

SEQ ID NO: 472292 - DNA, 902 bp, Homo Sapiens; identical to SEQ ID NO: 159926

SEQ ID NO: 472293 - DNA, 1000 bp, Homo Sapiens; identical to SEQ ID NO: 341512

SEQ ID NO: 472294 - DNA, 1000 bp, Homo Sapiens
gtgtctttctgtgtgtgtctgtgtatgtaatggtgtgtctctgtggcggggaggggctgcgtgtgattgtgtgtctgtgtgtgtctttctgtgtatgtgtgtgtaatggtgtgtttctgtggccggaagggcgtatctgcgattgcgtgtctgtgtatgtaatggtgtgtctctgtggcggggagggtgtgtgtgtgattttgtgtctgtgtctttctgtgtgtgtctgtgtatgtaatggtgtctctgtggcggggagggtgtgtgtgtgattttgtgtctgtgtgtgtctttctgtgtgtgtctgtgtatgtaatggtgtctctgtggtggggagggggtgtgtgtgatttgaggtggggacggggcctaggcttcagttactcacaacaggacggacaaaggaaacagagtttacccgttctgctaaaaccaagggcgggagggggacggggctgccggcagccctcccagagcccctggcagccgctcacgggttccggaccgcctggtggttcttgggcaccgcagtgaacctcagcttcctcaggacggcgggccagcccagcagctgctggtcccacaagtactcgggggagagcaccttggtgggtttgtggcgcagcaggtacttgttcaggtggctctcgtcgtgccacacggcctcgatgccgttggcctggtcgaccatcatggcctggtggcaggccctggtgagccgctgcacctcttgcaccgaccccccgaagaacccccccaggtagtagaaatcgccctcgtccttggggatgtaggcctgggactggggccggcgctcgtaggtgaaggcctcccggctgcttccgtagaagccggggtgcagggtgccgaacagcggagtcaggatctccacgcccacgtggtcgcggaactccatgtccacgtccacgcacaccaggtaatccacctcgctgaggaagcgccgctcgcagaagtcactgatcatctccatgcggcgcat

SEQ ID NO: 472295 - DNA, 1000 bp, Homo Sapiens; identical to SEQ ID NO: 341514

SEQ ID NO: 472296 - DNA, 1000 bp, Homo Sapiens; identical to SEQ ID NO: 341515

SEQ ID NO: 472297 - DNA, 1000 bp, Homo Sapiens; identical to SEQ ID NO: 341515

SEQ ID NO: 472298 - DNA, 1000 bp, Homo Sapiens
aagatttaatgatctatttattttaaaggtttgcctttggggacaaagattatcctggttagctccacttgaaagaatagacttttatttcatggaatctgtaagcgtttagaaaaatcactgtggactttgaaaatatatttaatacaaaacgtgttgaaacccatgctttggctatccctaggtagaaatgatcctctttatacctatgcagattatgagagccataatgtcctcagttctcatattccattgagtaaacacagaactagcaagctgtggaagcagtgtgtatgagggcaaattgtagctttgttttttaattctacagtcagtatgtgtgaaaaaaaggatgatttttaaatgataacaattcttaaatgtgataattgctaatgaatttactctgatcagttttgttcttttaccattcatagctaatttatcacattacatataaccaggaatgcaaacactagcctcatgtatacctctcagtttgatctcttagtttttcttttactcttcaggtatgaaaaacctcattcttcagtaattacatccacagctcctaggtatatgtcatatatttgattatgaagagatattttcctctgcttctaacagcagagtgcagtattttgcaaggagagttgtctttgtgatttagcatatattcatttctgttctactgtgctttttgtgtgcttagaatatagttcgatcaaaatgtgtgcaaaaacttttccactctaaactacatgaatattttctaaaacttaagtcaaaaataagaccgcaactgagttctggctttagtgacaacgaaggcaaaatggattttaggtgggcaaggactgtctcctagatgtcagtgtccattccggagccacatttttggcagaagatttccttgttctgggtcaggaagcctttacccaccaaggagacagagcatttcccgcagttaaagcattcgctatgccactggctgtcttga

SEQ ID NO: 472299 - DNA, 1000 bp, Homo Sapiens; identical to SEQ ID NO: 159927

SEQ ID NO: 472300 - DNA, 1000 bp, Homo Sapiens; identical to SEQ ID NO: 341517

SEQ ID NO: 472301 - DNA, 1000 bp, Homo Sapiens
ttttttttttttttttttagaaaccaggcaagttttaaatataagtttgcacaatattaacattaaatatacatcataaataaggcttataaatataaaactgataaaaattgataaaaatcgataaattagtcatgtccctccaaggaactggcctcgcagtttctgagaccccctctaggagagcaatggctcctgcgtgagaaaattccaggatccaccaccagggggagcagccagcagcgaggacccaagacgggcttcccggcgctgggaggtgggtctgcttttacagagacctccgtgtacacctcccagcgccatttgcaccacctgtcctgatttacagatttttaatatccaccttacgtcagggaatccaagcaaccgacaggcagtgggggccttgtacagcctctaactccctagcttcacaaagagaaaacaggtccacagaggtaaagtgacctgccccaggccacgtggcgacttcggggctggcctgggacctgagctccattccctggacccccggatcagggctcctgggacaccctgccgctgttacagctgcctaaagtgaggtcacccagacatccaggtgtctggtttgggacatgatgaggcataggaggccagctcaggctgtgacctccccttcagaaacacggaaaggaggaagtctgggggcaacggccctgcaagtcatgagagggaaggaccggcaggcctcggggagcaaggcaggggggcagtcagcccggccatgagtcagcctgtgtcatcagacccctgaatcaatggaaagtcggtcccgcgtggcccgcccggccaccccactgggcctggggaacttggggctgaggtgggagcgcaacagcctgactctgtctcccagcctggaggaggtagaggggtctgcccagctcccacctcttaaagtgcacttctcagtggctagtagcagaggggaacaggtttggggacccgggagctgtca

SEQ ID NO: 472302 - DNA, 1000 bp, Homo Sapiens
tttttttttttttttttttttttttttttttaagtctataagctttattgatactttgcttttacagttcacaatgcattccacagatttagttcagtacagcttaaaccacaatggtataaatcttcattttgtaattaataatttcttgcataacaatgtttgatatttgcaaacaaacaacatttttggaagcattagattcagtccatagattctgtgacaaaattaactacagtcagtctgtgcaatgaaattgatgttggagttctatgtgtgtggcatttcatgttgaaaacagatggtagtgctcctagaaatatttcttcttctagcttatgtgctttggaactacacatgtataaccaatgactgactctgaaatatcaagcactgtggggtggctggaaggtaaaggtctaagctttgtgaaacactatacatatataatctatatttacttatattggcaattaatataacagtaaaagtcacaatacacctagaacataccagaaaagcaagctttgtcattcctgctttaccggtatgatctcgtctaaacaaacatttcatttcagaaaatctgcatcaatctacacggaccatacacagtgcacaaactgaaaagggcttttttttttttttttctagctccaccatctctgcaacttgccaagatgcggcaagactatctgcaacaaagtaaaatatacaggttttttattccaccagtgcctcagatagataggaaaaagatatgattacggtttaaatccatacatagcagcttacaatacttaagatgatgaacacatggcagtcaagacaggtaatttttcctcacaacagtgcatggctaaaaataaagatctaacaacgatctgtgaaactgcactgcaacgtcaaggttcgttcttccctgaccctcccccgtataatcaaatgaatatcccctttaaagatgaactcctactaattattttgggcgttttcattc

SEQ ID NO: 472303 - DNA, 1000 bp, Homo Sapiens
tttattcaacaccctccccacccagtctccccgcccccaagggtccgacacgaaaggtccaggccctcctcgggcgcgacagggagccgatccttaaaagcaaaccctacaaataaataagcggggtcgggggcgggggtctctgcagtccagggcctacggtccaacggcagtcaggtcgaatcaattcaccagcagcgaatgctcctccgaggggtcccttccgcagcagcagagaaggctgcaggccgagccgctcccgcggcggaacttgccggaggtggggctgtcctggcactgtgcgatgtaggcctgcagctcgctctcctctgcgcctgcgccgccgggatgcttgatggtgtcgtaggcgccggtgatgagcgcgatgaagaggctgagcaccatgtagatgaagaggctgatgaaggagtaaaggtagagctgggagaagagccacaccaggctgctgcggccctgctgcgcctgcatggcggcgaacgtcacaaacatgtcgtccccattgatgagcgagaacaggcactcagacaccatggagagtgagcggaacttcacatgatagggccccagcacgatccagccacagaagcagtagcccaggtagatgacagccacgcagcagcagaagcgcatgacgctgggcagggccacccgcagtgtggcgatgaggatattgtagttgtggaagaaggtcaggtagcggatcacgcccacccacaccagcagcgtcgaggtgcccaggaggatgctgcagacgtcgtagctcgccaagttcttggcctcgatgccgatcttcatgatggtgcccgagatggtgagcacatcgctggtgacgagcaggatgtaccagccattgacaaattccagccgctcccacaggctgatgacccgtccccgctgccgccacatgaaccccacaaactcgttctgcagcaggaagcctcgaaggagtgagcgggcgcagaggaggaaggacagggag

SEQ ID NO: 472304 - DNA, 1000 bp, Homo Sapiens; identical to SEQ ID NO: 344897

SEQ ID NO: 472305 - DNA, 1000 bp, Homo Sapiens; identical to SEQ ID NO: 341519

SEQ ID NO: 472306 - DNA, 1000 bp, Homo Sapiens; identical to SEQ ID NO: 341520

SEQ ID NO: 472307 - DNA, 1000 bp, Homo Sapiens; identical to SEQ ID NO: 341521

SEQ ID NO: 472308 - DNA, 1000 bp, Homo Sapiens; identical to SEQ ID NO: 341522

SEQ ID NO: 472309 - DNA, 1000 bp, Homo Sapiens; identical to SEQ ID NO: 341523

SEQ ID NO: 472310 - DNA, 1000 bp, Homo Sapiens
tgacatttcgatctaagtggtcataaaccagataggtagttttattaaaagatttaccctaagaacactccttctattcccatttctgacatcctacccacacccacattcatcgactaccatgtcttcataatgtcgtagaatgacattgtcattattgtcctggtagagcatggaaatgggagacagcttggtggggatacacacagcctgggggatctctgggtcaacggcatgcatcagggcttgcatgaaagcataattggagctgttgagagagatggtcagtgagaagggacactctccatggcagtaatttgccatgaaccccttgggggcaatgatccacttgtgccaacccaggtcccggaagttaatgaatagctggtgacggtggcagaggttcttacaagaaagcttggggacagggatggctgctctccttttccgagaagggtggcactgatcagggttgagagtcaccaccagcagggaagcatgaagggagcatcttagtctggcacaggtgtcttcaggctgaaaattcacccctgagtctctatcttctttgaccagtatctccaggaataacccgaaatttttccgggggttgtcattccaatccttagctacatccagcaggttgaagtgaacagcaccttgtggccatgggactgaccgcaacacaaacattttacctggcttaggggtggtctggccccacacatgaggctcctgaaccaggaacagagccagttccagctctggtcccaggttatagtaagaattgggccccaagtccaggcccagctgggccaatgtcaactgttccctttctttgatggcagacaggttaaagtagaggagcttctgcaggcaggaggaagcttgggaaattttctttgggtaaagaaagaaaccttggtctgggagaaagcgaagtacattcccgcggacgcccagctcctttacgtagcataagtctcgggagaccccagtg

SEQ ID NO: 472311 - DNA, 513 bp, Homo Sapiens
tcaggagaccaggacgggcaggaagtgggcggacaggtggtaccgccgcgtccggccgcctggccggggcccccccctcctgtccagcgccaggaacatgggctggccgcggcggcgccagcgctgtgaggcgtaggtgttgtggccgttctcttcgatgcgctcccggaacctgcagtccacggtgtagagtcgcgacccgtagaggcggccccggcggttcatggccacgtagaagcctgaggacactgctttgatgaccacgacgcccacgtgtacagagcggatctccaggatgctgtcctggccgtggcgccagcgggtgccctgcacgcggccgccgggatccacgcgcaggaagaagtgagtggaggagaagaggcgccgccagcgcacgtcgccctccaggtgcgggtagctgcgcggtccccgcgacgcgctcggggttcccgcggcgtccggcgcccgcgccagcagcagccaggccaggcccagccacaggcggcggcgcat

SEQ ID NO: 472312 - DNA, 1000 bp, Homo Sapiens; identical to SEQ ID NO: 341524

SEQ ID NO: 472313 - DNA, 1000 bp, Homo Sapiens; identical to SEQ ID NO: 341526

SEQ ID NO: 472314 - DNA, 1000 bp, Homo Sapiens; identical to SEQ ID NO: 341527

SEQ ID NO: 472315 - DNA, 1000 bp, Homo Sapiens; identical to SEQ ID NO: 341529

SEQ ID NO: 472316 - DNA, 1000 bp, Homo Sapiens; identical to SEQ ID NO: 341530

SEQ ID NO: 472317 - DNA, 1000 bp, Homo Sapiens; identical to SEQ ID NO: 341531

SEQ ID NO: 472318 - DNA, 1000 bp, Homo Sapiens
ctcgagtttttttttttttttttcgagttgaaatatatatatttagatatttttcttaaataacatatttacatctaatagaaaatataactctagagataatctttccaacaaaaactgagggggaggaaggagggatgaaaggggctggtggggtgggggtgacatcagggacgggaccagccaaaaggccacatcccacccagaaataaaaatcactatgccaagctcacgctcactctctcccctgctctcctcctggacacacccacccagcattcatcttttctctttaaaaaagccttggtccgtgttactttccttaatggtgacggtcaaaaagtttgaggtcacgtccgtgaccaccaccttctccaggttagtcagggaggggctccaggactcttcctccgggtcccccaggattctggccacagggatcctggcgatgagggagggccttcccccctgggcccccatgtcccggtacaggccccccccagagctgggggggcctgagccatgtcggacccgggtgccattgggatctagggcaccctggcctttggcctccaggaaggcagccctgtgctttatcaccctggccgggaaggtgtccacagccagtttgcccgtggcctcagctgagctagggctggtcacaccacactgcaccaggtccgagtcctgtcttcgggccagctggatcacactgtggccggctggaaactttcctgccccggaaggggtgtcgtccagcttcctgcccttgaggtactctccgaggccggcgctgggttcgcctaagggcctctgtgaggggtccgggagctccttccggggcttggggcctcgcttcttcgagctgtcccccggtgagctgggcttgtcatccactctgctggtaccccgctctcgttccctctcacgttcccgctccctctctcgctccctctccctttctcgatcccgctcccggtccctatcccggtctcggtcc

SEQ ID NO: 472319 - DNA, 1000 bp, Homo Sapiens; identical to SEQ ID NO: 341533

SEQ ID NO: 472320 - DNA, 1000 bp, Homo Sapiens; identical to SEQ ID NO: 341534

SEQ ID NO: 472321 - DNA, 1000 bp, Homo Sapiens
ttttttttttcaactgaacagagtttgaaagcacattattcagggatgggaaacctgcatagatgtagggcttttcatatacacaggttccaccaggctgaccgtgcaacttgagtatgggtagattttcgtatacatgggtggtcctggaaccaatcccccgagtataccaaaggataagtgtacttgaaatagagagttgatgagttatgtttttgaatacccttcacagggtttctttctgtaatgaattaaaatcatatcaaattaaggttaagaagtcaagtttccttcttaaatttcacattaaatctaaataggttatatccataccactacttctgatacttctgctgagtatctaacatattgcacttcttcagacttcttctgaatgttctgacacatagaatgcacaaaacaaaattgaaacaaagttgtaaaaccgaattgaagtttcccttatccattaattacgatgtttggcacctgtatgaacacgttgatgctgaataaggtttgtactctgggtgaaggttttaccacatatacgacatgcatagggtttctctcctgtgtgaattctctggtgttgaataaggcatgttctctggctaaaatccttatcacattcattacatttatagggtctctctccagtatgagttctctgatgttgattaagtgatgaggaataaatgaaagctttcccacattcattacatttatagggtttttctccagtatgaatcctttgatgctgagtaagatttgcgccttgtctatatgctttcccacatatattgcatttaaagggtttttctccattatgaatcctctgatgttgagtaaggtgcacactctggctgaatgctttcccacacacactgcatttatatggtttctctccagtatgtgttctatgatgttgagtaagatttgcactctggctgaaggctttcccacatatattacatatataggatttctctccagtgtg

SEQ ID NO: 472322 - DNA, 1000 bp, Homo Sapiens; identical to SEQ ID NO: 159930

SEQ ID NO: 472323 - DNA, 1000 bp, Homo Sapiens; identical to SEQ ID NO: 341536

SEQ ID NO: 472324 - DNA, 1000 bp, Homo Sapiens
tttgcacacaaatcttcagaggtttatttgtaatagccaaaaactgaaagttacccaaacatccataacaattaagttgacaaagaagaaaaattgtggtatacaatgaaatactgaaatactacgcagcaatacaaatgagcaaacaattgattcatgcaacaagataatggattaaccttaaaatagttatgtttactgaaaaagccagagccccaccccctaaaaagtacacaccatatggtttcatttataaaattatagaaaatgcttgctgttgcttgtgaattgtggaaaacaagataaggaaaaattgaggattataaagggacaatcttttgttgtgttggatatcttgactgtggtggtttcataggtgtacacacatgctgaaacagcacattttacactttacatatttgcagtttattgcatgttaatcatacctccataaagctattaaataaatgttcctcattaaaatctatatatactgttccactaggaaagttagatctgtcaactattttggctttaccatattcctctccctacaatttaggagagtgagccctgcctcaatgttggtaaaaattggtaagcaatgatgtccacatccacctcagtcactcggaatgctggctgggtcagagaagacccatccctggatctctcttctgtcactgctgaggttcctgtctgtgcaggtcaactgcccagggagacacaggaatccacaaacatttagattatttcctctgacagtggccttggccacaggagatacagatgtctgaaggtcctgagaatttctatgcactcccatcccacaccatcataactgcaccgagacttgtggatgtcccctctagaatgttcgaatctccttttgtttgccacagtcatccccactccattatctcagtgcttctgtagcaatcatgattttcacattgccctacagaggtcttacagtcaatgttacttgcctatggggttc

SEQ ID NO: 472325 - DNA, 1000 bp, Homo Sapiens; identical to SEQ ID NO: 341537

SEQ ID NO: 472326 - DNA, 1000 bp, Homo Sapiens; identical to SEQ ID NO: 341539

SEQ ID NO: 472327 - DNA, 1000 bp, Homo Sapiens; identical to SEQ ID NO: 341540

SEQ ID NO: 472328 - DNA, 1000 bp, Homo Sapiens; identical to SEQ ID NO: 341541

SEQ ID NO: 472329 - DNA, 1000 bp, Homo Sapiens
ttttttttttttttttttgaagtcaaaaagtttatgtaaccaatcaattaaattctggaaatttcagcagcactttcttcccaaactgctttccaatcaaatcctctttctcccgtaagaattatcacagacataaattgcctaattaataaacttaattcttataggtttacgtatttatgtcatttgataaacagatgctggccaatgttaagactcctaaggacttggtattaaaaactgaaacctctcatcagaatttctatttttatatctgtgactcaccaaacatacttggaaatgtccattttccaagctgactttccagttagattttaatcttaaataaagtgtgtatgtggttttattaaacaaactgtcacaatggacaaactgcatgcctttccatgaatgtctggttatcaccctgacatcacccaatgaaaaagaatacaacacttaaaatttaatagaattctaacagtaaacattttctgagttttggtttctagtacctgcttatctagagttaataataatcacccgttcaacaattacagaagaaaaacttttaaagttaagttctaaatttgaagtatataaagaatattcctttaagaatataaagtagtcaagatttccttttactcaaaaaaaatcacttcagaggtgacctccatgtacaaaaggcaagatcaatcacatttatcactggacacaaaggatatttcaaaggtatttaaaaatggtaatttcaaaaagaaaaattaattttaatttttctaatgcattatcaagaccatacttgcttaacaagttaattatgctattgatacaaaacatacaatatttacacttaactgtacaaaataatttaatgtttacaaaaatattagaatgtttagttgactgacacagtcttaagtaatctcttctagagaagtatatagtaagaccactgattcccatttcatttcttttttaataagtcaaagaaagg

SEQ ID NO: 472330 - DNA, 1000 bp, Homo Sapiens; identical to SEQ ID NO: 159931

SEQ ID NO: 472331 - DNA, 1000 bp, Homo Sapiens; identical to SEQ ID NO: 341544

SEQ ID NO: 472332 - DNA, 1000 bp, Homo Sapiens; identical to SEQ ID NO: 341546

SEQ ID NO: 472333 - DNA, 1000 bp, Homo Sapiens; identical to SEQ ID NO: 159932

SEQ ID NO: 472334 - DNA, 1000 bp, Homo Sapiens
tttttttttatgattaatttgttttctttattgcaaaaaaaaagaaaaaagaaaaaaacatttgttcaaaagctacctcaaaagtcctcctaccaaacatgatttggcaatctttttgcatgattagtatgatggcagtaggagctttgtttaataagcaaacatgatgaaaattccaaaaggtgctatgcaaaagatcagaaggaagatgtttttcctgagaccctctgccaactgttacttcttctgatgcctttcctgcttcttgaacaaggcttaagacagcttctctgttccatttctgaccactatgtggcaccagaactttgaagtaggaaatagaaaaaaaatctgcttaactagtgatttgctgtgaatctttaatcaatgcctcttaaaaataattcatttatggccgggcgcagtggctcatttgttgtttcttatggtctgtgctatggggaaaagcaggttaaaaaacatgcagatcactcttgcccactactgtggtcccctggttggctatagatttagcagcttttctttgtgccacagcagcctccagcagcatcagggacacatctggacttcatactgtcagactcttctgcaagcttaaatggatctgtgattatatcctttaactccaaagcagaacagctccagatgttggcaacttctctccaattggtctgatcagaaaatcttgagcaaatcttgaattcttcaagatagctgctgtttcttcatccacttcaacaatttcaccttccttaaatgtaaaattggcatcaaacattagttctttttcatgtcctgtaattcctccattgtaaataacttggcatctcttggttggtcctgtcttagagtgtttgaagaggcgaaatgttgcagaaacaaaacgacagtcaccgataactctttccagttccttgttttgaattgtaatgagattggcagtgaccaaacgtggagggcagaacccaattttttgagc

SEQ ID NO: 472335 - DNA, 1000 bp, Homo Sapiens; identical to SEQ ID NO: 341549

SEQ ID NO: 472336 - DNA, 1000 bp, Homo Sapiens; identical to SEQ ID NO: 159933

SEQ ID NO: 472337 - DNA, 1000 bp, Homo Sapiens; identical to SEQ ID NO: 341550

SEQ ID NO: 472338 - DNA, 1000 bp, Homo Sapiens
tttttttttttttttttagagaacagagaagtttattttacactatccgtccaagaaaacaatcgccataaaccagtgcaaaatgtgcaacagaatcaataagtgtgtcttagctctgagagcccaaattggtgatttcttctcctgttcctcagttgggcacgtgccccatccgttaatgctggttcgcaccacagacagaaacattcaaccaatttgtagcaggttatttttacaaattcataccagaatgtgtacaagggacagggaaaaccataccgaatgaatgataagtgatcagtgcttaaagtaaatacaagggacagcacgggcaagaatccacagtttcaataaatacaagtgaacaagcatggtgtgtctcaactgggtggaattagtctgcataataattcagcatcatacaaaatctagcagggctgttgagcagtgattggcaaaaacgttcacaataacttatgcccttgagcgagtctgcatgtaacacattctgtggtttcaaaggtgtcagttctctgttttctccttccctggccatccctccaggaagggaggggtgcagctgggccggcttggcggaggcgccccgtgaggaaggacgtttgcccaagagccagtggtcagggtccagtgtactcaataccaagtggcaaattgggacttaattgacgacgtctgtgcaaagtgcgcttctctccattttccaagaaaccagtgtctgtaactcctgcatgaaaagcagtggtggcctctgggtcactccctgtcaccccaaatgccaaacaacaagagcacatctcagggactcacaagtcggggaagcttctgtttttgactgcctggcagctcatggatgggtagtttgtttaactggggcccccttgtccaaggcaggctagaactattgcttgaaaactagaaagaacctagtgagaaagagatggtgatgatggaatgagggaagttgtcttcttcctccaaa

SEQ ID NO: 472339 - DNA, 1000 bp, Homo Sapiens
tttttttttttttttttttgacatgtaagaagtggttttattccaggtgtgtgtttcataaagacgaggtcctcaaggacagctagtggcacatgctttggtcaagaagaggaaaagcaaaaacagaacagggctgcgttgccacaaaggaccggctgataagtgcagagcctgatctgaccacagcaaaggacagagagaccctcttgaaggccctctggtcagcagtcctcttacattcaacaggcgcagccccggctccccagccccaaaggtccatgcccgagtgtggcccaggccttctagtccatcctctggggagaggcctttgccctgggcccagttctgtcctaagctgtggcaggaggcttcccagatgaacaggggatctgaggctgcacctggctgcggaagaaacatcacgacagaggacaggcaaagcatggccctgggagcgaaggggcctgcgctggcaagtccagaggggtgcacttgggcacgggagtgctgccgagaggacgctggtgagagtcaggaggcgaaactgctggagagccctccagagcaggtgctgcggaccacagacacttggctgctgaccccaagggccgtgtggagggagcaggcgatggcagtttgagcacgccagggaggaagattagggggtggcagcttgggcagacagtggcttcaatccagagcagaggttcaggccctttggggatcagggacctcttttagaagccatggactttttccccaggaaaatgcatgtatgcacacacatgcagtattttagggacaatttcaagagattcctagaccctctagaatccatgaactctatgggtatgtggatccttggcctatgaaagacagggggctcctgtggtaggtatatctgccccaggctggtctgctttgtaggggagacccccagggtcctggtaccaacagtcatttgcccaagagccagtggggtgaggaagcagggtgtggg

SEQ ID NO: 472340 - DNA, 1000 bp, Homo Sapiens; identical to SEQ ID NO: 341551

SEQ ID NO: 472341 - DNA, 1000 bp, Homo Sapiens; identical to SEQ ID NO: 341552

SEQ ID NO: 472342 - DNA, 853 bp, Homo Sapiens
ttttttttttttttttttttttttttttttgcaatacagttgtatttataaaattttgtttacacacaaaaaatgtattttgcttaaaaatataatttacatatatatacaaccacacaagggaaataacaaaatgttaatactagctaatttctatagagttggcattttaagtcagaggggtattgatgaatagatgtagtttattaaatttttttctctatttcctaaactttctataaagaacttgtagtatctttataataggaaaaaatgtgattttaatgaacactccatatactttcaaagtagactaaattcaaaatatttacacttactcattttcatcttcgttgtcaaaagaaaggaggctactatttttaatttgtttttgtgagttctttttgaccgagtcctgatttacttcatcttcatttggcttcttcttttttgagcttgctgttaaacctgaatatttttcatctgagggatgcttgactggttttcgatatatgattcttccatcggctggagttggttcttcatctgctttggcagcctttatttctgctttaattttcatgacttcttcaactgacaggtctcccttttttaaaaccaccacttgaggctgttcatcttctttgtcactgtgatccccatcttcatctgggggctgaggctgaattctcttagtctctacggtgggtccctccctgtagccgacccgttccttgaagcgggccagaaacgccggctcggctggccgcacgtacgatacctggttccgcttgctcatggtagctctgggtaaagacaggttccgcgacggattcgcgacgatacagaggcc

SEQ ID NO: 472343 - DNA, 1000 bp, Homo Sapiens; identical to SEQ ID NO: 341553

SEQ ID NO: 472344 - DNA, 1000 bp, Homo Sapiens; identical to SEQ ID NO: 341554

SEQ ID NO: 472345 - DNA, 1000 bp, Homo Sapiens; identical to SEQ ID NO: 246540

SEQ ID NO: 472346 - DNA, 1000 bp, Homo Sapiens; identical to SEQ ID NO: 341556

SEQ ID NO: 472347 - DNA, 1000 bp, Homo Sapiens; identical to SEQ ID NO: 341557

SEQ ID NO: 472348 - DNA, 1000 bp, Homo Sapiens; identical to SEQ ID NO: 341558

SEQ ID NO: 472349 - DNA, 1000 bp, Homo Sapiens; identical to SEQ ID NO: 341559

SEQ ID NO: 472350 - DNA, 1000 bp, Homo Sapiens
tttttttttttttttttaagggtataataaaattatttttattgcattttgtgcagacgggagtctaaaaaagtaatacagtaaaagccataaagcattaaatgggagcattcaacaataaaggaaagaaccaaccctctccttttcatattggcacaaagaacacaagatcaatactgaggcaggatgcggcatactgaacacttacactgaaaattaaaggcaggcctaataataatagcagtaatagtaataaatactcttgatttggtttgcaacctctcctatttacaagggttttcaacttcattgcattgccctgcacatagatcatctaaaacaaaagcaacactagttatcactacaaggctattgaaatattgcactcagaataaaagtcacttgaatggacatgaaacatctaactacagtgattataaagataacttgatgaatgacttgtgataacattcataacaaatattgcacatgtagcacagaaaacttgggtttttgttgtgggatgtctgtttcatcaacggaaactttgctcttgccaaccagacaatctgggcccagatagtgcaactttggttccctaattgatgttgatacagcccccttctgcacagcccatcacatcagctctggaatattcaggcccccagaaggcaggacctggctgtggtgttcagagggaggtctactgaaggatgcagggggctggtgtctaacacctccagcttcctgattgagtacctgaaagaatctatccagtcccctgatcgaatctcagaggggacttggcgtaactggcagacctccaaacctaccccagccacacctgacgctgtctgggtggcgccagctccagctctgccttgggctcaaaggaaaagaggtggtgaggtccggattactcagtggcgccagctctgggaggtgcgtgagatgtcaagctaggtgcgcaggtcagggccctggggctggaggtactgta

SEQ ID NO: 472351 - DNA, 1000 bp, Homo Sapiens; identical to SEQ ID NO: 246541

SEQ ID NO: 472352 - DNA, 1000 bp, Homo Sapiens; identical to SEQ ID NO: 341562

SEQ ID NO: 472353 - DNA, 1000 bp, Homo Sapiens; identical to SEQ ID NO: 341563

SEQ ID NO: 472354 - DNA, 1000 bp, Homo Sapiens; identical to SEQ ID NO: 341564

SEQ ID NO: 472355 - DNA, 1000 bp, Homo Sapiens
tcactgaggtttttgagaaggccgtgcagaggtttgcatgctagaagataacttttttgaggatttctctgcagactgcctgccacccggagacgagggaactccagagtctagttgggaagacttggatttgcgagcggacagcagggaatgtttggcagaagcagggtccttggtgacaagctgctcttttcccgttgtatttgcatttggctgctgggaagctggaggctggtggcctctctctgcctcgtcgtccccggtgttcttacagacagacttaacagagctcccaccagcctttttagagagcaaggctgtcttgccaagatccgtcgagcgccgggtttccttctgtctcaaggctgatttgaagaaggacagccccttgtcctcagacttgctgtccctcttcaaaccagacttgatgcttgtgctgggggagcgcaggctggccatggaggagctccgcacgtgcttcccggcccccctgccctcccctgctcgggcctggctcacccgaggggaattgggtttggaggtggaggtggcgctggctctgtcagaacccaagctttgtctggagccctctctactcaagctgtggtctgaagtcctgctcttcccaggtgggaaagggctccttgtggcagggcccgaggcctttttggcagatgtggaggaagcagtgtaggtgagggccgaggctgacttctgcttctgtggcgaaggagatgacacggagtcctgagatttcggggatgactcctttttgggttgggcaggggcaggggatgaatgccgtccactgcccctggaagaagaatctgctttgctgcgggagcgggagggctttagagagacttttacaggaagaggagaagaaggggatgtacttgaaagggatgactcctggcttgccaaggctggtctccccttccgcaagcttttctctggctcagaagtgcctttggaactgggggatctcttagttgtgctc

SEQ ID NO: 472356 - DNA, 1000 bp, Homo Sapiens; identical to SEQ ID NO: 341565

SEQ ID NO: 472357 - DNA, 1000 bp, Homo Sapiens; identical to SEQ ID NO: 341566

SEQ ID NO: 472358 - DNA, 1000 bp, Homo Sapiens; identical to SEQ ID NO: 341567

SEQ ID NO: 472359 - DNA, 1000 bp, Homo Sapiens; identical to SEQ ID NO: 159936

SEQ ID NO: 472360 - DNA, 1000 bp, Homo Sapiens; identical to SEQ ID NO: 341569

SEQ ID NO: 472361 - DNA, 1000 bp, Homo Sapiens
tcactttcctaaagattttaattcctcaaagagaaatgctgtcatgcttgaatagacttaaggccagttttcatttaagaactgttgggatattttacaaaattcaggataggctcctgcgtatgctgcacacacacactagcagactgcgcatgcacagctctgcaaagagtgtgtcttaggacgggctccggactgaccaggcgcagggcagcccagccaccgacgcatctgagcgtagacagacagatctgagcttggatggtggtcactgcgctatggcaggaatgtgcaccccgaagcttggggcgggaccagcgtggccaaggcacttttgggcaacatcccgggcaccattccctggctgtgagtagcccactggggtgagtccaagggctcccgcttgaccacaggggcggcctcagcagctctgcaggtgcaggactgttcacctcggccccgtgcacagagctggtggggaggctccgactggggaaggccgtctgtgggctccaggcaggcacagtgtgcagggtggaaaggggtcagctccctgctgcgcccagcagtggccctcccatggggctgagccccccgcacgccgtgccccaggtgcgagatgtacacctgttgccgagagtctggctctgttttcaggtgcatcctggtagggaaggtggctgggtggctcctgtcactggcccccagccacacctggctgggcacacagccgtctgcagcaccctcacacccagagtccttctccatcttgatggacacatctagcagcagcgtcggaccacacaggtcccccggaggcatcggtacaccttgcagcttcatgtcctccatgggatagcccctcgtggcaaaacgctgagctccaggctgagggagctggtgctgcaggctcctctggggaaagtggcagaggggagggtgcacctggtcctcaccgacatcccgcatgggtctgctggtccggctggagtaggcactg

SEQ ID NO: 472362 - DNA, 1000 bp, Homo Sapiens
cataagcaatccaaagccgcttgcttgtaggctacatttgtgattagaaaggcggagtctcgcctttccaaacactcagggctcagtccggcatttgagcgagtccacattccctgagcacaccccggccgggtggtggggaggtgatgtgggtgttgcggggtagggggggacacgaggccattgacagggagacgaaactgtccctggatgtaaacatcaccatggaaactccacaaacacttgccagtgagattctttccccttctcccaccctgcgcacaggaaagggagcatgcccacccccacctagaccgtgctctccatcacccattcggagctgccaaaagtcccccgggcccccaccaggtcactctcctcaaagggcaagagcatgccgttgacagagaggctgcgcttcgtccagatgttcgagaccttccgaggaggactgtagccgcccggcacgacccctcccgccgccgcagcagcaaagtcccccatgtcgaaggagtggctgcgtttggccttgccctccaacggcaaggggagcaggctcctggcccgggccgcagggggccccagcagtggctctcggtccgagtggtggccccgggccgacgtcccagcccctctcccggctggagtcctggagtccagcagctcctcctttctctgactcttgaggtccagggaggcgaaggcccccatcaggcggtcaaggctgggcttggggcgcggggcggagggtgggatcctccagggggcccgtcccagccccgcagcctccccactgcccagggagctggaggaagaggagtcactggcgcgggccaggctggcggtgaagtccaggagctcgttgcgcaccaccaccttcggcgggccctgcggcggggccccggctggtgcgctgcttggaggcggtggctgggcgccgttggtctgcgagtacacattgctcacggccgctgccatcttgctgggggcctcgtggttg

SEQ ID NO: 472363 - DNA, 1000 bp, Homo Sapiens; identical to SEQ ID NO: 341570

SEQ ID NO: 472364 - DNA, 1000 bp, Homo Sapiens; identical to SEQ ID NO: 246543

SEQ ID NO: 472365 - DNA, 1000 bp, Homo Sapiens; identical to SEQ ID NO: 345040

SEQ ID NO: 472366 - DNA, 1000 bp, Homo Sapiens
ttttttttttttttttgtacacaagaacttatgtttattgcaaacaaacaaacaaaaaaaaaaggaaagagaggaaaagagaaaatggtcagaagcacaacatataaggttaagaatttaaaagcatcttacattctgccctaatggcagcataattaatagcaacaaacggccgtcttgctgcctgccgcagccggagggtatttttgcagacctgacgagcaaattttgtgaaatatgtagtatgaaggaagaaagcttggcgggtcttcactgcagactttggactcccagtgtttcggactggcattccctgcatggcctggcgggacacgtgacttctaacacgagggtcctctgtagttgggctaggagataacttctcttcttctgactgggtgggcattttcaagcctccatattttttccaataaagccaacaaattgcacataatctacactgcatattaggtgggccccaagaataccactggtgagactgtgtagcatagcagctctcacaggctctccctaagagaggattctgaggctggaacgtggtccccacagctccattcacagcaccaggcttcccattactagtggatatttggttgggatttggtttgctgtaggttgggatatatacttgtttcagtttactctcagcttctgctgcttttagacgtttctgttgcacatatctgtcagtagttttccacatgtaataatattcaatgatgctagtcaatgatttccaaggaagaaaatcttgccgtatgtcattgaagtctttgccatatttttccagtgcctcttcaaataagctagcttcagaggctgaccattcctccatttcatctctgcataaaacaggtcctccgagtggtactaagacactaatggcactgctcaaatcatagctgtgtctatacaatgtatccatagcgtgaaacaaggtgatgtctcgggaagctgcagcagcactcatatgcaaact

SEQ ID NO: 472367 - DNA, 1000 bp, Homo Sapiens; identical to SEQ ID NO: 159937

SEQ ID NO: 472368 - DNA, 1000 bp, Homo Sapiens; identical to SEQ ID NO: 341573

SEQ ID NO: 472369 - DNA, 1000 bp, Homo Sapiens; identical to SEQ ID NO: 159938

SEQ ID NO: 472370 - DNA, 1000 bp, Homo Sapiens; identical to SEQ ID NO: 159939

SEQ ID NO: 472371 - DNA, 1000 bp, Homo Sapiens; identical to SEQ ID NO: 159940

SEQ ID NO: 472372 - DNA, 1000 bp, Homo Sapiens; identical to SEQ ID NO: 341577

SEQ ID NO: 472373 - DNA, 1000 bp, Homo Sapiens; identical to SEQ ID NO: 159941

SEQ ID NO: 472374 - DNA, 1000 bp, Homo Sapiens; identical to SEQ ID NO: 159942

SEQ ID NO: 472375 - DNA, 1000 bp, Homo Sapiens; identical to SEQ ID NO: 341580

SEQ ID NO: 472376 - DNA, 1000 bp, Homo Sapiens; identical to SEQ ID NO: 341581

SEQ ID NO: 472377 - DNA, 1000 bp, Homo Sapiens; identical to SEQ ID NO: 159943

SEQ ID NO: 472378 - DNA, 1000 bp, Homo Sapiens; identical to SEQ ID NO: 341584

SEQ ID NO: 472379 - DNA, 1000 bp, Homo Sapiens; identical to SEQ ID NO: 159944

SEQ ID NO: 472380 - DNA, 1000 bp, Homo Sapiens
ttttttttttttattactttttccataatagcctttaatactaaaatgcattaaatttttgaagcagagaaaacacatttaaagggggaaacagagaaccaccagataaaaggaaacaatgtggcagataacaccatttgaaacataactgtaataatttaataaagctgctttatcatcttcataaaatagacagtggtgattcttttttgtcttttttctttttacaatgattcaatcactgtgaaaatgtacataacatacagatcagcatatacaacaattttatcttcatataatcagcaacagagactgcttaatgagacatactgtacttgcatccctctaaatttccaccctggtttgacaggtaaacagtaatagtgtcatcaggctcattcccctcactagaggagcgaaggcgtaagcctattgcaactaataccttagcattcaaatagcacaaggaggtatttgttgctgatttctagctcgagctagtctggctcttggtcattaaagtctgtatcctagccttcctcagctgaacgccagccagtgccagtaaaaatctacttaaccagtgctgtaatggtgttagctggtttgtttgctaaggttgacagcaactttcagttagtaacaaggtcatcttgaattgccaacacggctggagcaacagtcagcatcatcagttttccctaatgacctacaatgctttccaatcaagatcaggtgtttgtgggttattctttaccaagagcgccttccaatctatgtatcagacaaggtggtaaattttctttgtttcacaaaagcaatatgattcctatttgaaattaattcacttttgcacaacaagtgacccacaagccaattccagcggcacaagaaaacgaagagagctgcaacaacttcattaggacaatgtgttttgctctggaatatttcattatcaatataaagccacccggtcccagccccacccccaaacatcccc

SEQ ID NO: 472381 - DNA, 1000 bp, Homo Sapiens; identical to SEQ ID NO: 341586

SEQ ID NO: 472382 - DNA, 1000 bp, Homo Sapiens
cttttttcataaatgaagtttatttacttttataattacaaatgtaacacatgcttactgtagagaatctgaaatgtatagagaagtagaaggaagaaaataaaaactacccataaccccaccacctgaaggcaaacactgctcacattatgttctagctatctatgcctgtttatagaccaagaccctcatcaagagtgctggccatgaagcacaacagccaaggggagtgagagcaatcaacaactgagggggtcacccagaggtcagagctagagaacccccactgagggacaagacaaaggccataaacaacagatcaagaggtcagaagctgacaacacaagaacaagttgtgttactgtaagaatgtagtgagatggtgcttgtcaagagtttagcccaatgcctgtcacatgatacattatcaataactggtagccattatactatcactattattatgggtcaaaacgaatggttcaggatggatactataaacagggcaaggaccctggagacccattttaggtgctatgagttggggcatatggggcaagtctactgggttacaagggtggtataggagtgggcatcgctctccttataggctcccctgccaggtgaaatagaaccagggcttcctcaagtttgcctgctgacacatggcaagatacgctaagggttttttgaggtaagatatgatttatcctgcctagacttctccctggaccaagaactaggactggcctcggtggtgatgggagttcagaacctcatacaccatacactcttgtagtccatactctgattgtcagggcaggtcttaggcatgtgggtgaaagagaaggtcaaatcagccaagtgagaggtaaggtgggatgtgcctggagcgggaggctgaagggtgaaggcaacaaggtttataatgtagtttaatggaatgggtccaggaaccagtcctccagttagcggtcgagtcagatatcacaggagaaga

SEQ ID NO: 472383 - DNA, 1000 bp, Homo Sapiens; identical to SEQ ID NO: 159945

SEQ ID NO: 472384 - DNA, 1000 bp, Homo Sapiens; identical to SEQ ID NO: 341588

SEQ ID NO: 472385 - DNA, 1000 bp, Homo Sapiens
aactcttaagatttttttttaataagtgctctgtaaggaattgtgtgaggacctaaggagaaagattgcaacaaatagagttaagtgttaccaaacagcacaaagagatttgtcccaaagtcctgcttgtacctaggcaattaagtctattaacctaatgcccccaaaatactgacagttaatatgatggggcactagggttctcagaaagttaacagacattcctaactacatacctctaaccatataatcaaggaaatttcagtggagaaatcaaagtgaaatgttgcattgtttcatttagaagtgagactctcaaaaacctttggacagacagagaagtgatacattctttttggcttctctgaacactgaggcctgagggatatggaaggaaattagaaaagcaatagctttctaaagatgtttaatcaagtgttgcttctaagttaaaaagcccaattcaggtggggtctgggtttgttttttgttttttccttttcaaatatatactcaattcaacctctgtatgtcacaaacccagaaagtttcttgtgagttgtgagacggaagaactttaaaattccaggcaagcaaaatggacatttaaaaaaggggactagagaggggaatctggccctaaggcgacaagtggttacacaaggcaattgaacacacagcagaactttaaaacctgtaaaacaaactggagccttttttccctttaatcaaccttatatgtctttttttttaactttttgaaaatttttatttaaaaaaacacaaaaacacagacttttttcacttcagttatgtggtatgttgcattttccagtttgttcaatgctttaaagctcaaggatgcctctgctttcaattgtacatgggcctgaagcatcctagcttttggcaagcaggcaggagactcaacaaaaatcaaaataggaacaaggcagactaaatgcagggcacatctgtaaacatattatacatttgaaaa

SEQ ID NO: 472386 - DNA, 1000 bp, Homo Sapiens; identical to SEQ ID NO: 159946

SEQ ID NO: 472387 - DNA, 1000 bp, Homo Sapiens; identical to SEQ ID NO: 341589

SEQ ID NO: 472388 - DNA, 1000 bp, Homo Sapiens; identical to SEQ ID NO: 159947

SEQ ID NO: 472389 - DNA, 1000 bp, Homo Sapiens
ttttttttttttttttttttttagccatagagatgatttattaacttgaaatctcatacgtacataaacatttgctcatattcaaaatacactctgagctgaggataaatcgtgagttggaaggagtccgccacagcctccatctctcttagcagacttcgtccagctctgccccatcaggcctctcctctcccctgattctctggccagaagatctctattatgaacttggtgccggaagcagggacaagtgaagagtagctctgagggagcagaaagagtccctctctccccatgacatttggggtgctctagaaaagtccccatcatggggatcaggtttggataaacacaagtttgcctcctggaaagcggactgttagcaaaagcttttctatgattcactttggttctctgcatcaagaactgtgggccttacttagggagttcaaaggacatgctgtgtccttttccattttgtaaacattgattggtttttctctcacaggagttgggcagcagggtgggcaatggtgaggcactatccgcaacgccctcggcatgtgtccagtcttgctttgggaagtgtctagaggctggacgagcaaatcccaaccagtcaagggtgggagacttgagacggaggaaaggcagattcctttgtgccagatcctttctcttgggatagtctgcaacagctttgaggctctgtaacaacctttcattcatatgtatgtatatatttcaaagtaaatttaaatagattaaaatgttaacatgtactattcaattaataatgaagacattagattatatacaaatttacatcctattgcccttgcaccaacaccaacaaaatgtccattaagttagaaaaaggcaactggtgatgagttttgcatgtgaaaaatgtattggttgatattctgctgaaagcccatctctgcttttccaaattggccattcatggagaggcaaagaagcaataaaactccactct

SEQ ID NO: 472390 - DNA, 1000 bp, Homo Sapiens; identical to SEQ ID NO: 341591

SEQ ID NO: 472391 - DNA, 1000 bp, Homo Sapiens
tttttttttttttttcttcaatgtttattattttcgtattttttcacttaatactacataaaatctaagatctcagctcttggaatacagaaaaatagtttcaaagtgtattttagcaaaacaatttataatgaaattagcatttgtgaattaagcatgtcaacattactgtgttgcttgttaggcacactgcttatttgtacagctttatcagtcagttccatcatttcaatattttggcccaccacaccactttgaaacatgtaatgaagggcaagttttataataaaaaaaacaacttggcattactcaacgggaagtcagtacatgttttttgcaaggagaacaacataactgtttaatgatgctgtcttcaatatactacctaattctgtttatgcaacttctcaccaggtaattgttttttatggtcagttttgcttttctttgtccccctagtcaagggagagtttgttagtgttgttatctggaaatttccttcatgtcgaataaaaccaactagattgactcataatataggtgttttctctagtaccatttacacagaagacaaaggtccccaagacattatggcagatcattaaaactttcacagatatagataccaaagaggcataagcttttacaaaagtaaaaaagatgtgcctgtctatatacatatgcgcgcacacacacacgcacacaaaattaggtccacaaggtatgagaggttgtttttagagatactggtttctggatccaactgaatgagaaatatcaactagatattgtttaaatatcaactagatccagcaacttaggatctacctggaataattcgttggtgggaaaattctagggctcaggcagcacagaattagggggaaatgagaagcctccaaaagagagtttccaaagttaggtgaagtctgaggagtcaacaggtgattctagaactaaagcaaatgaaagtgcaaccaacaaatcacagtaaggggct

SEQ ID NO: 472392 - DNA, 1000 bp, Homo Sapiens; identical to SEQ ID NO: 159948

SEQ ID NO: 472393 - DNA, 1000 bp, Homo Sapiens; identical to SEQ ID NO: 341594

SEQ ID NO: 472394 - DNA, 1000 bp, Homo Sapiens
ttttttttttttttttgggcaaaagcagcaatttattcatgtcttacaaacatggtcttacaaacatcatacagagctggcacaaaagaacagacactgtctcacacaccatgcttccttccaaaacacttctattgagttacaacatcagaacaaatcaattactgagttacacagttcttcaaacatgtatacctccccatttgggtggtgagattggctaatcagacaaacaattaatttacatgtttaatacagtgcaggatttgtaacaggattcaagatattcacattgatattgtaatacattctaaaacagtacattttcagaaatgatgaaattaggtattaagatctccctgcctgtttcaattcctttgttgtttcttttctcttttctgaaaaccagttgcaaatagttttactcaacttttcacactcaaaaacactttaaattttaaaagctaaaaactatttacaaattatccattttaattttaaaaatgtttgttgttggtttcattgttccatgttaaaaaaaaaaatcggcctcgtccaacaaccatacctcagctgctaccaccattaacttctggctgccgtgaagaatacttagaattggccccttacaacttttcagaggtccaacatatattctgttccacggcccatgataccaaatgcacatacataaaatggccatttgacttccccaaactacacacctactacagttcatttcatgttgctttcacagagatgccgagtggagcaagatgctgtgaggtgactttgtagtggaatgaagacaatgattgggaaatatgcttttttaatcccaaagtcattttaaagcacaaaaaagaggttgatttttaatctttgtacatacagaatgtaatacattttctttacattaggcatagtcataaaaagcatgtataagttgtttggaaaatgcatttttcatagaatttacaaacactgtgatatcaaacac

SEQ ID NO: 472395 - DNA, 1000 bp, Homo Sapiens; identical to SEQ ID NO: 341595

SEQ ID NO: 472396 - DNA, 1000 bp, Homo Sapiens; identical to SEQ ID NO: 341596

SEQ ID NO: 472397 - DNA, 1000 bp, Homo Sapiens; identical to SEQ ID NO: 341597

SEQ ID NO: 472398 - DNA, 1000 bp, Homo Sapiens; identical to SEQ ID NO: 341598

SEQ ID NO: 472399 - DNA, 1000 bp, Homo Sapiens; identical to SEQ ID NO: 159949

SEQ ID NO: 472400 - DNA, 1000 bp, Homo Sapiens
tgaaagcacattcccagatggagcaattttatttccaaacatgattcagaatagatagatgctttgctacctccacactggattttcactttataaaatatatttgctattaaaatcattcataaaatctaccttccccttcgtagtgggaaataagcaaagtcaaaggttaaaaggtcatgcataaaatagatccaccaagataattatataatagtcttaaattcttcacaaatcaataaaacattaatttatacttcactatacagcacttcaaggtttttctttatatattaatgtttatatttcacagacaattttacaaaaagattatcatttttttcataaaataggaaaagaaagccacagtactaaaaaaaaaaaatcaatctgcagagtgtaaacattttttataagaatacaaactaaaagaacaatgaaactcaagtacattatcagaaacagtggttgacctcttttttcctttactcccttttcatctgagagagccttttagagatccggaatcatttgctgtctgcaattactataggctttggctcacaattctggggaaaatgccaattgaaggaaccctgcctatacattttattttctttttcttcgagacagacaacctcaaaataaggtccaaatattggttccttcaaatggtgtcaaaaagaatagtattatatgaggaggatagttatcacagaataagaactaaaatcccattttttttttttaggaaaaaaagaccttcgatgatgcaggtgtctgtgtataaggaactatgacctaccaaaaaaaccaccacataaggagaggccaatataatttgccagtctgacaagacagttggtattataagtggaagagacctcaaggatcacataattcagctctttgattttagagggaggaaagacgaggcccagagatgggaagtggcttgcctaagtacattagcaagttagcttcaatggttatttttata

SEQ ID NO: 472401 - DNA, 1000 bp, Homo Sapiens
gtttctgatggagagcagaattcataaagagcttgtgtgtgcttccgtgctccgaaattatatgaaatccattttgagaagaaacttatttgattaaaaacaaaaacaaaaacagaaacaaaactgcaccaatgcacagccagaggctgacaattaaaactaatacataaccacatgaacatcatatttatagagttaacattttttaaggatggtcagtgctaacatatagtattatacatttggcactaatgtttgccattggtccagcaattggcaaaatttgtttctatgtataaatttatttttgaacattaggtctggctagacgtatcttcactatttataaaaaatatttagacagtaagctcacgttgaataactaggtctactgtgttctggaaactcttcagtagtaatacagctttttcatgttccatatgtacaaaactgtgtccatttgcctgaaggatcttatcaccaggctgcagtaggtttgatgctggcccatcaggctgaaccctagtaacaaagatacccttgtcagaaggtttgaatggatttccttgtccactaattccaccactgatactaaatccaaggccaggattcttttctattctcacacaaaactgctctggatatccatccatactcctttgccctttagtttgaattaagcaccgtccaggctgaggtccccgggtggcctgtgaagaggggatctgaataggcaatggtgactgaaattgctggatggtcactttgtttatatttccttcatacggctgctgctcccggctgcgatgctgaaggctttgggaccccatcaacgtctggatgtggctgcctgccttcttagtaatggtgtccggaggtacatcccgcctcccaagtggataaggattccattggccactaggagatacatcttcttgtccattgtctaaaatgttgctttgctgggacggggttttctgaagaggtagttcttgatgat

SEQ ID NO: 472402 - DNA, 1000 bp, Homo Sapiens; identical to SEQ ID NO: 159950

SEQ ID NO: 472403 - DNA, 1000 bp, Homo Sapiens; identical to SEQ ID NO: 341601

SEQ ID NO: 472404 - DNA, 1000 bp, Homo Sapiens; identical to SEQ ID NO: 341603

SEQ ID NO: 472405 - DNA, 1000 bp, Homo Sapiens; identical to SEQ ID NO: 159951

SEQ ID NO: 472406 - DNA, 1000 bp, Homo Sapiens; identical to SEQ ID NO: 159952

SEQ ID NO: 472407 - DNA, 1000 bp, Homo Sapiens; identical to SEQ ID NO: 159953

SEQ ID NO: 472408 - DNA, 1000 bp, Homo Sapiens
ttttttttttttttttttttttttttttttttttttttttttttttttttgacacagttctggattttatccacagtcatacaatcacaactgatatatatatatatttgtatttatatacctttaaattacacaatcatgtacaaaacaggtgcattgctgagaccacagcacttctcggagtttcacaagtgtcggaactaatggagtcaggaagcctagggcggcagacggcgggcggtggggcagccctggttccttgcagaaccaggccgcagaatggtggttaactggggacaaaacacattactcgccgagccccaccagggcgggcccgtgcagcatcgtgggtgcaggcaggggctacaggaggaggccgtgggcatggcaaggggcgtggcccccacactcggtgttgagtgccctgacaccagcactggcaggtagggctgggccctggagctcagggggacttccaggtaggagaccctcccgctctggggccctgaggacctggggactgagagagtggtcccaaacagggccctggaggtggctgctcaggacggagggggtttcgagtccctgccctggagtgggcagctagagtgctaagagggacaggctggagtccagctggggctgcagcccctcccaggtgctgggaagccgctggcacagagagggggagcccaggccccaaggtgcagattgccagcttcccacctttccaaggtaagcgatgagggacagaggcccccaaccccaactcctgcctggggaaaggctggagagagaggcttctgcactggagctgggaggactgcaggcttccaaaagcttgcttcaggctctgaggagcccaggacacacctcaggctgcagccgaagctcggagaccagacagtgataaggaagggggtgctgacggcaggaaggaggtctgcctgtccccggggtgccatcgcccctggccctgagggaggcctgccccagctca

SEQ ID NO: 472409 - DNA, 1000 bp, Homo Sapiens; identical to SEQ ID NO: 341608

SEQ ID NO: 472410 - DNA, 1000 bp, Homo Sapiens; identical to SEQ ID NO: 341609

SEQ ID NO: 472411 - DNA, 1000 bp, Homo Sapiens
ttttttttttttttttttggatggttaattctgcagaatggcattttatttaacagacagcatggacttcatacatatccattatcagtgccttgaaaaccaaacaactttaaaagttagcagcagtttctgcaagtacaaaaatacacatttattacataacatatggtagtaaaatttgtcaagatatattatacaaactcaaagcattttagataaagcatcagtctaatatattatagattgatggagtataataaaatgacatatagtctgtcttcaaatcatacaatataatactttacagcaatattaacaaactattcacattaagaattacaggagtatctaagggaacacagatagtaggaatggttattaaaaaacctcagcaactattttcttctatgcttcaaattgggtgaatgattttttacctgctaacatgaaaaaaaaaaaaaaggcaatttcttccagaaagacactccaagccgttaagagcttcattcacatcttgcagttctgactgacagtagtatgccctaagggaaaggggagtccctgctgactttatatattataccaaaaaagaggcatatggacacttagaagtcttaatatgtaggactggttagttataaagtgaaatcgacttcacatctgtgactcagatggccagtgtcacgaagtagctctttggatacagagttctaaaagatcattgtaatggttagcgcaaacagggccatgtccccaagaggtaggtagcacctatagctaatactgaaataacttcttctatcttagagaaaatattttttcccctataactgaaaatgcaacctttagaacaaaaaagaaagaacatttgatatgaccattttctggtgattaataagacaaataatttggaataagctagcttgtgagagaaaggtccatctgatggtgaactaaagagtttaaataaatgggctcagagcaacttcttataggttag

SEQ ID NO: 472412 - DNA, 1000 bp, Homo Sapiens; identical to SEQ ID NO: 341610

SEQ ID NO: 472413 - DNA, 1000 bp, Homo Sapiens; identical to SEQ ID NO: 159954

SEQ ID NO: 472414 - DNA, 1000 bp, Homo Sapiens; identical to SEQ ID NO: 341611

SEQ ID NO: 472415 - DNA, 1000 bp, Homo Sapiens
ggtagggaaagaagttttattttcaagcttttaagagaatattacaaacaacagagagttttaaaaaaccctaaaaactagtttaaaaaagtacttgacagtgtccttttaatacccatggatgacgcgaccactgtgcagtgacaaccagaaactttgcaggtgaacacccagtggccttccctggcagggtccccagagcgagcaggaggggtccaggggtagtgctccctgccaggcacccttgggcccacctggctacgcgggaaggagcagggagcacaaagcactgagcatcagcctgactgcctctttggggagggttccaaacagggagggttccaagcagcaaggaatacttagattgggctctactccactccttggggcacactggtcaagctcctcccaaccactgcagctgctctcttggaagcccgtaggtcaggggtgccctaccgtgaggggactgggtctgtgcatgtgccaagacaagaaggggctggcattgcacatgtcctggccatggtggggttgggtagttgggaaagttgctccgggattgacagcttccaaagctgaagccacagcagcagaactgtgcttgaaatatccactggaaatctgtacttttctctaggggtgtgtgtgtgtgtgtgtgtgtgtgtgtgtgtgtgtgtgtgtcctgtaaacatctttgaaccaaatcactataaaataaattaacaagggcacagaaggacacccttttccaaacctaagccctcttttagcccacctgaaatcgggagttccatttggaagttccttcaggaaggagacacactctccctctggctgctcacaccagcatatccctccctgaggatccctccctgaccatccaccccaccatccccacagccatttgtcagcgaatcttgctcatccaaatgagcccaggagccccaaaggcagtgtgtccctgccagctcacccgtgcctcctccttttctggctg

SEQ ID NO: 472416 - DNA, 1000 bp, Homo Sapiens
atcttaaaagcagtttattgggcagcttaatgtggagtggccttccttgggccacagaccagccaggggtgggcagtgcaggaagacctgctgtgggacccctgtgccaccccatggggcagggcagtgcttaggaagtggggccagtcagacagaggcacagttccttcccagctgatattgagcttcctccacgtggcagctgctgccctctccatcagggctggtgaaggccgtgaagcaggtctcaggctttgaggcaaagaccaacactggtgggcatgggtgtgggctctgtggcaggtgagcagacggaaacactgatgtggtatgaacagctggagcaggcctctctaaggaggactatacagcctccgaggggctcctgcccagggcagaggtgggctctctggggaacagggaagggaatgtgtcttcccagggctgagggagccctcaggccccggagcgctgtgtggcaggtgggaggagacctggttggggctgccctgggagggcctggcagtctctacatgcctataaggcaggcaatggcaagcagctgtgctcacagaggctcactgccaaagttgcttttgcttttcttacgcttggccttggtgaaagggatgtcgagggactcgaggcggaagggccggggctggggcatttcaggggcctgggtgggtgggatggcagagttgttgctgagtgggcagctgaggcctggtggcgagttgtgatgtgtgaggctcttcctggcgtctgtgctgaggatctggctggcccacttagatcggaagtagttgctggcaatgttttcactgttgctccgactgagcatgagcctgtagcggtcctcctccatgttcggctcgccattgtctgctgcagaggttttgcgggctggtttgttctgtggcccagttgaaactgctactgggaggctggtttttgtgatgacgggatgtgggatcttccagaagccgttatcttcgtc

SEQ ID NO: 472417 - DNA, 1000 bp, Homo Sapiens; identical to SEQ ID NO: 341612

SEQ ID NO: 472418 - DNA, 1000 bp, Homo Sapiens; identical to SEQ ID NO: 341613

SEQ ID NO: 472419 - DNA, 1000 bp, Homo Sapiens; identical to SEQ ID NO: 159956

SEQ ID NO: 472420 - DNA, 1000 bp, Homo Sapiens; identical to SEQ ID NO: 159957

SEQ ID NO: 472421 - DNA, 1000 bp, Homo Sapiens; identical to SEQ ID NO: 341616

SEQ ID NO: 472422 - DNA, 1000 bp, Homo Sapiens; identical to SEQ ID NO: 159958

SEQ ID NO: 472423 - DNA, 1000 bp, Homo Sapiens; identical to SEQ ID NO: 341618

SEQ ID NO: 472424 - DNA, 1000 bp, Homo Sapiens; identical to SEQ ID NO: 159959

SEQ ID NO: 472425 - DNA, 1000 bp, Homo Sapiens; identical to SEQ ID NO: 341620

SEQ ID NO: 472426 - DNA, 1000 bp, Homo Sapiens; identical to SEQ ID NO: 341621

SEQ ID NO: 472427 - DNA, 1000 bp, Homo Sapiens; identical to SEQ ID NO: 159961

SEQ ID NO: 472428 - DNA, 1000 bp, Homo Sapiens; identical to SEQ ID NO: 159962

SEQ ID NO: 472429 - DNA, 1000 bp, Homo Sapiens; identical to SEQ ID NO: 341624

SEQ ID NO: 472430 - DNA, 1000 bp, Homo Sapiens; identical to SEQ ID NO: 341625

SEQ ID NO: 472431 - DNA, 1000 bp, Homo Sapiens; identical to SEQ ID NO: 159963

SEQ ID NO: 472432 - DNA, 1000 bp, Homo Sapiens; identical to SEQ ID NO: 159964

SEQ ID NO: 472433 - DNA, 1000 bp, Homo Sapiens; identical to SEQ ID NO: 341628

SEQ ID NO: 472434 - DNA, 1000 bp, Homo Sapiens
gctgctctcagtactgaaagagttaagaaaaggaagcagccaaggattgctcgtttaaaaaaacctcatagaaatcagattgagaagtagaaaggcgtagaaacgtgggcgggcggccttgactgatggcagggagcggaagaggcggccaggcccgtccagcccgtggcctgaggctggaaacaacactggcctgggctccaggcggggcaggcagacaggtgggcagggtccggggtgcagaaattaagatacagcctttctctcctgcttgcacgaggctctgccgcactggagccttcagtgtggttgtaggtcctgggtcagcaggtactgagtttcatgcatgtcaacggggctgtagccataggaggtggtaatgggtctccgctctcaaaaatcagtgcaaaaccagtgaggttgaacagttgagaaactcgagttaacaagatgcaggctggacccctgttggagctgctaccaaatgggaggggacctgggagtgagggtggccagtggatggggaggtggcaggctgcgcctgggcccacacctggcaccaggacacttggagatccacacagggcaaaatgtctgggagaacctcccgggccagtctgagtgggaggttctggtccctctgccatcctggggctggtggtccctgccagcttccatgacaagccggacccgtcaggcccgaggacgtgaggcagggcagggagcactgtgtggtgcggcccgtgtcctccacaaggccctgggacaatctcccaggcccacgtcagtgcgtgtgcccaggccaggcctcctggcggggctggccaccctggcctagcaccatggagaccccgcgctgcactcacggtgccctacttggggcccgcggctgcccccggctccaggcggccagtcatggcgcggccccagcagccggccgccacactcatgctgcgctggccccgctgctcgccatccgcctggctctgtgtccgctcgt

SEQ ID NO: 472435 - DNA, 1000 bp, Homo Sapiens; identical to SEQ ID NO: 341629

SEQ ID NO: 472436 - DNA, 1000 bp, Homo Sapiens; identical to SEQ ID NO: 341630

SEQ ID NO: 472437 - DNA, 1000 bp, Homo Sapiens; identical to SEQ ID NO: 341632

SEQ ID NO: 472438 - DNA, 1000 bp, Homo Sapiens; identical to SEQ ID NO: 159965

SEQ ID NO: 472439 - DNA, 1000 bp, Homo Sapiens; identical to SEQ ID NO: 159966

SEQ ID NO: 472440 - DNA, 1000 bp, Homo Sapiens; identical to SEQ ID NO: 341635

SEQ ID NO: 472441 - DNA, 1000 bp, Homo Sapiens; identical to SEQ ID NO: 341636

SEQ ID NO: 472442 - DNA, 1000 bp, Homo Sapiens; identical to SEQ ID NO: 341637

SEQ ID NO: 472443 - DNA, 1000 bp, Homo Sapiens; identical to SEQ ID NO: 159967

SEQ ID NO: 472444 - DNA, 1000 bp, Homo Sapiens; identical to SEQ ID NO: 341639

SEQ ID NO: 472445 - DNA, 1000 bp, Homo Sapiens; identical to SEQ ID NO: 341640

SEQ ID NO: 472446 - DNA, 1000 bp, Homo Sapiens
gagatttaacattgtacattttattaaatactggactttattacaacaaattaatttacttccgatagaagtttcattttaaaaaatgtggttgtgttcaaattcttaattgacacttgttttggggtaaacatcctatttttactggtggtatcatcaatcattatgagcagaaagattaattttgtataacagaacaaaggaatttctcaagtggtacaatactcaatatatataaagggaatatactcccaaagagtgggcatgaccacagcagagtatatgatcagagaacatattgcttttatggtatatatatatatatatatatctctacatataacatcaagtcatgcacattaagtctttactacctactgaaggcttctaccttacacatgaaaattgttcatgtcccagggtttggcatccagccaaaatttaaacaatgatgaagaatggctgtcaaactggcttttcagaccacccctgaaaagctgtcagctgtaatatccatcctggaatcgtggcggaaagttcctgggagttgccttttcctgtgttttgatcaagtctataatagctgacagtactgcacagtctctggatttagtgtcattccagtctacaggatgaggactttcaatcttctcttgcagaagaatatctagttcctttcttaattccttaacaagatgggcaattcttgctggagactgaaatacaatccactcatctacagcaatagtttcctgatcgttatccttctggatggaaatgtcacctccaaaaaacaagagacagtatggggaaacctctgtgcagtcatacaagtatatactgcttgttctcatctttaggtgatagataagccagttgtagtgaaagtctgtttgctccacattaacagatttaggatgaacagcaaccaggccatcggtttttgtgtaaacttttaccatttttctttttttacccaaatttagtcgaattttagcaa

SEQ ID NO: 472447 - DNA, 1000 bp, Homo Sapiens; identical to SEQ ID NO: 341641

SEQ ID NO: 472448 - DNA, 1000 bp, Homo Sapiens; identical to SEQ ID NO: 341642

SEQ ID NO: 472449 - DNA, 1000 bp, Homo Sapiens; identical to SEQ ID NO: 341643

SEQ ID NO: 472450 - DNA, 1000 bp, Homo Sapiens
gcttgttataaattttattagaatagaaaataatacatacagataaccataggatacacacacaggaattgaaagataaattttatacttttcaatatgaaacaaagtgcatatctcatggagatatattgctagaaacaacatgaaacaatagagcaatcatcttgaaaatgaaaagtataggaacatataggaattactaaataataaaaaggtccaacttcattacatgtagcataaaatacaagtattggagaaagtggaaataacaatggtcatatgaaatctactagtcattcagattgtttcaatatatacagtatatgcggaccttatagagaaagttataaatatttattgtttttgtgtatgatgactttatcttaaatgtaatctctaaatgtaaaatagtgctttatggtgatatcagaatttccctaatttttaatctttcttgttatctgaactgttttctaattctgatattgttggaaatgtgaacaagtttctgcaaaatgtgaaattggtaggaaagaggtaaaaaactgattttgcaatgttgaaaactcaatctgctgattttaatttattctctatatattgctatgaagtcacgtcttcaacaattttttgaaaaccacatattgaaagactgagtcatacatatcaaagtcagcagcattgccttggttctattacaaatttaactcaggaactaaaaagcctgccagactcactcagatagatggtgggatttcattaaaaaaccatctctgccatccaaaaagagagggtcccttaatggaattggaaattgaaatgagggattatgtggattttgtttaatatttgggttgagattcaggtcattcctgattttttcctctaggttttaataaaacctgaaagcttattcatagctgtgaaggaaacaattccttttttaatttaaaaaaactttttttttttgagaaagaataaaatgtgatcatttgaattt

SEQ ID NO: 472451 - DNA, 1000 bp, Homo Sapiens
tttttttttttttttcttttttttttttttttttttttttttttttttaaaaaatcagaacaaaactaatttattatagttctgtcttcattatacaccacgtgttggtgagttaaacacaacaaaattgtcttttcttttaaaagtgtctactaaagataaaaagaataagataacaattaacatgtagtttgttacattaaaaaatctgatatacatatttctattgcctgttagcttgttctaagcctctttaactattacaacaaaaaaaaaaaaggaaagaaaaagaaaattcattgtttaaaggcaaacattcaattcagttgatacaacattacagtacagtcaactaacatcattcaacgaaggtaacaagtctagccttagcttcttgagttaaaagtctatagaccagattgctacaaaagtttcaatgctgcttcaaaaccgtatgttagctttttggaggacaaagtactttctacggatggcttcagaaggggtcatgctactggtaaaagcacaggggaaccccatcctgtcattaatcattttattgagcactgtagttagaacagcattattgagtttagcacaacaactaaaataaaataataatataataacaatcataataatgataagaataaaaaccaaacacagactggaagcctagagtcgctggcagccgtgtcaaacccttgcgatacgctatactaaaaaaatttgaaatatccacccgtcctctccactctgccacaaactagcaaagtcaaaaatacaaaagtcttcaacttgttcacttttgcagaataaagcaaaaacgtctttgtgctccttactaccagaagcaaaatatcctctgagttaccacatgtaatagcttctggatgtgtcgacctgggttggcttggtgtctgcagaaccatctttgtctttctcgctgtcaccttcccagaggttaatgagtggtgggtacagctcatttagtgggatt

SEQ ID NO: 472452 - DNA, 1000 bp, Homo Sapiens; identical to SEQ ID NO: 341644

SEQ ID NO: 472453 - DNA, 1000 bp, Homo Sapiens
ttttttttttttttttcattgagaacagatttatttttagtgcatttttatagcaccttgcctactacaaatttctggaacatactcaatataaagagtgaaaaagaaaatataagcaattcaaatatatactttgacataaacgtaggacagttctatgtcccattcaacgtcatgaaaggtatagtagttggtgggtaaatagaaaccctgttgtactctgttgctgactaattgtggttaccttacttatcaataatattagaagtattatgctcacatttttcacctgtgggtacaaggaagcctggttgaagtcctttccttgagaggcctggatttgttcacatattcagatttcaactggctttataacaggtttccttatgtgcctcatattggctccaggttcactgggtttaaaaggagccaaagcaccataaggttttggcaaaggaagagtggcatctgcttctgggatgtaggcattcggacgctgctctgcagttgtgtaaacaccattgggcagctggcgattatctgcttccaagaactcctgagacttttcagcgatggccaaggcatgcatttcttcatctcgaaggactttcaaccattctttctcaatttccttattgagtggcagacctttttctatcctggaattgcaagtgaagatgaagtcttctttctccctgacttccttttggagttcaatggttagggcttgtttcatggacagctcagcaacaagagccatcattttctcagttgcatttttgatccttctttgatagccattcatcttcttggctaagagcagtgtgtcctgcttgcagccctgagttttgctgcagagcctgtctgtgagcctggagacttgctcatagatgaaatccttctccagcagcttctcctccttcttggccagttgtagttccagcttgtctaatttttggatcatttctttttcggtcagatctttccctggaaggaagcg

SEQ ID NO: 472454 - DNA, 1000 bp, Homo Sapiens; identical to SEQ ID NO: 159968

SEQ ID NO: 472455 - DNA, 1000 bp, Homo Sapiens
ttttttttttttttttgggtgagcactcaggggtttatctgaacttggaaatgctacagagccaagagtatggggtgggccttggccgaggccgctgcttccctctccttccacctgcaggctcttcctgagcttttctcctggcttctccaggatgtggtcgctctcggtgtccagacaaacccagggaggaaggctcagcgttcctcggggcagtgcagaaaatgtcctgtcactcccagaggccctgggtgctagccccctgctgcccagggctgcccatctgaccaacagctccaggctcccctctgccctcaaggtggcggccaccacgcccccattctccaggaaccagggccttgctgcgggtgccaggtgaccccaggggctcagtgcccggctccagcttctgctccaagatgggcatggggggcctggtgttctcgtggaaggagtcgaactttgacacgtgtgaggcctggctcacaagctggtagagggtggcaagggactgctgctcgcccttctctcctcgttcccctttgggccctggcagtcctgtgggccccacggtccctggaggtcctcgctctccactagtgcccctggcccctgccatgccctggaaccccctggggccagggggtccaggcaggccagcagttccctccaggcctctcattccctttggtccctggaggccaactctcccggggatgccctggtggccggggtggccctgcaagcctggaagcccatggtctcccttctctcctttgacccctggtggacccctgggccctgggaagccctgctctcctggggtgccattcctcccagggaggcctgggggtccttgaggtcctgggggcccaggggtctctgaggaacaggaacaggcagacacgaaggcggggcaggtctctccatccctcgaggcagggagctcacagcaccggtcctcatcggcccaggtgtcactgcacacgatctgcagcat

SEQ ID NO: 472456 - DNA, 1000 bp, Homo Sapiens
gactattaaataactttattttaaaaatgactgctgtggacctggcttttgtccctaggactgtgtttttcctcctgaaccccaaagaaaagaatgagaaggaaactggctgtggtgtttattcagggcccagggaaggccgaaggcagcagggggcgatgcagagatggcaggatcggggcaggtggcctcagccagatgtgcaacagcagacattcctctttagagcccagggggtcaggccgtcactccttgtgcttggggcccagggcgtcccgggtccgtgcccgcagcttgttggcctgggtttccgccatgtctgcccgctcctccgcatcatccagctcgtgctgggccttgcgatacttggccaggttggtgttggcctgctgctccgcctcctcaaactggcgcttgtagctcttgaccttgctctgcagcttgtccaccaggtcctgcatgcgagccaggttcttcctgtcctcctcggcctggtatgcgagctccttgacacggcgctcatgcttgcgcacgcccttaagggcctcggcgtgcttcttctgctctgcatcaagctcagcctccagctcccgtaccttggcctccagcttctgcacctgcttcttcccgccacggagggcggcctgttctgcctcctcaaggcgggcctggagctcgcgcaccgtctgctccagcgtcttcttcatccgttccaggtgtgcacttgtgtcctgctccttcttcagctcctcggccatcatggccgcatcagtgatggcctttttggccttctcctcagcctcccgcctctcctgtgcagcctcctccacctccccgctcagctgggccaagtccgcctccagcttcttcttctggtttaggaggcctgtgttctgcgaatgcagaaggttgaggcgctcggtggcctccaaaagctcctgctctgccagtcgccggctgcgctcgccctgctccagggcagcccgcagctcctccagct

SEQ ID NO: 472457 - DNA, 1000 bp, Homo Sapiens
tttttttttttaaaacaaatacttttattgcacatttataaaatctgcatagttgtatcaatttttttccctttcatgattccattaatctttaaaatttggttaaaacacaatatccaatcagaagccttttaaaaatgatcaatgggaagtatttttctctacatatacatatatatatagttttgcatatgtatgctggtttttttttttttttttttttttttgtacaaacccacatcccttacttttaagggcaaaaaagaaggccgggtacgatgacttgtctgcaatcccagactttgggaggctgagggaggcagatagatcacttgaggccaggagttagagatcagcctggccaatatggtgaaaccccatctctattaaaaatacaaaaattagccaggtgtggtggtgcatgcccgtaattccagctattcgggaggctgaggcacgagaatcacttgagcccaggagacagagtttgcagtgagctgagattgcaccactgaacgccagcctgggcgacacagtgaaactgtcacagaaaaaaaaaaagagcaaaaaagaggaggtggacctaaatggtctttgggccagcagtagccctattgactgtttttgacaatttttaggtattagaaaattttacctaaatgcctaataactattaatggatgatcttcagtcaagttacacaatgctcttctgtctaaagtccttaatactttactttctttcactgaggactgagtatgaggttttctggtttaaagatagaaaagaaaggagagagacaggtctcttttgacttttcaacatctcactgccatgtgagcttatattctacccacatgtaaaagggtgcagttcatcagcaacccattttgttatctcctggcaagagccaggcaaggtttatatttctaatctcttgtagttaagaatttttaaatgtcatctgtatttgataaaataactagtagctgttcatctg

SEQ ID NO: 472458 - DNA, 1000 bp, Homo Sapiens
caagtttcaatcatttaattaacatctttaaatgaaacacagttttcttcatgtgtctcactcaggcttcagggcagagggaatggatttttagacatatcaaagactcaaaaatttaaagaaatatatatatgtatatatatacttctaacattttatggaaattaaaaatcagaggcttttggtctctccatttactctaggtcaagctcatttaccccagaggacaaagaagggctgcctcttctagaccctcccttctcctttgtcctctgtcccacccagcagggaaacaagctcagaagatcctaacaggatagagttccagtaatgttggaggagggagagggaaagagaagtcaggttctctcccacctccagccattcccaggttgctgccagggcctggtttcatgcagctttgacccagtcctggatcctagggggtggggtagatcaggagctctgagcagaacagtgctcactgattatcctctttccccaactcagtgggcaggtgcagcgtacacccagcagcactctccactgcccacaggcaagggaagaatattgattgattagctacaaggagaagacagtagtgactagtggaaaacaccctggagagggccagaggaacctggctctcaccacatcccctctgttcccagccttggtgagggggcggggaggtcatgtcaacctctctccttggtggtgaagctaaaagcaaggttccttgccagactcaagcccaagtcactgttaaggaaagaggatcaagaaagaagcggtggccctggggggcagccacgctgctgtggacccacaggggccaatggggaagccagcttgcctagacaggtggcacaggctgaaaatagaaaggttaacattcccggagagtacagtaagagaggctgatacctaggggaccaccacccagcctgccctagaagcactgggtgcccctcattgactagagaagacttgagtaaaa

SEQ ID NO: 472459 - DNA, 1000 bp, Homo Sapiens; identical to SEQ ID NO: 341645

SEQ ID NO: 472460 - DNA, 1000 bp, Homo Sapiens
ttttttttttttttttggctatagagcatttattgcaaacaaaattgaggtaaaagaagctgacccagaacccacgcccgtccaggctggggaagtctctactcgccccacaccaggccccgagcaccgcgggcccgaagcagcccccagaggacagacgggccctgcgcactgaggtagctgcatcctaagcccccatgagtacaactgcccagggctgcccaattcccagaggggaggaggagagagaggcaggcagggggagccccggcttcaggtggggcacaccccacaccctcaacaaacctcccagcctctcgggctgggcacttcctgcctggccacccagccagccatggggcagcggggtggccaccagaggcgggcgtgctggggtgcgaggtcactgctgctccaggcagtcctcggtcaccccctgggcagccagctcagccagcacgttctgcaggtagttggggtcgggatagccgtggcccgtaatgttgcggtccatctctgtcttgtggtggatctcgttccataccacggtgtccgtctcacccgtggtgctggacgtgcccactgtgaagatgagccgcctcttccaggccaccttcaggagctctaggaccttgcggccctgggcgttgtctggaaggtagcactggcggggaaaccctctggcagtgaacggctttccgggattggggtgctcagggccctggataccatggggaatgctgtaaactatgaggatggtcccgcagtcctcgtggccggggagcgacatctggaaccgtaatacctccatctttccctggggctgggtccccgtcttctctccatagatggttttgcaggagggacactgcagacttccatccttattgccgttgcagtacatggccaggaggcacagcaggtggaaggcatggctgcacttggtgaggtggcccacagctagggacccgattgccttgctgtcagtcacatcgctgta

SEQ ID NO: 472461 - DNA, 1000 bp, Homo Sapiens
ataacccatacttgtttattctgttaaattaaaatatcattttcccatgacctttatttcatttttcaagatgacgtgccctgcccagcatgctgtttggaggtgatgtcctttgaagctctggtgcctatttgaagtgactgattcctggtactcaccctccctgctaaccaagtggaattcccctttcatgcttgccttcctcatgggaagagggctccacgtgggcagggaccatgctgtgtcctgttcgctggtaaagctacagtgcccggcacagagcaggggtggagggatgaagggagggagggatggacggaaagtaggtaggcaggtagatggacagggaaggagtctgtataagaaagtgtttattcatggtggggcggagggtcacacatacaggccttggatagtgtgcagggactgcttccagctgtccttccagcgctgagcctcctttatctgagatgtacagtcatcctggatcctctttagctcctcctcaaatgatgctaaatatttcaggtacacagcatctcgggcttccacggccgccaggtggcccagggtggttttggtggtggaaatcgatgatgttggctggagaagaatcttgttttggatggtgacttcggtgggtttgatccctggccacttcctgcttccacgttcaatcaggggtttctcactctcttccttcagggagagcccagcgagtttccttcgtatgagcattgataatttctgtttggggggctccatccttgcaacctggacatcgtcaatggtgaccacctcatccaactgcagtaggaacttctcggtgaaggtggccaagttggttatgaaaacctggccattccttctggtacattcctccagcttctccttgttcatcctaatcatgctgtccagctcttcctgcctttcctcttcacttaagtgtagagactccatttcttggaaatgtacggggtgtccaagatttagatggagc

SEQ ID NO: 472462 - DNA, 1000 bp, Homo Sapiens; identical to SEQ ID NO: 159969

SEQ ID NO: 472463 - DNA, 1000 bp, Homo Sapiens
tttttttttttttttttttttttttttttttttttttttttttttttttttttttttttttttttcacttctgaccctttattggggcactgtcggccccaaataaatataatacattaaacccagagctgagggaatcgtgcaccccaggaggcgccccccacaacctcagccgggcaaaataagttagtggggggcctgccagaggccgggccagctccctggtctaaagtgcatctcggttccgtggtccccacgtctgcacagcccctggttgggccgtcgggaggggcgggtgggagatgcctggcgctcacaccgtgccagcagtggccgccgaggctctgtgtgtccatctgtccatgtgggggaacagctgcgtggccggggtcctcaggaaaagctgtcatcgggccggggctgggtgtcaaagggagggtctgagactgtgatgccttggtgcagcttctccagcgagaacttcatctcatccaggagctccacggaggcccgcaggatctgcctccacttgtgcacctccacgctgtggaattgcttctgcagcgccaggatctcggcccactctgtggccgtctgggggaacttgcccttggccagggccaggctgtgccaggactcaaaggtgtgggctgtcctttccagggaccagaggcggtagaagagcaggacgttgagggcgatgaggatgataaggctcacacagatcacaatgctgatgagaaccagggcactggggatgcctgccccggggccctggtccacagatggttcggagaagcgggagctgagggagcccgaggtgtgaatgccggcccgggcacaggggtcaggatctgggtgctggggcccgtccccgtgagcccgccagctcaggggccgcttccgccgccgcaggccggatagcaagccccgggcatccttcccgccttcctccagagacagcttctcagccttggcgagctctcgctccagatggtgg

SEQ ID NO: 472464 - DNA, 1000 bp, Homo Sapiens; identical to SEQ ID NO: 344008

SEQ ID NO: 472465 - DNA, 1000 bp, Homo Sapiens; identical to SEQ ID NO: 341647

SEQ ID NO: 472466 - DNA, 1000 bp, Homo Sapiens; identical to SEQ ID NO: 159971

SEQ ID NO: 472467 - DNA, 1000 bp, Homo Sapiens; identical to SEQ ID NO: 341651

SEQ ID NO: 472468 - DNA, 1000 bp, Homo Sapiens
agaattgtaccagtaaatttattccaagtaagacttgtgtgcacacaccaggcagataatttccacacaaacaccaaacattgtagtaaaactagttaacactttggccatgaaactcaaagatacttgaaaaacctctcgatagcactttgagtcacttaattctgacaaatattaatatgtcatccatgcttgcccagttataattttacaatataattgtatttttcattgtacttattattcattatacttactatatatatttaaaacatctttgctgaaattctcttatcccaaaaataatttttcagtaactccaaaatacccacatgtacctcttagcaggctattccaatatcaaaattctttttcttcaagtaacaagttctcaatccacaccattcctgatcacagatataactgatatgcagttttatagacagctcttttactccttgttcctattttagcaggccaaccatcacttcactgatatcccagagttttcttgcaacagattcatccatagctttgggcaacagttcttcctctttacaatccccaaagtatcttcctgacactccttctacctcaggtgaagaggccaaataaatggaagtctgggcaccttctactggagttttgaaaaaagcccatgacaccaaattgaagagtggtttgaccaacagtggaatgtgtatgtgcctccccagatttgtccgtacaataccaggatgcaacacattgacggtgacatttgtgccttctaagcggcgggctagttccctggtaaaaagaatgttagccagtttgctccggctataacaaaagcttttattatagctttgttcactgttcaagtcatcaaaattgatgtctccgtatttataaagtttggaagaaactaccacaatcctgctgggagctgaacttttgaggagtccaaggagaagattggtgagtagaaagtgccccagatggttcactccgaactgca

SEQ ID NO: 472469 - DNA, 1000 bp, Homo Sapiens; identical to SEQ ID NO: 341653

SEQ ID NO: 472470 - DNA, 1000 bp, Homo Sapiens; identical to SEQ ID NO: 159973

SEQ ID NO: 472471 - DNA, 1000 bp, Homo Sapiens; identical to SEQ ID NO: 159974

SEQ ID NO: 472472 - DNA, 1000 bp, Homo Sapiens; identical to SEQ ID NO: 341656

SEQ ID NO: 472473 - DNA, 1000 bp, Homo Sapiens; identical to SEQ ID NO: 341657

SEQ ID NO: 472474 - DNA, 1000 bp, Homo Sapiens
tttttttttttttttttttccttttcacctcctggagtcctggacttccccacatctcccctgcccctcccacgtttccatagtccaagggccagagtaaatgaaaatacagcagccgcccaagcaatggggcccatgctggggcttcagtcatcagcatcttcactggagtctgagttagctggcatcataggatcatcaatgagtgagaagtccctttctgagctatcatagccctgagataagtcatcatcatcttcttcatcctcatcgtcatcctcctcaggttgcagtggtggcaaccgcaaggtagtaccagaggcggtagtcactggtgaagaggggtagccaggggctctcaagcctggatggtgatggtggtgatggtgggggtgggggtggtggtggtggtgatgaagcatggtgctggagtctacatgaggggatgattgtgcaccacccatcacaaatggcataaaaggcaaagatgcagaagtggcactgctgtgacccaaagatgacacagactgtaggccactactgctgtgttggaacgtgttatgcagagatagagacccagtgcttccaccctgcatgagggccatcatcttagaaaggtctggtcgcatcctacgggcccgcttcttgctgctctctggtgcaataggccctggcaaaacccggttgaacaccgtttcagtgtgatgaccctttttcccatttctagagttagctgtctgtactggttccattcccaaacagttcaattctgccttattattttttttacatctttgccacttctgttttctgcgatcctccatatacgctagaaatcggggatcaacagcaaactctggatgaccctgtaaccacatctccagttcagcccggcgaggggcatcctcacccaccagcaaagtaccatccaccttattgatgacagggatccgggtctccaggtccacatcaaggtgattaggctcttccatgcactcca

SEQ ID NO: 472475 - DNA, 1000 bp, Homo Sapiens; identical to SEQ ID NO: 341658

SEQ ID NO: 472476 - DNA, 1000 bp, Homo Sapiens; identical to SEQ ID NO: 341659

SEQ ID NO: 472477 - DNA, 1000 bp, Homo Sapiens; identical to SEQ ID NO: 341660

SEQ ID NO: 472478 - DNA, 1000 bp, Homo Sapiens; identical to SEQ ID NO: 341661

SEQ ID NO: 472479 - DNA, 1000 bp, Homo Sapiens
ttttttttttttttttggggttttgctatgctgaatactttatttatatttttatgtaaacataatttgctttataggcacaatataacaaaagctctaaagccacaaagacattagacaatgtttcagttcacttcaatcaagcttaaattacagagaagccttcacagttcctttaaggcagactgagacattctttacacttccttcagaaaaaacaatcaagagacaggaaagaaggtgcttaaaatgagagtacgttaaacaattaacttgcgtcccccggttcttcatggcagaaattggtcttattggtcaaactctagttttctcgttctgtattctgaaagggttttctttaaccatctggagtaatttgcgattactggattaactttgctagttaaataaaaccaaaccaaacccagattcggtaggggtggtgggggagagtgcctttttatgcctctcctctggacataacaaaggcgatgtgaattctgaatgtggctgaattcccactccccgggggaaggagagccctagtatggccaagggctcttcactccttcagctctggaaaatgtcatttctacccaacttactaggaatgccacttggatgacagttctccctaagacccccttttcagcatggttacgggagaaacagccaataatatagcacttagcaaaggtaataggggaataaacgccccattatctctctaaatgacccagaactggaatattggtgggtcctggagtacgaagaaaagatgatgctggtgtcctcctttgggatactctcaccccttggttcctcagatgaaagcaccctttcttgtcttcatattttacatacacattcacaatgaggagaaactcttcagataaatatttggcatacataactcatcatcataagcttaggataggtaaaaagaccacgaatgaggtgacatttgctacaaaaggactttggaaatcaggtaattgct

SEQ ID NO: 472480 - DNA, 1000 bp, Homo Sapiens
gtctgctttagatcacaatagaatttttaataaataaatttcttttcttttttgtttttttgtaaagacacttttttgaaacagtagatttagcccagtcatttgtgtcatttttaataaactgtctttttttttgattgtttgttttttgtaactctgtaaatgttttagatttgagtctcttgtacattgtctttagagttcattcggatcaataacggttcatgcactgaactgtgtattgaatttattgtgttaactgttgttgtgtggttgaagggagatttgtatgagttatagtgatttaggtgctcatgctcgatagcaggcatgggcaggtggctttccatgggtgtgtctcccgtaatctcatcatccacattaataatttcaacagtccttgttggggcgtgatggttttgccgatggtgctgcttcctcatcttgtagaaaatgaccagcatcactgcagccatgagtgtgatggccacaaaacacccaatgatgattttggtagtcttcatgacctcatcaattcctgggatcccactgtttatatcagtcactgggatggtgaaggttttctctgtcgaccttgtgctctgtggtgtgagagaggtggtcacattggtggtctcccagtcgaccactggagtgggacccacattgttatctgtggtccgtgcctcatcctgagacggttccatagtctctactgtgacggttgaaaagtaagagaaaggagtagtggttgctgcagtaacattcagggtggctgaagcagtagtattcccaacggaattactcaccatacatgtgtacatgcctgtatcttgcacagttacatttgtgaaatttaacgtaccatcactgagcacagctatccgcactttgtacgccccatgtgtcatgactgttccatttggagtaatccaagatacagatgtcagggatgtggaggcccgacatttcagctcagctgccatgccttcagtgacat

SEQ ID NO: 472481 - DNA, 1000 bp, Homo Sapiens; identical to SEQ ID NO: 341662

SEQ ID NO: 472482 - DNA, 1000 bp, Homo Sapiens
agcattatgtttcatttattaatcttttatttttcattacattttagtacagcaaagcaaatacaggtaaacatcagtattcttcatacaatagcagacagaaagggaagccagccacaatttagagtgccttttcagttgttgttatatttgtttgttagtttatcactttaagctagattattttactggcgaatttttttcaagctttcaaggaaaagcctatatctatagctatatgctatattcttttctagataatgcaacaagatggaaagatttccaaaacattttatagagctatcaaaactcataccaaaatacaacagagacagcaagtggtcaatcacatttacccaatcagacaatatattaaaacagttgaaacatttccagacaccacaccagaactaaatatgaaaagacataaatataactggaacacaaataccaaatacaatatgtacccacccccaccccccaatacatgagaactgaggctcaaaggcccctccttgcaaggcccctctgactgccatgcattcctctacctgaagttgtgaacaaagatttgcctgtgcccaacatcagctctattggcctcatcttccattgcctccctgtactgctgtggccagtcctgtggttcctttctgtggattctggccacatatcgcaaggctttcatcttagaggtttccaaacgggctctaggaccccatacaaactcatattgcactggatcactgtcaggaacccgtaaactgtctatatagcgctgactcaagtatctgcaggtaatcacatgctttctcccagcttgaacccctaagccccgcagaaaggcccagactgcagactccctggcatggttgcccataataaagatgaagcttaggacctgcatcaaaaagttgttgccaggcctgtttggactgtctacgatctcctcagtttcttccatctcccttcggttgtacagagtataggagtgattcct

SEQ ID NO: 472483 - DNA, 1000 bp, Homo Sapiens; identical to SEQ ID NO: 341663

SEQ ID NO: 472484 - DNA, 1000 bp, Homo Sapiens; identical to SEQ ID NO: 341664

SEQ ID NO: 472485 - DNA, 1000 bp, Homo Sapiens; identical to SEQ ID NO: 341665

SEQ ID NO: 472486 - DNA, 1000 bp, Homo Sapiens; identical to SEQ ID NO: 341666

SEQ ID NO: 472487 - DNA, 1000 bp, Homo Sapiens; identical to SEQ ID NO: 341667

SEQ ID NO: 472488 - DNA, 1000 bp, Homo Sapiens; identical to SEQ ID NO: 341668

SEQ ID NO: 472489 - DNA, 1000 bp, Homo Sapiens
tttttttttttttttttttttttttttttggctttctgggtcttttatttgtacccatgtgtctgtcacaccatgaatgtacctggggaaatcaactgacctccctgaacatttcacgcagtcagggaacaggtgaggaaagaaataaataagtgattctaatgctgcctaggtcaccctcaacccccatttactggcacaattgggtggagagaagggaaggggtatgattgtcctgatggctcagggttgcaggaggttcagaggggaaggaggaaaggccaggctggaggctgggctgttagcacttccctcccacagttcagacggctcactctgggctcaggtttgccatggcttcctttggtccaaacataggccctgtccttagtcctgtgccctgtttgacttttggccaggaggcctttttgtgctgctgctgttgcagggctagctgcatggcccatatgctcagtggccgcatgtaggccagtgagcggaacactcgctgctggcagtatgcctctggggtctggaaggccagacccaggcgctcccacacggtacggtagcagccttcagctgtctggaagccctcccaagtcaggccctcttggatcatggtagctgccagcccgtagaccacacccacccagacttcatcagactgcacactggatttatcagggacaccatggggctgcatcccattcacagcccccatggcccctcctgcaaaggcctggacgttcagctcaaagatagtttggagagcacggaccacatgttgggtaggaaacacctcagtgtctccttctcctaggccacaggccttcaggaaccactgtccagcacactggtcagacataacactacgagactgaggccgagagctgctgtcatagttgtaatagcggccattccacagcagtctctcataggcttcttggccccggctgaggatagaagaaaacttatcctggatgtcctgtgccccaca

SEQ ID NO: 472490 - DNA, 1000 bp, Homo Sapiens; identical to SEQ ID NO: 159976

SEQ ID NO: 472491 - DNA, 1000 bp, Homo Sapiens; identical to SEQ ID NO: 341670

SEQ ID NO: 472492 - DNA, 1000 bp, Homo Sapiens; identical to SEQ ID NO: 159977

SEQ ID NO: 472493 - DNA, 1000 bp, Homo Sapiens; identical to SEQ ID NO: 159978

SEQ ID NO: 472494 - DNA, 1000 bp, Homo Sapiens
tacttccagattattttattcacatggcttggtggggtacaggcactcctgccagagagacaggagcaggcctccctgccagccctggtcagtcacccacctcccggccctcttagggttagtgctagttatcacacacacaacagcgagggggtagagaaaggaaggcaagaagggatccccatctgactaggggcttcagacagccgcagcctgagccccctccatcctggccgggcctggagcccctgtctctgaaaaccccacgctgggcagccgcacccgcaatccaccctcttcctggtccccactcccactccgggccttggggcttagggacaccctggggaagcggaacttgggtgacttctctctgacgggggacttgggggctgcatcgccctcctgcccccgagaggctttagaaggggccgccaggcctacacgtggcaagcggacccggacccggccccggcgacccgaggccccttccccactgccctcttcctcctcctcctcctcctcctcggggctgggggacccttccccagtgaccatctcactttggctgaagcccactcggggcagcctgagtttggggctcttggccttctcaccctcctcggccccctccttggcccgcaccaggccaaaccggggcagccgtaccttgagcttgtgtccggcctctccctccccctctgccacctggtactcggcatggttgcccccggatggcgagagctccacgtcgggcagtgagaggcagaaggtacgctcggcccctgggggctgctcctcagcaccctcgccccccaccctagctctggcccccagtgtgggcaacttcagcctcagcccaccctcgcctgtggccgcctcgcccgcctgtgcctctcggcttagccccacgtccagctcaagctggggcactgtcacggtgggcatcttaaagacaccctcacccaccagcagctcaccacctgcaacctgggctcca

SEQ ID NO: 472495 - DNA, 1000 bp, Homo Sapiens; identical to SEQ ID NO: 341673

SEQ ID NO: 472496 - DNA, 1000 bp, Homo Sapiens
ctgttgaaatatagtttttattgcatttctgccgttttacaaaaatatgacaaaataaattaaaaacaaataaataatcgcctgttctgtgtgtgtgtgtgtgtgtgtgtgtgtgtgtgttttctgttggatttgtgggtttcctttcgtttggaaaggaaaacggcagatggggggcaccgaccaatactgggggccctcgggggctgaagcgcattttgcattttggagaccggccgcccctgtgaatgactgatattgcatatgagaagagaaggcagggcgggtagagctaatgccagccgctgggccagcacacggcctgggggctggggctggggctaggggagggcgctggggtctcgaggggatccgaggtgggcggtagcggtgggggcgggaggctgtaaaagctggcgtctcccggcaggggctggggggcgggtgggggcccggccatggcacagggtgggcactcggcagcggccagggcctggcggggggcggcaccctcgcccccgcagccccagggcccgtcccactgccagcagccggcgggcggtgtcgggggccggggcagcggcattggcggcggcggcgcggggctccggctgcggcgggtgcggagggcaggggcgcccacgggggccagcgctgtccctgagccttcctcttcgggccggggggcttccagctcctcagccagggcctcgtccaccggcccactcctctgaacccggctgctgccactgctgggggtcccatctggccgggcctgcccgcccgccccgttggacccaggctcagcccgggtgccaccaaaggggaagagcttgccagcatggaaggctttgggcggtgagtggctgcgctcagagtcccgccgggtctcgggtgacttgaggaacttgaagctgaggaaggcaggcaggcgggtgtcgctgcctgtgggtgactgggcagggggaggccgggtggtggctccggcccctgcagcagc

SEQ ID NO: 472497 - DNA, 1000 bp, Homo Sapiens; identical to SEQ ID NO: 341674

SEQ ID NO: 472498 - DNA, 1000 bp, Homo Sapiens
ctggaaaatagtttattaattcattataaggacagatacatgaatcaatgccttagcttaacactaaagagtatcatatttgtaaggagaaaaaaaaaacgctggaaggataattaaatagtacagcataaactaaatacagacaaataaatgagcaagtactgattacacttgtcatgcatcaagaaaaggaagatttttaattgagactcagaaaacttaaggcatcaatggtaggtgacaaagggattaataccctgtaaaaggccaatagattcttttctaataaaaatactgctacaaagacacaaacctaacacttccaaattacccagagcccaaatcatatatagtgctagtgagaaatggccactttcttatcaactgtgagttataggcagataccagatttattacttatttgcttttgagaaacaattttccacccaacctaatgggttataaattgtctcatttgcagctatttaatttaaaccagaacctcagtgcctgttaaacaagaacatgaaaaatgactatgtggtataatgctaagagcctactgttaaaacagccatttaattcagggcagtttttttttcttctttaaaaaaaaaaaatcaaaccagcaaaataaaatgaggcttttgaccttcagagcaatgatgaaacatacacagtggtgttagccacagcagcgctgaatgctacagaaatactacaagtgacaattctgtctttaacgagatacaaaaccaacattaataatctttagtgttatcataggctggctgaaggagggggaggaggtggaaacgtaggtgcagacatcaacagtgagtgacacccgagtataataaacacagatgctttcagggtttgaggaagccgcaactgtgctgagagacattccaccatttaaaaaaaaaaaaaaaaaaaaggaaaaatggactggttatttcgaatttggcccagaaggcagagttaactcttgatgtgc

SEQ ID NO: 472499 - DNA, 1000 bp, Homo Sapiens
ttttttttttttttttttgcatagaacaagattttgttttcagagttttcttccttccccttcccccaattgttagcagcttgatgtgtcattctccccagcaggggagggggtggaatggcttgggttgtaaactccctcccccagccttcctgtcccttggaggggcagttcagctgggttctggttcagggtcaggcaggcagttaaggcttggctggtgcgagaaggctgggtgctgtgtcttcagagctcattcctccactctggctccacttgcagagacaggcccccttcaccctcccgctcctgggggaggtagtcatggctgtggggccctgaggtagaggggctgagcttgctcagaccttgcagtaaattctgtccctgttgcaggtccagtttggcagggaagggacacccggtataccctccgttttctttacagaactccaggaatactttccagtcagggtcatggcccaggagaagggggttccccacgatgatgagcagggccttggcccgggtcacagctacattgaacctcttggggttcttaaggaaacccagattaaagtccagatccagctgcacaaagctctggctgcttcgcacggtggagatgaggatgacgcttcgttcttggccttggaattcttctactgaacccaccttcaagtccttgatgtcatccagtcctcgaagctccctgtcaagtttggtgatgcagtaacggattttctccacctgtttccggtacggggagatgacgcccacacttcgagggctcaggcgagctttgcccttcttggaggagggggccaggagcagcttcaggtaggaagtcactgtggcagcctcttcagggttgaagaaggatgggctgttgccttcacgctcatctttgcccattacgccgtgaaagatgatgggaaagccctgtcgaggtaggcccgcccagcggcagaagcgttctcgatccacgacatcagcacag

SEQ ID NO: 472500 - DNA, 1000 bp, Homo Sapiens; identical to SEQ ID NO: 341676

SEQ ID NO: 472501 - DNA, 1000 bp, Homo Sapiens; identical to SEQ ID NO: 341678

SEQ ID NO: 472502 - DNA, 1000 bp, Homo Sapiens; identical to SEQ ID NO: 341679

SEQ ID NO: 472503 - DNA, 1000 bp, Homo Sapiens
tcaaagccaaagggtttattataggtacatacagtgtgcgcccgccacaccgccccacacccccgggccccagcggcttctccaggcggccatggggactgcccacaacccaatcccccgactccccagggaggtgctccagccagaagcatgcaggggtgggcttcccctcgcccctcccctcatgaagtggcatttacaactggaggggggaggagagaggaaaacagttttgagctttgacgcccctcccattaaaagccttcgcggatgcggggcgggggaggaggagatcgacgttttgcaaaaataaactaagtcaggaattaaccgcatggctctgaggcggcggagtgcagggggctagggccccttcactcccccctcccagacagagatcaaggcagcattggaagtgaggtaaaggcggggagggggtgtcccctccctgccccctagcaccctggatggtccaggggacctcaccagcgcccccgtgcccatccctagggcagagaggggggcaggaattactgcccccaccaccccagcttcttggggcaggatctgcagatcggggctgggggcttggctcaactggccccctgcccacccccatcaagctcagttattgcataaaaataagggacccccagcacctggggtgggggtggtgagtgggaaggggccgagatatggctataggggcagcaatctccccaccacttcttggggtgcaggagaagtcccctcctttccggtgcccaccatgtcacgcgtcctcagtgttggaactaggggctcccgcccctgcggaagaaaaagtgtctttgtgcccacagtgcggaaaagaggggagacgagatgtgtcaggtcctgggggtgggaagtcacttcctgcgcccgctggccctgcgatctccgccttccctcttagggttgccctcatctgtggatgaagtagtgggtagtgtctggccccagcgggcgatctctgcgt

SEQ ID NO: 472504 - DNA, 1000 bp, Homo Sapiens; identical to SEQ ID NO: 341680

SEQ ID NO: 472505 - DNA, 1000 bp, Homo Sapiens
tttttttttttttttttttgccattcaaagtctaatttattctattattttattatttttcaaaagttcattaggcaaaagggagatgtaccttgtccaaacacacaaaatatgggccgaatatattaacaagtagattatcaattcactattttgttgaaatgaatgcataactgtataatgtgacttttaactttgattttttatgtagaaaaattatggatcacatggcagtggatcacctaagcaaaaacagcttatggaatcagaataattaagttcacaaacaggtacgcttataataaatggtctcctgttacagttgcaaatcatggttgtatcatctttataaactttgcatttttttctagaaaaatgtctaaggatttaaatttatgtttccaggtctatctgattttgcaatacaaaaatcaaggttagtggttttctcttccattttttttaaaaacctcattgatccaaatacaaataaaggccattattaaatacttcacgaggcattacatattcagaccttttaatcacagatccattgatattaaatgttgattaaagaagtaagttgagattgcctgaaagatcatcaccaaagcagatttcctttccaaaagcagacgcctctcctgtatttctcagccatcttgcctacagatgtgcttcaaggccattgtttcggatgatcttggcatattccttggccgatgtgtaagggactcggggtctagctgggtcttcaaaatcaacgtggaagagaccaaaccggctgctgtatccctggttccactcaaagttatccagaagagaccatgcacaatatacttgaagattgactttatcaagttggatagctttgaacagttcctgaaatgtttgtctgaaatactcccagcgttgagtgtcatcaagaggcgctgggtcactctggggaaacccattctcagtgatgtaaattacagggttattatatgtatccttaata

SEQ ID NO: 472506 - DNA, 1000 bp, Homo Sapiens; identical to SEQ ID NO: 341681

SEQ ID NO: 472507 - DNA, 1000 bp, Homo Sapiens; identical to SEQ ID NO: 341682

SEQ ID NO: 472508 - DNA, 1000 bp, Homo Sapiens; identical to SEQ ID NO: 159979

SEQ ID NO: 472509 - DNA, 1000 bp, Homo Sapiens; identical to SEQ ID NO: 159980

SEQ ID NO: 472510 - DNA, 1000 bp, Homo Sapiens
ttttgcagtccctaaaacaggcttttaataacatcgtgtcttcactgaagagcttggcgtgtcccacccgggcggcgccgcgggctagtagaaggagtactggttctccacggcgcgcgcgcggccgggcgcggcctccgggggctcctcggcggcggtggcggccacggcctccagcaggcgctcggcgctgttgctgcggctccgcgcgctgagctggccctcgacggggcgcgggggggcgggccccgacgcggcagaggacgacgaggcggaagacgaggaggcgccggcggcgtcggagggcgaggcaggcgggcaggcggccgcggcgaggctggagaagtagtgctggccgggcgagtcgctccagcaggccggggacgcgggcgcggcagggggcgtggggcccggctctggtggggggtcctgggcccgcacatagctgcgaagggtgatgtcggccgagccccctgactccagtgggatggggtgtgtgtggaagtggcggagcatgtcaagcacagactggaaccacagatgctgtacgtgacactggccgtggccgttcagggacaggcgcaggtgcttggccttgccctggaagttgaaggtcagcacgtactccccaggccgagtctcactttggcggatcacgaagaggccgtggttccggggcccccctgccagaaccagttgagcagccttgacccgggacagtgtcccgtggaaccatgggtagtcggatagctccagctcgggttcagcctcgggatccgtctctgcaccctgttcccctgtgttattgctgtcactgccgctgccgcccggggattccagggtctgcagaaaggtctctagcgggacgtggatcagggattctctgacggcatctcgacctcggctgtggggggctgtcaccactgcacccacggctgtcgtctctggggggcggggcaggtcgactgcatcagtcaggagctcacagctgcaggaggcc

SEQ ID NO: 472511 - DNA, 1000 bp, Homo Sapiens; identical to SEQ ID NO: 341685

SEQ ID NO: 472512 - DNA, 1000 bp, Homo Sapiens; identical to SEQ ID NO: 340101

SEQ ID NO: 472513 - DNA, 1000 bp, Homo Sapiens; identical to SEQ ID NO: 157697

SEQ ID NO: 472514 - DNA, 1000 bp, Homo Sapiens; identical to SEQ ID NO: 159981

SEQ ID NO: 472515 - DNA, 1000 bp, Homo Sapiens
ttttgggtcaaaagaaagctctttattgattgactcagcaatgcagggctggcacccatcagcttcaaaccacatcttatcgcatccactcctgtccactcccgtccactttgccctcttccaggctgaaatcttgctttcaggcaagggcttccggccagccttgcattagttctcagctatggtcttctgaacccagtgctggatggaagtcaccttcacatacacaccatactcagccacagcacagctcttatcaaagcttaggatcccagccgcgtaccaggtgtcctcctccaggtcgtgaacggcaaaggcactgcccgcatcgccatagcaggtgtcttcctggtacttagacatgccgacacagaaggtgtgttcgttcagtatgggctgcacccctacagggctcttcggtgccttccatttggggcatgtgctgccttcataatgcgttatgcaatcgtattggtcagccacaggcagcatgacatacttcagatggtcagtaagtttaaagttgtcactttgtccccagccagacacgtaacccacacgccctacttctgcataattctttgaaggtaggcagatgggcatcactctctcattaacaagcaccttctgtttgagtttgatgagcccaatatctacctggtggtagttagggtgtagaaccaccttctcaatctctacaagctgctttttccccacatagagtgttaaagtaggggcaatgtctttcgctgttgcattttctgaatggttcaggaagagatttttagccgtggtcagcagccattgttcattgatcagcgtggcccctgtggtgagattatggtgggaaaccatcttagcctgccagggaaagctgcctttggcatccaggtgtccacccaggatccgctgcactgggtttgccggattcttgggcttcccacatactgcttcacattcaggaagtttatctccaacagccttatttatccactgcttc

SEQ ID NO: 472516 - DNA, 1000 bp, Homo Sapiens
ttttttttttttttttttttttttttttttttagaataaaatgtgttttattcatgttttacaaagtctttattatctggattggggatgcacaacccacacttaaccccaggtcttaggtccagagtggtggtggaggactttagcccagatccagtgacaggacaagtaaacaatgacacattgggctttctgccctcaggttacagtatctccacatgtaagtgcttagaatatagtgcagtgaataataagaatagagaaaactgagcaagggctctccagtggccaaagattctcattcctgagaagcaaaaattaggtgaggtaacttgtcagaggaagcaaattcagggctcactagagagcacagagcatttgtccatcagcagttcagtcatcgccagctctcctggtaccctcgaacacttcagaaacacacacaagtcaagtccctcgatggctacactaggcgcctatggctggagcctccttggcacgagcgcaccatccgaggcacagctgcacttctgcaccctcatgttgggcaggctgaccacctggggcctggtcctgcctccctccttgatgctgacgatcatgggcagcgagtcagtctccgaggcgatgcactgtcgaggccccagaaacggccacttgaaggccagggcctccgggggctgccggcaggtgcccacacactcataagccaggaagcccgggggctccagcacccagttctcggcccacttcatcccctgcaggtcaatgtacatctcctggcggcagcagcgggtgccctcggtcattggtgcttcagggtcacagtcgccctgagctccatagtccccaaggtccagggtgtgcagctccagctggggctccccaagcccggctggcgccccctgcgaggcaaagcggaccagcttgtgggcgccggacgccagcgggcccagatgctccctctgcaccgacacctgtagcagcagcggctgccggg

SEQ ID NO: 472517 - DNA, 1000 bp, Homo Sapiens
tgagtgagggtagggcgacccaagacggtgggcggctccggccgggtagtgctaccattctagtattctttgaatgagattatggggtggtggcagagaggaggcctaaaatgagcgcactttgcaatgcccacttcgcgcgggcagcagcaagggttgcgtgcgttggcgcggctcggagggccggggaatgaacccagcctgccgcccccgtggaggcctgggccggccaggggtcagccagggagaagcagaaggaacaagtgcttttgagggccgccgccgtcggccaccctctacggctcccggctccctccctctcccttacccttagcacccacagcccagcgacagacaggtcctttcacagaaaatctgagaaagccagactgcctgggctcaagcaggcggaaaaggtggcccccagcagcccgggtcgctcctccagcgacgcggcgggactcaggctgccagcctgggagactggggagtagagggacccccagtccccgggggaaccgcctgggctgcccagctccccgcagtgcggcgccggcggctccagcgcgtacaagctgtggtccgctatgcgcagcgtttgagtcagcgcccagatgtagttgtgggcgaagcgcagcgtctcgatcttggtgagcttcgcgtcgtctgggaaggtgggcaggacaccgcgcagggcgtccagtgccgagttgaggttgtgcattcgattgcgctcgcggtcgttggccttctttcgccgactccgtcgctgcttgctcagtgccaactcgctcttaggccggctgcgtcccccgcgccgtgcccggagcttcctcggggcccctcggcagcctccctcttccgcctctgcgcagttcccccgtgtgcgagtggggctgggcggggcggacgtggggcaggtcacttcgtcttccgaggctctggggaaggaccgctccgtctcacgggtcacttggacagtgggcgcacccgagggttg

SEQ ID NO: 472518 - DNA, 1000 bp, Homo Sapiens; identical to SEQ ID NO: 341687

SEQ ID NO: 472519 - DNA, 1000 bp, Homo Sapiens; identical to SEQ ID NO: 159983

SEQ ID NO: 472520 - DNA, 804 bp, Homo Sapiens; identical to SEQ ID NO: 341689

SEQ ID NO: 472521 - DNA, 1000 bp, Homo Sapiens
cccatcgatactatttctccagtttactgagttccagtttgctgaccagaggtctctgtcttgttataggcactgaccttaagtatacatttgtaaaaacagtcagtttggcatagacctcctgtgggagtcctgttgacacaaacacatcaccatcacgggctgtaaacaattgatcacaaaatggaaaattcttggtttctttttactttttactttccctgatatctttccctttgtcttccttttctgatttgtctttttcaaatttttctttttctggtttggtcacactatcatacgagggtggagacgtggtggaaggcgtcatatcggttttctctggagttgaattctcattcagtttatcaatgagagtatcttctttgatgggtgttccatcacattctttgcctttgtctttcttgtatatacttgatacctttttaactttttgcttcaagaggtagcgtctgtaagccctctggataataatagcagacacctcctcttgtttgcgtttcaacgtggtcgtaatgggctcataagagactttggaggggtttgatgccatgaatcgctcttccatctgtattcgaagggcatccatctctccactctcacccaaaacacgctttgtaaaagcaaataagatgtcaagacagtggatccggtcaccactcaccatgggcagatccatggcaatgagctggactttgttgggttttgctatgagaagaggaggatccagggcatctgcaaaatcagaaagtttggcaaactctataaactgggtcgcatcgggatcaaacttctcccaaacctcatagaacatctcaaagtcatcctcactcagaggctctgcactttcttcagtagcaacactgaagttctccaggatgaccgcgatgtacatgttcagcacaaccaggaaggatatgatgatgtaactgacaaaaaagaaaatcccaacagatgggttcccacagtctcctttaac

SEQ ID NO: 472522 - DNA, 1000 bp, Homo Sapiens; identical to SEQ ID NO: 159984

SEQ ID NO: 472523 - DNA, 1000 bp, Homo Sapiens; identical to SEQ ID NO: 159985

SEQ ID NO: 472524 - DNA, 1000 bp, Homo Sapiens; identical to SEQ ID NO: 341691

SEQ ID NO: 472525 - DNA, 1000 bp, Homo Sapiens; identical to SEQ ID NO: 341692

SEQ ID NO: 472526 - DNA, 1000 bp, Homo Sapiens
tttttttttttttttttttttgaaatagctaacttttttattaaataaaaagacttaaataaaaggaacgaaaaagaagaagagtggacccagcctaaacgcagggtgccccgggcccctggcacttcccccagcggccgggtcggctgcccttcctccagcggcccccgcgggggaagcaggtggccggtttctaaagaaaaaagccaaaacttttttattatttacacgtttgggcaaaagtacaaagtataatacaggcgcccggcccggggggtgcgggcggggggcggagaaacgtaaggcgctttcttgtcaggcccgggcctggggcgggacggggcgcggggcgggggctcggattgtgcggccgcgcggagctcgggccctacccccttccgcggcccgccagtctgtggccgcgccctggggcctactcgggctaggcggccccttcccctctcggcgccggttcccccgcagccctcctggggggtccggggcgcccggctgggtgggggcggcgatccgtggcgacggtgcgcgctggtgggctcacaccagggaggtgacagcgggaaccttggaactatcctcctcccagggctgcagattctgcagagcaaagagtgacgagttgtgcagacagagcgggtcaggctggatggagtcgttgaggctcttttggaaggcgtcgtgttgcagctgcagcatgagccggctcgcctgctgccgctccgcctcccgctcctccgccgtctgccgccgccacttggtcctccggttttggaaccaggtcttgacctgcgcgtccgtcattttgagggacttggcgagcgccgccctctcggcagaggccaggtacttctggcgatggaagcgcttttccagctcgcagatctgcacccgggaaaaggacgtgcgcggcttcttacgcttgggcggcgtccggttctggtaggggtggccgatgcgccgggtcacggtgaagggcgtgagt

SEQ ID NO: 472527 - DNA, 1000 bp, Homo Sapiens
tttttttttttttttttttttaaatagaatttatataaatttattaatttatttttagttgtaggaaacatcagaaaaaaagtaaacttgcccagcacttcatagctgtattttgggtttttatcaaattcagctccatttgacataagcaatgattatcttctcaaatacaccacccaccaatttcatagcatcattctttttccccaaagcaagaaatcatatgctgttctcagtgcactccaagccattcattcatttcacctacactctaaaggtacaaagcttcccttctttaaacacacaaggtggcacctatgaagcacgacagagatgaggactgaccattattggttaaggatcaattgcaaccatctgcagaagccaaaagataagattaaaactgccatttgcagtaggggcagccgtgggaccacctttgaatcccgcactcccaaacaggccatgtttcagagtaagaaaagtaatctagaatgccagcctgtctgcacgtcctctgaaaaatggcacatgtcatcctgatcaaagacaccagagggggcacgatacatattcaaatatctttactgactagcgagtctattatttttatttaagagaattttttaaagcactctggggctgattaatttatgcaaagtatttccttaataagaataaaatgaatttaacactgattctgttttcaagtttggaaatgactagggaatggttcaaaattttaccttatttcccacccacttctcaatgggtcttggatttgtgggctttcttaactcgcccttttttccccaagcatttccggtagccataagcacaacatttaaaggtgatgaaggccactgtcagcacgacggccaagaggaaaccaatcacgtccaaggaatggtactggtaccaggtgaggtcgtgggctgcggggcgcaggtgtggcgcgcccttgtgcctcatcacaaactccacccagaacacggccagg

SEQ ID NO: 472528 - DNA, 596 bp, Homo Sapiens
acatatgatgtgaactcaaccagtcagcttcaatgcaaaacaagtagtaccagtaagaggcataaatttccccacaagcggaattgtattgatggctctagcttattccctcccaaaagatgaacagcaaacaaatgaagtgaacataaactcaagattttattgtcttcataataaaagatgacacttagaactggatcacttggccctttctcttcttatctcctcccagttcaaaatgcttgcatcttttaatagccagcattctcttagatctgcagttgggctcaacgcactcaagccttagcacaatcttctttgtagttttagcctttttccggaaaatcggcttagtttgcccaccatagccactctgcttcctgtcataacgccgctttccctgggcgtacagagaatccttgcccttcttgtactgtgtcactttatggggttggtgcttgccacacttcttacagaaagtccggcgggttttagggacgttaaccatgcttgcgtgagcgctatcggcgcggaaagaaagaaaccgcgaggcaaacggaagtatataggaggttcccgatcgcacttcctcatgg

SEQ ID NO: 472529 - DNA, 1000 bp, Homo Sapiens; identical to SEQ ID NO: 341693

SEQ ID NO: 472530 - DNA, 1000 bp, Homo Sapiens; identical to SEQ ID NO: 341695

SEQ ID NO: 472531 - DNA, 1000 bp, Homo Sapiens; identical to SEQ ID NO: 341696

SEQ ID NO: 472532 - DNA, 1000 bp, Homo Sapiens
tttttttttttttttttttttttttttttttttttttttccagtaagctcctgaaagccttccctttattagcccaccttgcaggaaaacgtcagatgtcagactggctggctgtgtcagacagtgttaatgccatgccccagcccctcaccttggcaagctgggcaagggaatcattatattacaatttataaataagaaataaaataaaattatcgggtggggctgaagcactgggggagaggctaaatagtcctctttaaggagtgcgcaccatcagccctacctacctaggacccggtatcacctcctctcagtacgaggttgcccctaagccaggcatagccccattttctccctccccctccctctccctcccttccagtcggcatcgtctgctgcccacagccccatatctcagccagcaggccctcgtttcctcgggcgcttcgaggtttctatgcctgggacgctcagcccagtagctcctccgctaagcggtagaggagccgagagtaccaatgcatgccagtcggctggacggccccgccggggagcagcgcccctagcgcgtgcagcagtctcaagggggcaaaagcgcggtgcgcccactggtgactctccagaaccgcgtagcaagaggccaggacatcgttcaccagcagcgtcccgtgcgcggtgagcggcgcgaacacgcccacggcttcctcccgcgccacacgggccacgcgcgctggccgaagcgcatccccgccgggcgccagcaccgagtccccagcgcgtagccggcgcgcgaacaccggtgcaaagtcgcctggcgcgggcgccggccctcgagcggcaaacaccaggtgccagggcgtgagcaacagtttgcgtggaggccactcggtctccacagccacaaatgaagcccggcgctgcaagtcccggtccaggaagagcagcaccggcgtgggcaccacccggcctgacgcatcggccgccaaaacccagtctc

SEQ ID NO: 472533 - DNA, 1000 bp, Homo Sapiens; identical to SEQ ID NO: 159986

SEQ ID NO: 472534 - DNA, 1000 bp, Homo Sapiens; identical to SEQ ID NO: 341699

SEQ ID NO: 472535 - DNA, 564 bp, Homo Sapiens
gagatttcaggcatcgtatgtgtattccagcactttacagaaaaggtgggtggctctgaaaagagcctttggtttctgggactcgggatcactgacggatttgactagtaatcatttcacttgcccttggccttatggtggctctccgtcttcttaggcagcaatacggcctggatgttgggcaggacaccgccctgcgcgatggtcacgcgacctagaagcttatttagctcctcgtcgttgcggatggctagctgcaggtggcgcgggatgatgcgggtcttcttattgtcgcgagccgcgttgccagctagctctaagatctcggccgtcagatattccagcaccgctgccaggtacactggagcgccggccccgactcgttcggagtagttgcctttgcggaggaggcggtgcacacggccaactggaaactgaagaccggccctggaagaacgcgttttagcttttgcccgagctttgccgccttgctttccacgtccagacatagtggcttcctaacagcagaagaactaacaatccactgaataaagaaaaagaatg

SEQ ID NO: 472536 - DNA, 1000 bp, Homo Sapiens; identical to SEQ ID NO: 341700

SEQ ID NO: 472537 - DNA, 1000 bp, Homo Sapiens; identical to SEQ ID NO: 341701

SEQ ID NO: 472538 - DNA, 1000 bp, Homo Sapiens; identical to SEQ ID NO: 341702

SEQ ID NO: 472539 - DNA, 1000 bp, Homo Sapiens; identical to SEQ ID NO: 341703

SEQ ID NO: 472540 - DNA, 1000 bp, Homo Sapiens; identical to SEQ ID NO: 337464

SEQ ID NO: 472541 - DNA, 1000 bp, Homo Sapiens; identical to SEQ ID NO: 341706

SEQ ID NO: 472542 - DNA, 1000 bp, Homo Sapiens
tagtctcagtttatgagagtatttctttctgctttgacaatcagcagggatcataaatttgaagcaaatcgtggcttttctgcgtctgggtctgtgtttaagactgaggaagattctcttggaagagcagctgctggtggagggggtgctggagggactcctcggttcggggggatggctcccgacgacatctgtcggaagagggtgacgcgctgcgggacagtgctcctgccccctgcctgaaggcccgttccggggaccgccgtcacgggttgagggatggaggccagggactcgcccacagtgggatgaggtctggaaatcagagtgggcacctcatggggcagcgagggctgcgaggcggagagtggcctgacttcccgggtcaggttggtgttgtgaagcgcctgcgtgctcttgtgcacttcatttttcggcgtggagctgccaggtgtctgtggctgcggggacggctgctgtggctgagtctgcggcggctgggactgctgtacctgctgctgcggctgctgttgcatgagtgacagctgggaggcggtgggggaggcatagtggaaagttcgagcggccagagggctctgtacaggagggctgcagaccgcggtggtgtaggagcagggtgacaggatggctgatggctggggggtctgtgtgctgggactgggggagtgcaggttgctgtgagacaggctggtcgctgtgtacaccggtggagattgtgtcctcatgcgggaggtcggggtcgtagtagacgatgcggaattcagggttgtcatttgaggataattgatgggagcgattgcctgcaccatctccctgtcatgtttcacaatctgcttgaggatttcgttctcctgattgttgaaaacaccagtgttcagatccttctggaacttttgcagaagaattgaatttttctttcctattcgatctagtcggtcaatggcaactgtctcaaaggctctcctcatcattggatatt

SEQ ID NO: 472543 - DNA, 1000 bp, Homo Sapiens; identical to SEQ ID NO: 341707

SEQ ID NO: 472544 - DNA, 827 bp, Homo Sapiens; identical to SEQ ID NO: 159988

SEQ ID NO: 472545 - DNA, 1000 bp, Homo Sapiens; identical to SEQ ID NO: 341708

SEQ ID NO: 472546 - DNA, 1000 bp, Homo Sapiens; identical to SEQ ID NO: 341709

SEQ ID NO: 472547 - DNA, 1000 bp, Homo Sapiens; identical to SEQ ID NO: 341710

SEQ ID NO: 472548 - DNA, 1000 bp, Homo Sapiens; identical to SEQ ID NO: 159989

SEQ ID NO: 472549 - DNA, 1000 bp, Homo Sapiens
gtgtgctgccatagatatctgccattggttgccaaaaatgcttagttccctcttctgagcgagttccattgggcaatcatgaatttcttgtgggaagaggtgaaagaatacaagagagcctgtcgtgatgctgatgtccatgccagtcttgagcacccaccacgagctcgcatcgatgctatttcttaggtctgttgatctgcgcgtacagaggctctggctcccagacctgcgctatctagctaccggcctgtggacttatattatcaccactgggctccccactgggctcaccaaatggatcactgttggatgaggcctgtgatccatcaggagcttcttgctcttcgcttttgctgggactttcaaagccctcttcaaagatgtcatctgtggtaggatcactggcatgggatgcagatgatttggatggagagctctgtctaggggctggggttggaggtgagttggtcgatggtgtggtagaagtcacaggggtcaaattcaactgggagatgtcaaagtcatcacagtcgtctgtatcctgtgccaccccgactttgttgaagtaactggagaaggcctctgaggtacaggtgagggagggctggtcgggtttgcgggagggcacgggcggaggctgggccatctggaaatccttaaacgtttctttgcccattttctgcctgggcttgtcggtctgtggacttgacctggtggagtcactcgtgcctgggacggtggcaaggggggtgaggggaccttggaacatggcagctggcaaaggcataacagtttgtgtgggcatgaaggcggctggcggaaactgcccggccacagttggccagggctgctgagtggcaggaaagagacccggctggccccatgcgatgggctgagcccccggcatcacctgagcgactggtggctgggcacccatgaccatctgctgttggacgaggggctgctgaccccagaaggacgggaggacagcgcccat

SEQ ID NO: 472550 - DNA, 454 bp, Homo Sapiens
tttaaatgcacaccggtatgggggaattttattgtattttcaaaggaaaaagtgggtcagaaatgagaggattaactggatccagttgcattttggctacaggtagcccgggtcacaggaggaatcttcatccctgggagttcctgctgtgcttctgcagcagggccaccaggatgctctccaattccatttgcttttgttctgcccacatgctgtctacctgacgaccaagccgtgcccttgctcctcgctcttggttgctctctccctgctgcctgctcatgatgtcctggagcagcttgcgggcggacagctggcccagcaccttccggtagctgttggtgaagatggcatctgcataccgccgcatcctgagggtcaaagggggaggtggggagcagtgggagctgttgctgagggtgaggatcacaaagaagaacacccagagtggcat

SEQ ID NO: 472551 - DNA, 1000 bp, Homo Sapiens; identical to SEQ ID NO: 159990

SEQ ID NO: 472552 - DNA, 1000 bp, Homo Sapiens
tttttacaaggagaaattgaaaaattaatttattatatgaagaaacaggacaatatttattagcatcaacgactgcagagaagcagtcaacgaaagctcatatccacaatgcattgactggtaagtactggcacatacactcataaccatagcactaatgttttaaggtggtttccaaagaaatgctgtatttgacaatcaattttaatatatattttcccatttacaaggctgaaaagattaaactcacatccaaataatgccttgaatcagcattcaagttgtaaagcacaattatcaaaagatgttgctatatcctttatcgaaaactatactaaaatgataaattcatttgccaccagaaagtactttctcagattcagtgggtctttttcttccaagtgccatgtgtttgggtgctatttttgtaagcaactagtggtaagagaaagggcacctgtcgagaagaccaaagattcgcatatccactcaggaactcatatgaatgacactacttatttcttttcaaacagtaaaaaaataaaaataacctgcttatggatttgaataactataataactctataaatatgcatagcacttaaaaacattttcaaagcattttcacatctattatttaatttgatctttctgataaccttgtgaggtaggttggaaaagggtattatggggaaactgaggcatagagcaattaagttgtagtgctggacagggaagtgccaatctctacactgggctgtctccagcaatgagaggaagtctaaacatgtttgatgaacttacttcaatatattttgaagacatacttcacccccatccagccaaatgatagcaattcagttggagcaactatcctgacaagttatgggatgtaattaattagacaaagcaccaagaaatttaaaaattgaaattataactgaaaaacacattttaactccaaacacatgagaaaagttgctggtttgttttatgccaa

SEQ ID NO: 472553 - DNA, 1000 bp, Homo Sapiens; identical to SEQ ID NO: 341712

SEQ ID NO: 472554 - DNA, 1000 bp, Homo Sapiens; identical to SEQ ID NO: 159991

SEQ ID NO: 472555 - DNA, 1000 bp, Homo Sapiens; identical to SEQ ID NO: 341714

SEQ ID NO: 472556 - DNA, 1000 bp, Homo Sapiens; identical to SEQ ID NO: 341715

SEQ ID NO: 472557 - DNA, 1000 bp, Homo Sapiens
gagagtgcagcccttctagactgagctgcaaagatggccctgcctccatgccttgttgaacatgatgatgcccctgggaatgggaggtgatggttttttacttcggccctagtacagagtatgctcttgaagctggattccatcagcaggtaagtgaacatgacaaatgtcagtttcctctgtccattatacataatttttatgtatatatatgtatatatataaatttactatatctgatagttcctttagaagccttttatgtggcagtaggcctccagggaggagaagaaaatgtacaagagccataggagcacaaagaggcaggatgtgaggagcttggcagtccggggcccacccagctcacctccgatttctggcctccgccgatacagcagcacccccacattgatgaaagcaaaaatggtgaagagagtgacagagaaagctagtgtgccaggggacactttgaactgttccccattggctgcgtggtagatggcagcgatggaccaggccacaccgattcccaggaagacattcaccgcgttgctgcccgtgacgttacctatggaggcgtctgcatactggtcctgggtggctgccactttgctggcaaatgtgtctggcactgatgttccaagtgcgacgaacacgactgcagtcacagaatctttcaggccaatggtgcagccaaagtgggaagccaggtctccaatgaaagctgtcagtaggccaatcatgaggatggagacaatgaaacacgcccagccattccagtattcagtaggggggacgaaggcaaacaggaccttccagaacacagtcagaaagtgcatcacgtaatcgaaacaggagggcagcttctcttccccacattcatcgtcgtcatcatcttccccagcactgacagtgatagcttcaatgaactgttctctccagctgttagtcccaaccacaagggccaggtttgtcttcttaatgagtttgtccacagtac

SEQ ID NO: 472558 - DNA, 1000 bp, Homo Sapiens; identical to SEQ ID NO: 341716

SEQ ID NO: 472559 - DNA, 1000 bp, Homo Sapiens; identical to SEQ ID NO: 159992

SEQ ID NO: 472560 - DNA, 1000 bp, Homo Sapiens
tttttttttttttttttttgaaagcacatgctgaaatttattctaaaggggaaggcccctttttattaaacttgtacattttactttccttctttcagaatgctaataaaaaacttttgtttatacttaaaaaaaccataaatcagacaaacaaaagaaacgattccaacatcacttctgtgatgagaaaagaggcaatggaattcaacataagcaaagaaaactctacctggaggaaagaaatcgatcagcgaggaaacaactcggggctgctgccagactgcaggccatgcgaggaggagcctcctagaggatttccaaagcaaacccatccctgccagaccaggaagcagccgtcctacctcccagagaaacagacctcagccctaatgatcactcaaatccgagtcaatccctctatttaaaaaaagctcacacatagtctcccctcccttccccagtcctcttggcgacagggcggtcacaggacatatgtgttcttcaccagctgctccttgtcatctccggagctccagacggtgcgcagggcacgctcctggttcctccgtgccacccggatcaggtagaccatggaggctcccaggaagaggatcaacaccatcacgaacagccccgccagaaccaccacctttgagccaaggggcaggggaggattctcctgctggcggaagcagcggagcatgcaggcctcctcagagcggtagctgttcttattgccccggcagcctccatagatgaagttattgcaggagttcctctccacgtcaaagtaccagcgtgggaaggatgcacggcaaggcccagtgactgcgttggcggtgcagtattcttcatagttgaacatatcgctggagtggtcttcagaatcctgccttctgggagcacttgggacagaggaatccgctgcattcctgctggtggccaggtcacccgtggcattctctgtgacagtggcacatttcttgaggcactcctcctt

SEQ ID NO: 472561 - DNA, 482 bp, Homo Sapiens; identical to SEQ ID NO: 341718

SEQ ID NO: 472562 - DNA, 478 bp, Homo Sapiens
ttttttttttgatttaattcttcagctaaaacagcggaagaggtgatttattatatggttgttacactcggccacaaataaacacagaaatagtccagaatgtcacaggtccagggcagaggaccaacatgggcattttgtttatgagcaaggtgggtctcagaggtgatcggcgatcagagggcgatgaagttctagatccattgagacaagctctagacagtagcatgcagtcccacaacttgtaccagcatccccagcgtctggcattccatgtttctgctcctgtggcctccacggtgcaacaagctagcggtttacttggacctctgcctcatctttcttcttttgcgcttcagcctgcgcattcgcttcttcctccacttggctctcatggcgcagaggtttccaaaaaaatggcgctaaggccgagagaaaggcgaagttccgtctacggctatttaatggagcgccgggt

SEQ ID NO: 472563 - DNA, 1000 bp, Homo Sapiens; identical to SEQ ID NO: 341719

SEQ ID NO: 472564 - DNA, 656 bp, Homo Sapiens; identical to SEQ ID NO: 341720

SEQ ID NO: 472565 - DNA, 1000 bp, Homo Sapiens; identical to SEQ ID NO: 341721

SEQ ID NO: 472566 - DNA, 1000 bp, Homo Sapiens; identical to SEQ ID NO: 341722

SEQ ID NO: 472567 - DNA, 1000 bp, Homo Sapiens; identical to SEQ ID NO: 159993

SEQ ID NO: 472568 - DNA, 1000 bp, Homo Sapiens; identical to SEQ ID NO: 341724

SEQ ID NO: 472569 - DNA, 1000 bp, Homo Sapiens; identical to SEQ ID NO: 159994

SEQ ID NO: 472570 - DNA, 1000 bp, Homo Sapiens; identical to SEQ ID NO: 341726

SEQ ID NO: 472571 - DNA, 1000 bp, Homo Sapiens; identical to SEQ ID NO: 341727

SEQ ID NO: 472572 - DNA, 927 bp, Homo Sapiens; identical to SEQ ID NO: 159995

SEQ ID NO: 472573 - DNA, 1000 bp, Homo Sapiens
atgcttccctcaagaacatcaacagtgttcaagcttagctttgttacagaaaatgaggtagggtgcggtggctcacatctgtaatctcagcagtttgggaggccaaggcaggcgcatcagctgaggtcaagagtttgagaccagcctggtcaaaatgatgaaaccccatctatactaaaaatacaaaaattagctgggcatggtggcacacgcccgttatcccagctactcaggaggctgaggcactagaatcacttgaacccaggaggcggaggctgcagtgagctgagatcacgccactgcattccaggggaaaaaaaaaaaaaaaaaaccgcaacagatgtctcaatttttgacattagtcatcttgaagaacacctctaaatgcatgaactcactgcagactgacccaacctcttaattctggctccttgcttttcctgcctctgcctacctttgagacacaagatctgtgaacacccaggctgtacagtggcatgataatagctcactctaggctcaagcaatcctcccacgtcagcctccagatcagctaggactaggcatgcaccaccaggccaggctaattattttttgtagagacagcgtctcactatgttgcccaggctgatcttgactcctaccctcaggtggtcttctgcctcaggtaatacattacagacagtgagccaccatgcccagttgctgcctacattttcaatattccactcaacaaacattgacacttcctgggactggaaagtaaaaaaaatctaagtactgtgtagaattaagcaaacaagtgatgtttcagaagtaacccattactgcttaaaataaagcctacatcaacactcttaactcaaacgaggacaattgttatttagtttttatttcataatcataaacttaactctgcaatccagctaggcatgggagggaacaaggaaaacatggaacccaaagggaactgcagcgagagcacaaagattctaggata

SEQ ID NO: 472574 - DNA, 1000 bp, Homo Sapiens; identical to SEQ ID NO: 159997

SEQ ID NO: 472575 - DNA, 1000 bp, Homo Sapiens; identical to SEQ ID NO: 341731

SEQ ID NO: 472576 - DNA, 1000 bp, Homo Sapiens; identical to SEQ ID NO: 341732

SEQ ID NO: 472577 - DNA, 1000 bp, Homo Sapiens; identical to SEQ ID NO: 341733

SEQ ID NO: 472578 - DNA, 1000 bp, Homo Sapiens
ttttttttttttttttttaacattctacatttagtaacatttatttatgcattcagtatcaagtacataagtgcaaatatccagagtccgtaattgaatccattaggaactacagagaaagtaatacaaattgtaataaagttaacatgctggtactttttagtaaccatacatgtaaatcagcccaccaatcccatacaacaaaagtactgcatgtttgttttggatttattcatttatttaattattttaagttatacaaaactgattaccataagtgcggtcgactgcttttatttttacgttgtgtgtgttggaaaaatgctaaaacatcagtctacaattctatatattgttattaaagattaatccaaccagcaacccaaggacatataagcgatttccactattgcatcagagcactcggcaggaaaggcctagccacggggaacattagaagctacagaagcattgcagagaagagaagaagaacaccgaagagggaaagataacttgggctctcaccatcatgcactttttttagcaacacaaaattaaaaaccacatctaatacacttttctctatactttagtggttgacacaagtgactcaaatatcctaagagtacaaggaacagcctaaaaacagctgttttaaggtttgtctctaagattatggtactggagggaggggggaaagacaatcaatttgcagtaatgagtaagaagagagctgttaccactccagacattcctgtttgtgtccagtccccggtgggaaatcagtttactcagcgtgcctcttagcgcctgggattttagcctgaatctttgccacaacagcatttatgtgagtcctcacaagtcccagatattggtcaatctgtgcctggtgcttaacatacactacaggtagagtaaacattgaaaccacagccatgagcagcagggtcaggccattgaagagagcgccaacgtaggtcaggagccacatcaggac

SEQ ID NO: 472579 - DNA, 1000 bp, Homo Sapiens; identical to SEQ ID NO: 341734

SEQ ID NO: 472580 - DNA, 1000 bp, Homo Sapiens; identical to SEQ ID NO: 341735

SEQ ID NO: 472581 - DNA, 1000 bp, Homo Sapiens; identical to SEQ ID NO: 341737

SEQ ID NO: 472582 - DNA, 1000 bp, Homo Sapiens; identical to SEQ ID NO: 159998

SEQ ID NO: 472583 - DNA, 1000 bp, Homo Sapiens
ttttttttttttttttttttttttttttaaaaaaaactttattttaaaattttggttacagtttcattcttaacaagtctactactgtttaatctctcaggattaaaaaaacatttattaagattctaaagaattaaacaacaaaaggaatgtcaagagaagggccccattctcagggatataactgctattccagtttaataactagcttcaaaacaaaatgaatttttatattttctagatgaataatgtacaaccaccatcttcgtctgagcttgttattactttcaaacacaaagcttcattttaagcttcattttaagcttggttaaaaaaaaaaaaaaaaaaaaaaacggaatgatggccgaccttagtatgtagtgtgtaccttacaagaaatttgttaatcataacacagtaatgccattaataatgaagtcctcaatttagaatctgaacattcttccatcatggggggaagggggaaattcagtccaatgagtctgtatcaagatcttcatctcttgtttgctccacttgtattctcttttcagtaactggattaatgctttgagcccaaaatgagatatattttttattactgtagattacatgttgtttggtgctcagtttccatttgttcctcttgcttgcgttttcgatctgctgcttctttctcatgttggcctttcagcatattccttctgtgagcagtctgaaagttcctcccaccttttctcttcttttcaccttcttgatcatctccttcttcttcagaatcggaggttgaagtaacccctgttttagctaaatttttcctttttgattcaacttctttcttcccctcttttttatccggctcttttcttggcttatcttcttccttctggccctcttcatccttcttaggctgctttttaggttgttttccctcttgcccctttttcttacttttgtcctcttcagtaatgatgtcactctctgaaggacagggctgttt

SEQ ID NO: 472584 - DNA, 1000 bp, Homo Sapiens; identical to SEQ ID NO: 160000

SEQ ID NO: 472585 - DNA, 1000 bp, Homo Sapiens
ttttttttttttttttttcacattttgaaagtgtttattgtagaaggaaaagaaacgttgaatgtttaaaacaaaaccacaatattttatttttacaaagtgagatgcttatttacagcatttattattaactataacaccatctaccttcagttttcaaccatttcctacagacaaaatttaaaaggaagctccttgagcttgtttcttacaaagtaaataaaaatagatatacctgtattaactatgaatattttaaggcagttttgtgccggcatccatgagagactctgtccacctcctgctggtgcttcattcctttcagtgctgtacatgaccaaggcgagcaggggcagtgctcagagtctgatcgccagatgcagtgccctggagtttcctccccgcaagtccagcctgggtcagttccagccgaacaatttttgtgttttaaaaataatgtgtagactcaagataatttcactggatttaaaaatagaaataccatttcccacctgcctccttcactcctttctctaacactcaaaggcctatcctttgagaatcaaaataatatggttctttttagcaaagggatttgtgttttgccctcacatagcctaagccgtagagaaaatagataaaacgatctcaaaattattttctttcacagacaaatcatgtggaaaagacaagctactgctatgtcagggatcttgggcagagagaccccactcagtctaccaccttgagaaggatgtggcaggacccagtgggtttaaatagttcatcctgtttactgtaacatccttggtacatatgatttttttgtgctccttggagacttattctttctttggagattataggctgtttctcagtcctaccctttctaacactctcttcctgtcctcatctgccctcatccagtctccacgtgtctcagtttctgtatccgtgctccacggcagcctccttttaaggcttgaagtcttctgggcgg

SEQ ID NO: 472586 - DNA, 1000 bp, Homo Sapiens; identical to SEQ ID NO: 341740

SEQ ID NO: 472587 - DNA, 1000 bp, Homo Sapiens; identical to SEQ ID NO: 341741

SEQ ID NO: 472588 - DNA, 1000 bp, Homo Sapiens
tttttttttttttttttttttttttttttttttttagatgttttaggactttaatgttctttacatattcaacataaaatactgacaatagataaacaataggggaaagacttttcagcaaagtatcactctcgtagtcatacattacaaagaaaacagtagagaacaaaggatagggtaatttaacagaaatgtttagtttaatggcataattgaaaaacaaccaaccaatcaactttctcttctacctatggaaagaatggtaaaaatgaatcaagaacttctaggtctttttcataaaacagcttaaaaagaggaaggcgaagactggggagggggtacaactcttgctaatggaatgctataatgcacaaggtcaaggatttaataaattctaaaagtgtctacatatatcagtgataactgtattattagaaatataaatgtatagaaatataaagtatatggtattaaaaacagaccttgctaatataaacatatataaagtatgtcacttctcctgtaataacagcataaagatcgatctacagtttgcccttcgcctggcactcttaaaccactcctccaatggtcaatgttgaccttgaatcaacagccgctgaacccaggagaccccacagatgtgtagattcagcacctagagggcccccctaccctctgtgctgtgtgttcccatgactccagaaataattaatcgcaacttgcattattaagtccacaggcaagtttgaaatctaactagaaaaagtagcagcaaaggcaaaatacgcgggaatttgttagaaaagcaacaagatttcttaaaatgcttccagttcaagtcagaattaaggtgacattaggtcccaccagctttacagagttgtggatgttttgctgttgttctttcaaaaaagaagaatctgcaataaacatgttcatttgagaaaaatactgtgttaactttttgtagccatccccaagttactttaaactttgt

SEQ ID NO: 472589 - DNA, 1000 bp, Homo Sapiens
tgtagagagaaaaatttattgcaaggcagccaagcaaggacacaggagtctggcccaaatctgtctctccaagttggaggctggggcagattttatatacagagggtagtgaggcatgatatgattggatcttgtaatgaggggattcaggaggcttgatctgactggatcacgccagggctcaatctgattggatcaaggatcatgccacgtggtgtccacttcttaactcagtccctgttcctcagtctgagcacttaggttccacgtggatttgcacgcttcgttcatctggacatgcccagggtatgtaacttgcaacctgggggtccacgacaactgaaaaacaactcgccattttattacacaaagttgaaccagattgggctgaatctgcggttacaatgtttaccattttattataaaggatacaactagaggggcggggcggtgccggcaagatggctgcgcccgaaaaggtgacatttccagagaaaccaagccacaaaaagtacagggccgccctgaagaaggagaaacgaaagaaacgccagcaggaacttgctccactgagggactcaggactctcacagaaagaggaggacacttttattgaaaaacaacaactagaaaagctatggggaagagagaggcaaagattacatgaggagtggttgctgagagagcagaaggcacaagaagaattcagaataaagaaggaaaaggaagaggtggctagaaaacggcaagaacaagagcgaaagttaaaggaacaatgggaagaacagcagaggaaagagagagaggaggaggaacagaaacgacagaagaaacaaaaaccggaagctgtccagaagatgctggatcaggctgaaaatgagttggaaaatggcgccacatggcaaaacccggaacccccccttggatttcagagtcatggagaaggatggagttaattgtcccttctacagtaaaacaggagcttgcagatttggagata

SEQ ID NO: 472590 - DNA, 1000 bp, Homo Sapiens; identical to SEQ ID NO: 341744

SEQ ID NO: 472591 - DNA, 1000 bp, Homo Sapiens
ttttttttcttttgtcatgagaaaagcaattgcaccttttcgtacgtgtgctctgatctgcttccaacaaattccaggtgctctcaggtccccacagacattcatttggagcatagaaagactaggtatgatgcactgaatggttggtatcaaaattcaagctcagagcacatgccaaaatgtcaactccaacgctagttacacataaccagctcccacccaatcaggtccccttctgtgtgtgcacatattactacgactccactaaaaagacacacctgtttctttcaggaggctggtctaaggaatagctgcccttgtctacgtgtgtgcccaggtagcactgcccaggggtacagcactgccactgaaatgcccttaacatgtacggccagaaccggctacgtgcacggacactcttggtgtgtcctgcgtttgctatctgaaatgaagttcttgttctctgattccttttggcagagcaagctttcagttgtttatggcacagtgaaatatattcttcaatgctatgtaattttggactaaaaagtctgtttaaggcacatgtctcagtgtgaatattaaaaacacacacacacacacacacacaacgctcagtccaagaccaatgtccttcacatttagtttctgtcttcaagtaatgagttgttctccggctcccggtctttggtgtccgtgggtatcattccgttctccaactcagcgtgctgctggatacagtccgtcagcatggctgtgctggagttgtctgagttacacatcttttccgtctcctcctctttcttctcctcgtccagggagtaattccggaaggtcttgtagattttctgaacgtcctcgggcaaggtctttttgaggtccttgtttttcctcttggtgagtctggaggtggacccgaacttgttgatgatgttgtcctcggacgcaccctgcccatgcttgttcagctgctccggccccttcaggcgcaggttgttgg

SEQ ID NO: 472592 - DNA, 1000 bp, Homo Sapiens; identical to SEQ ID NO: 341746

SEQ ID NO: 472593 - DNA, 1000 bp, Homo Sapiens
ttttttttttttttttttttttttttttttttttttttttttttttttttttttttttttatattaaaccagataaatgtttacttagatgttcaggtggttggagcagattaacaaggaaaacaatcacaaaataaatagttttgttttgtttttgttatttttttttaaaaaagaacatttcctacacattgtctctctctaacttgacagagcttctttcttcgacagagagatgctgttggaaaggagctctgaagggaccacaatgggaactgggaacaatccagggccctgaaacttggtggggggaggaggcagcagagggaggagtaagggaggggagcaaggaggccgctgcctgcccttggcgctggttcctgttggttgtacttcttgtgtttcccagtcagcgtctgggagggcacagaggaggcagcatacaaaagtaagaaccaatgtcaggattcacaaaacaacaacattttaagaaatctggttaaaaagaatacaaaagtgactccacagaggggaaggaagagctccgacccctcccattgttgtcccctcttgctttcttgaatgacaagaatcacttttaggatttttgtttgtttcatggttcagctggttctttttcttaatctcttccttggctcctttctttcaattgcattcattttagaaagcaccaatcaactttacagatctgaggctacttagttgtagcctccctgtgccagtgtgtgtgtgtgtgtgtgtatgcgtgcgcgcacgcacgcagtagctgtttctctctcgcctgcttcagctcgagcctcgaggtcccatctactggatgctgaaagtctcgtgggagcacaccctgttggcactaaggtgagggcttagattatctttgtaccccagattcatggatcccctccttgcccagtgctgaagtgggccgcccattagctacagagtttgccggtctcatattccacagggtttggcagct

SEQ ID NO: 472594 - DNA, 1000 bp, Homo Sapiens; identical to SEQ ID NO: 341747

SEQ ID NO: 472595 - DNA, 893 bp, Homo Sapiens; identical to SEQ ID NO: 160001

SEQ ID NO: 472596 - DNA, 946 bp, Homo Sapiens; identical to SEQ ID NO: 160002

SEQ ID NO: 472597 - DNA, 430 bp, Homo Sapiens
ttttttggaaaacaaaagaaccagccattttattccaagacctatgttctggggcagcaggaataaataaggaagggaggggacgggggcagggcaggtaggttctacgtcttgcagcacatcccacactttgatcgatgacagcagccgcagcagaaaatgcagatggggaagtgggtgtctcgcctccttcgcctctggaacatgggcatccagctggccctggctccagctctgtcctggggttgcagctctgcaagttgtcccgtctgttgtgggaaaacagagccactggtcaggctggcgaggaggaggaggagcaggaggcaagcggcccagatctgggagctcagtgccatcgtgccgtctgtctggctgtcccactgctgggtcttgagcttgctctggtgtctgggaccgagtgacagtc

SEQ ID NO: 472598 - DNA, 907 bp, Homo Sapiens
ttttttttttttttttttttttttttttttttttttttttttttttttttttgcatcataaattttattcccgatgcgggacagattccttccatccccaaatgaatcacatgctgccctggaaagacctaggaaactctcctaccatctccagagaagtagtgagaaaggcaggtgctggggactgggaaggctttgaagtttcccagcctacttatcctccccttctcaagagaggatagctgttccctattactcctctcatccactcatcccttaaaaaaaacccacaaaaccatcattagtaaaaaaacaaaaccccttcaagtattgggggttaggggttctgggctgggacttggggttatgggtcaccaatgaaagagggaggggaagaggaggaggagccatcactgtttctgctgcagggcttccttccttgccgcatcctgtagcaactgtgtgtcgacctcatctgctggcagctgcacgtatcggaccactgagccccgaatgaagcagttcttcactgataacatgtgagggtatttctcagggtctgtgacactgatgtcagttagtttgatgttgagatactgatccacagaatggagggttccacagatgctcaggtcattctttagttccacgaccacatccttgcccacaagggacttgaaaaaagaatagaagagcatggtgctggcgccgcgggcagcgggccggaccgggaagacagcagggtgctgcgagcaggtctggggaaaccgaagcgcgagcccgcgcgtggggcgaggcgggaccgcgcaggcgcagcgggaagcgacgcagaaagctccaagcgctgacgggcaaagcgcggccgacttgcggctggggagcgcaagctgggtagagtagagaggag

SEQ ID NO: 472599 - DNA, 1000 bp, Homo Sapiens; identical to SEQ ID NO: 341750

SEQ ID NO: 472600 - DNA, 1000 bp, Homo Sapiens; identical to SEQ ID NO: 341751

SEQ ID NO: 472601 - DNA, 1000 bp, Homo Sapiens; identical to SEQ ID NO: 341752

SEQ ID NO: 472602 - DNA, 1000 bp, Homo Sapiens; identical to SEQ ID NO: 160003

SEQ ID NO: 472603 - DNA, 1000 bp, Homo Sapiens; identical to SEQ ID NO: 341755

SEQ ID NO: 472604 - DNA, 1000 bp, Homo Sapiens; identical to SEQ ID NO: 160005

SEQ ID NO: 472605 - DNA, 1000 bp, Homo Sapiens
tcactcagtgaagactgtattgagttgggtcccaataccatgatgggggtaggaatcataggacatgtctataggaacatcataacggggggtaccagcctgaaaaggagttgaatgcacatgccctgagcttagacttgaagaagggtaatgtggcatgaagctgtaggatttttctaggtcaggagacccatcttgcttcaaggagaagttcccactgatgctcaggggtggagtgagtgggccctcataagggggtgtactgcagtcaggcagatggctcccaaaggacgattctcccaaactcttgaatacttggggcttgagatgaaggagatgtgtttccatatgaccataaggagggctaggaagccccggagactgatagttgaagttgtggacagagatggcagagccacaaataggagatttatcctcgtgcttctccaggaggacagactgagggcccagttggagacatccagccaccaggttgcttgtgggctgagagagccctttacacagcatctccacaaagcctttcccttcaggtgtctggccagtctccaggacttcagataaagcccaaatatagttcctggccagtctaagagtctctatcttggaaagtttttgggttttagagtagcatggcatgactcgcctcaggttatccagggcgtcattcaggccatgcatccgggtccgttctctggcattagccttgactcttcgagccctgaatctctcaaggcgagctttggtcatcttctttttcttgggaccccttctcttaggtttctccccatcttcttcctcttcttcttcttcctcaatactgtcatgctcttcagttaagctgctgagcatcccataagtacctggtctgctctcttcctccttcacctcattttgggagcccagacctttatccatccaggatggtgtgttgactagctctcccatctccttggattttacaaaagtttttgacatttcc

SEQ ID NO: 472606 - DNA, 1000 bp, Homo Sapiens
ttgatatgacagactaaaagtacatttcccaaagtttaaataacctgcattcaccgaagaggaaggaagggatctcttaaaactcagagcaaaacaccagcgccttctagcaacccccaacccggcccaacttcctacagaccccgccgtgtccccacgaggactcggagagggggagggggaacgacagcacactggcggtaaaattgtaacgggacgtttgcatttaccattttccccttattaggatccgctcggccaagtcccggcctcgtccgcaggctgcagtggtcgctgggaggtcccgagttgaccgtgggaaggaatcgtgaagttccacagagaagagacgtcattaaacccaaggacagtgggcctgcggagagcaggctggtgggaaggagggtgggtgagtggggctggggtgagggcgcttcctggagctctcaaaataaggggtttccagtgaaatactgcagacggtctctgttcagtttcttttctttcatcctgcgattctggaaccagattttgacttgccggtcagtgaggttgagcatccgagagagttgaagtcttttctctttgtttatgtacacgttaaagaaaaactcgcgttccagttcgcggatctggtacttggtatagggacagcgctttttccgggaccgctggggggcaactgcgctgctgctcttctcggcccccgcctctcccggggggccctcgccgtcgccaccgctgccttctgctgcccccttgggctccgagccaggggtcgccttggtgcagggactgcccccgccgccaccagccccggtcctggggtcgcccttgtcggctgcgccctcgggctgtggcggcgcgggtggcggcgggggctgcggcccggcgaacgggggcccgggcgctgcctcgtagaactggtcgaagccctgtggcaagatgccattgcggcccaccgcgctgtagaagttggaggcggcgcccgcggggccgt

SEQ ID NO: 472607 - DNA, 840 bp, Homo Sapiens
ctagtagagcgccagcgcctgctcccgaagcaccacgcgcttcttcttcatacgcctgttctggaaccagattttgacttgctggtcgctgaggttcagcctattggacaattccttgcgtttctgcctgttgatgaattcgttgacgaggaattcgttctccaactccgcaatctgctgcttcgtgtagggtttccgcttcttgcgggcctccccggggccgccccccacggcaggccggcccggggagcatgggcaccgtttaccgtcgggcagtgaaggtcgcaggcaagaggcaacgcccgccgcctgcactgtcatgttcaagttgagcgggcccttggtgtcgtccttgaagccaggggcgcagggagccccctggagcagggtcgtggagcccggcgtggcacgacccacaccagcgtagtcatacttggccgctttgagagcagccactgcaggagccaggctagactcgggggcgaaggacggccgggtacgaccgcgctcctctggcccagcggccgcttcgggcgcatagaacttagcctgctcttcgggtccgtctttggctgttgggggctgcaggccgagaggcccggagccagccaggtagggctgcgagaagccgccgaaggcagtggcgcccgcaggctgcgcgggggcgcaggaggcgggcgtggcggcccagggcagcgcgccgcgcgggtaggagatagggggaagcgcggccaactggccgccattcggcctcaggttggagaagtagaaagagtctggcgactgcagattcagaagcgagcccacatagcccgctctgtagagactgcgctcacacat

SEQ ID NO: 472608 - DNA, 1000 bp, Homo Sapiens; identical to SEQ ID NO: 341757

SEQ ID NO: 472609 - DNA, 1000 bp, Homo Sapiens
tcagagtgagtaactccaactggaagatctttttctggcaatgcagtggataccgttttggggatctgattggacactttccatgggaatctttataaccgagggaggagggaactggggctcctcatcacagtcctcgtgggcccctttttttctcttcctcttcttgtctgtctcctttttttccttctctgggaggatgttgtcaatccaggccaggtcgtgctgggaaaagatgaaatccagaagccttcgaacgatgatgaggcccaggatcatgaccgggaagatgatggcagccaccgtggatttgaggatccagagcaccgccaggcagaggatctgcaccagggtgaagaggtggatccggcgcagcggcacgtgccgcaggaaggcatggtccggctggtgcttggctggcatcaggaagagcttgcagcgttcccagaatggagtcagcttcttctggattttgaattctgaccctccggtccccatctggatgccattcagggaggccacgcccatgtagaggaagactccgtacagcaccggcagggggatacactttaggatgggagccaggaagacagagattcccgtcaggatgaagacgatgatgccggttactctctgttccctgactcccagaaactggggctgctccccaggggcactggtctctgtctccatcttgaggctgtcgatgtgggcgatggagatgaccgtggcagccacgtaccaggggagccccataaaggagcacaaagccatgaggatgcccacccagaacaggtccagatggtagccggcagccttcttcagtttgttctccttccggttgacaatgacggcagtgatctgctggtccatgaagatcaggatggtcaccagcagggcgggcaggatgcttgctgggtatacccaccacgggttcttcccaaagggggccacgaaccagcctcggtcaggccgcggtggcttgatgacactgggcaca

SEQ ID NO: 472610 - DNA, 1000 bp, Homo Sapiens
tttttttttttttttttttcttatttggttgtttttattgttctgtggcctcctcccacctgctaacatttaggcctcagcacatccggtggctacaactaggaatcacacattagtaagcaagttcatttccatttcctgaaggatgaatttatcttgggaacatttgagatgggtacatacctcccagagccagacttgggaggaatctgtcaaaaatatcaagatgctgagccttgtcttagaaaggggcttcagaaatgctttcatgggcggcggcttcttcccggggtaaaggtctcgtggagctgcagggccttgctcccaggatggtaaaacagggacccagagctgttaagtggctcccacaaagtcacccaaccaggctgggccaaactgggtttgagggccaggtgtcctgtctctaagcatctctggggtcttgctctgctgagctgaatgtgaactgtgagggtcaaactacttttcccaactgtttccaaggcttagcagaaagtagaggaatgttcttgcaacctagctgcttgccgttgctttactgaaagtgcttctgttgtccccttccaggttctgccacattctttgagtcaccttctggatattctttgtaaagtttgtgtcgtaggattcgcccatctgcttgccggcgctgcttgacgcactgcccacggttggggataccttcggccacgtcacctgggctcaggatgtggcactcatagcccgagggacagagcaggggttcggccccatcctccgtggtgctgcacgcctctgcttgtaacacctcctcagggccatccaggagccagccattgccaccaagccatcgaggtttcggctgcaccagccagtctaagactggcgggggcggcacagcttctaggcaggcgtaggcgcatccgttgtagcagcagcgccggtgccgcgggcactcggagtccgcctgacagcgcgcggcctggcaggcgccgggggg

SEQ ID NO: 472611 - DNA, 1000 bp, Homo Sapiens; identical to SEQ ID NO: 341758

SEQ ID NO: 472612 - DNA, 1000 bp, Homo Sapiens
ttttttttttttttttttttttttttttactgctagaaccaaccaaatctttattagtctcggcagcagaactaatggagcccccatttacaggggagctttagtgggctagtctggctaccaggcagggatgttagcatttctattggtgattgggatagaaagggggaagagactggaagggaaccaaagggggagactggtggaccacctgagggcaggcacagatggggcttcctgggctggtgtagaggtggatcaggccccagaggagaacactgccatcttattcagaatgaaggatgagacaaagcctgagagggtgacagtcacagctataaagagagggccgagctcctggtgtgagaggcatttctggacggaggcagctttctagggctggaagtctcaaatagaactcacctgttccccaaccaggggtccccaggttcagctcaattgttatcatgggtaccagccaggaagctgtttgtgggaaggatgggacttaactcaggagtgttttaggtatggacatgtgtcagtattcacaaaacaggcaatatattcattatagatgcaatcatgaaacttccctccagagaaggctcacatctcccctttcacctaggaagctccttagcttgaaggcccaccacggtctgatcccagcctccaccccagcccaaatgaactcccatttaattccttggacatgccatgacgttcacggctctgcatacttgccaataactgttcttccagcctacctgtcttgctccctgccccacctgtccttgtcaaaggactgataactcttcagctttgtcaagtccttgtttactcctgttctccccaccaggactcgagctccctaaggagagagcagagagcccgattcatgttgtgtctacagcgcctggggaactcgaagccaaatgaagtcgtatttgctgtgccctgttgtgtttagaggaaatgtatccataaatgtctataa

SEQ ID NO: 472613 - DNA, 1000 bp, Homo Sapiens; identical to SEQ ID NO: 160006

SEQ ID NO: 472614 - DNA, 1000 bp, Homo Sapiens; identical to SEQ ID NO: 160007

SEQ ID NO: 472615 - DNA, 1000 bp, Homo Sapiens
caaaaaggcaactttttttttttcttggcatcaatgaatatgcacttcagaaatctacagagaacttttttcactttgtatttgttccacagcattctagccaggagtacaaaataggagctcttcaagcagcacatgaagatggcccaggagccttcagccatccagagcagcagagcagcacctaaatctccacacacttcccagtataaccactaagaacacactagacccttggcattaggggatttatcatttccagttctattatctgggaatgactccaagggtttgtgacaagcttttgaaacgtaagtgctaagacgagtgtggacaagtcactgagctaatgaagaatagacccactgtctgcttggctctgctattttgtacctgtcttcacatgtggggaaacttcataactgtgcccacaaatcagagaaattcgcaaaggactagacaatgtattgcctgtgaacttcagaggcaactggaaatagtgcaactggaaatcaactagcttcatacataggcggatttgtttccagggaccaaaagcacagaagataagaaaacttttcaggtgatggccatattctcatcatatcctctctgtgtggagtctgcctgttgtcacaaaaaccttgaccctacatcaagttacaccttaacaaagggaagatacaggcatcagataaaaggtacttgtttgaaaggcagccataagggagaactgaacttaaaaaaaaaaaaaaaaaaaattccaagctggtttcaacagtactttgtttccagaacaaagaaatgtttctaaccacatcttgtaccccttcctcatcaactccagactaccacagacctttttccaaaactgtgtgtcacacatccaggtcttgtgctttagagctgcctctcaggcaattttagccagccatttctccaagtcctggatgtcagcagagcccacgtcccctcttccacccttggcactgcactccag

SEQ ID NO: 472616 - DNA, 1000 bp, Homo Sapiens; identical to SEQ ID NO: 160008

SEQ ID NO: 472617 - DNA, 1000 bp, Homo Sapiens; identical to SEQ ID NO: 341763

SEQ ID NO: 472618 - DNA, 773 bp, Homo Sapiens; identical to SEQ ID NO: 341764

SEQ ID NO: 472619 - DNA, 1000 bp, Homo Sapiens; identical to SEQ ID NO: 160009

SEQ ID NO: 472620 - DNA, 832 bp, Homo Sapiens; identical to SEQ ID NO: 341766

SEQ ID NO: 472621 - DNA, 1000 bp, Homo Sapiens; identical to SEQ ID NO: 160010

SEQ ID NO: 472622 - DNA, 1000 bp, Homo Sapiens; identical to SEQ ID NO: 341769

SEQ ID NO: 472623 - DNA, 1000 bp, Homo Sapiens; identical to SEQ ID NO: 160012

SEQ ID NO: 472624 - DNA, 1000 bp, Homo Sapiens
tttttttttttttttttttttttttttttttttttttttttttttttttttttttttgaaagcgtacaaaacaggatatttattaaatgtttatatcacaaacatacactagaaattaatacaaaaggaatcactattaaggctgaggcatgtaaaggcaataccatattaatcataattaagagatttctctcctactctgaatttttaggtacaaaataagtgctataccaggttttcctacatgctctacataaataacgtttctcacatttacaacaaggttttacggttgaacactctcccaggtccactgtatttgtagattcacgctccagcatgtgttctcacatgtgcttgaagcgatgcgagatacctgaaggttttcccacactgcttgcattcatacggtctctctccagtgtgcgttctcacgtgcacacgaagggacgaggaacaactgtaggctttcccacattcagtacattcgtagggtttgaccccactgtgtgatctcacatgcttttgaaagtactgagcgtggctgaaggctttcccacattgattacattcgtacggtttctctccgctgtgggttcgcacatgctctcgaagggaggagtgacagctgaaggctttcccacaatgcttacactcaaagggcttctctccagtatgcgtcctcacgtggattcgaagggaggaggaaaaactgtaggctttcccacactctttacattgatagggcttcaccccgctgtgtgttttcacatgtcttctaaagtaagtgggacatccgaaggccttcccacactgcttgcacacatagggcttctctccggtgtgcattctcatgtgtgctcgcagagaggaggggtacctgaaggctttgccacattccttacattcatagggtttctctccactgtgcgttctcccatgttctcgaagagacgagtaacaagtgaacgcttttccgcaatgtttacactgacagggt

SEQ ID NO: 472625 - DNA, 1000 bp, Homo Sapiens; identical to SEQ ID NO: 341770

SEQ ID NO: 472626 - DNA, 1000 bp, Homo Sapiens; identical to SEQ ID NO: 341771

SEQ ID NO: 472627 - DNA, 1000 bp, Homo Sapiens
tcaatgttccattttgcttttaaaagcttcacaagaacatttcatttattaaaatagtttctgtaaactctttcagaataacaaaattcacttgccttgcttaaacagcatttcaagtagaagtatttttatttcaaggcaccataaaatgatgatctctctaagaaatacctctccttccgtgtgtgaaaatccttgggggaaaaaaaaatcccacacggtgttcttggccatcaggatcatgaaaacaaactttggtgaatgtgagcaactgcgccagacaggacacaggttacagggcctgacgtcactaacggtaactgacaatcttggaatggaccctactgctgatgtttcaaaaggacacagaggtgaactggtcacttctaattaagaagagccagtggggtgggggaagctgaaaaccaaaaatccacgtagacatacgtggcagtgtgaacgtctgtcctccccttccttctcctcacttcctctcctcctcctcactcaggctggtattctcctggtgtgcggatgtcagcttgccctgcagaagggctgccagttttttagatgtctttttgagaaacgagctgcccggatgggcactgttcacgtgcaggtacaggtcctcctgggtggggcccgtgtagccgcaatcctcgcagacgtagagcttgtcccgccgctgcttataggcatactgctgctgcaccccatggattttcttcaggtgggactccagagagcagcgctgggtgaaggctttattgcagacgttgcatttgtagggacgaatgcctgtgtgtgtgcggacgtgcctcttcaggtcgaaggtgtcgttgaagcccttgccgcagaaggtgcacaggtgtcttttcacctggttgtggcacttgaggtgacggttcagcatgcgctgcagacggaagcccttgccacacaggtcacagctgtgaaccaccgagtcgctgcacgtgcctgtggtgaacttgatttt

SEQ ID NO: 472628 - DNA, 1000 bp, Homo Sapiens; identical to SEQ ID NO: 341775

SEQ ID NO: 472629 - DNA, 1000 bp, Homo Sapiens; identical to SEQ ID NO: 341777

SEQ ID NO: 472630 - DNA, 1000 bp, Homo Sapiens; identical to SEQ ID NO: 160014

SEQ ID NO: 472631 - DNA, 1000 bp, Homo Sapiens; identical to SEQ ID NO: 341779

SEQ ID NO: 472632 - DNA, 1000 bp, Homo Sapiens; identical to SEQ ID NO: 160015

SEQ ID NO: 472633 - DNA, 1000 bp, Homo Sapiens; identical to SEQ ID NO: 160016

SEQ ID NO: 472634 - DNA, 832 bp, Homo Sapiens
tttttttttttttttgctaaatacacaggcttttatttgttttcttcagattgctttttcgtgaatataaagatgaggagtccattctgcaacctaaaaatatttacttattaaaactatattaatactttaataaactatacaaaaaggtaatgagacaaacatctgcatttatggaactgcatgtcagtcaggccagttccctgcagagggaattcccagcatgacctcattcatctgtgaggacacagagcagtccttgtttagacatacacattcatctactgctcatcatggtcagccttccacttcttgatggtttccttctgctatgaatgcgcatgtccggttgtctgcttcttagagcagacatttaccttcctcatccaccagccattggagggggactagggccacgcagatgattgattctacccattcttcggggagggtttcctggtggccctcttccatcatcatatctggaatcagatgagtttccatagcttcttctttttttcacatcttgctgaagcagagttttgaaaaacaaaaccacaaactcagctattccccagaagaaatctgttatcaaagataatctccatggagactgactccggctgtccaacacttgtccgttcgagatgtaaaccatcttgtcccacttccccgcttcggagccaccgggcgcctggcccctgtcggtttctgtatctccctctgctccccgcccttcgagcgtcacaggccgcgattagacaaaatgctgacgaggacgaaggtgggcagagcccattggctgctgaaagagacgcgcccccgacgggcg

SEQ ID NO: 472635 - DNA, 1000 bp, Homo Sapiens; identical to SEQ ID NO: 341781

SEQ ID NO: 472636 - DNA, 1000 bp, Homo Sapiens; identical to SEQ ID NO: 341782

SEQ ID NO: 472637 - DNA, 1000 bp, Homo Sapiens; identical to SEQ ID NO: 341784

SEQ ID NO: 472638 - DNA, 1000 bp, Homo Sapiens
cccgcttcaagtgctgactttaattataaaagagaagatcaagagggttgcaggaatttttttttttttaacaacaaatcaatggtatgtgtcccaatctccttcttcctcttcctttagtgcaacatggcgcagcagcctcatggataaggtctgatttcaaaagacattcctgaaacctcacctacagcagcactctaggggtcccattaggggtggctctctttttcttctgcagccgattctgaacctttcgagattttactactttcattctcacctcaaaaacttcatgaatggccttccggaagcaatgaaaattatagtcaattagcccttttctttcaaagctttcctctctgacaaagcaaacgagagccaggaactttgtcacctcttttaaataaagcacggttgtattattaagctttatgatggctgtggattccttgtcatagggggttcctgctccatcttctttgagaccataaatacaagagatgtcaataaccacatctatcatatcacagcagagctcataggtttgcatatccaccggagtactatcagttgcaatataaattttactgaccacatcaaatagaaatgccttttcaattccagaatttgagataaagatgttcagcaaattctccagagttgggagttgtggaatcagtttctgaacaactttgctaaaagcttcaaatattgaatgatcatatatgcttgtcagataaaagctgaggtgaattttttctaatccagcatctgcaaggtcatcgtttgccctctggtgaatatctctttgggtttcaattttgtggtcatctgacagaccatccactttatgaataaacacctcgaagttgatgtcagtattcactttgtaggccctggtcaccgtgaggtggagcctggccagggcttccatgtaatcatcctgtgagtcaatgacaaatatcagtgctcctgttccccggaagatcatctcatagtc

SEQ ID NO: 472639 - DNA, 1000 bp, Homo Sapiens
ttttttttttttttttttttttttttttttttttttttttttttttttttttttttttttttttttttttttttttttttttttttttttttttttttttttttttttttttttttttttttcattttccttgaagtttattgactgttactggtggcagagcaaattccataaacgagcaggttccatatggagcaagtagaaggggagctctgagttggtgaggaaggatgcgtggagtggggacttggagtaaaggatggaaaggtagatctctcctttttccctccattcccataaggatactggattaacaatgggggctatctgctcagcattccctctccaaattggagccagagaggggaaatgatgcaaatcagaggaggaaacacctcacagctcctctgtttctccatccaaggggatgccaatatccacgttgtagtctacaggctccccagagctcagccagggaataggggttcgattgaaagaaggcctgttggagaggttttggttgtagaggaccaggggttcactcagcaagggccccaggtcaaacttgggcatctggaaggtcatgcgtttggaggccttctcatatccaccatagggcattgccgtcctgttgaaggacttatatttgggaagttcagctttggccccataggccagcaggtcaatgccaagttccattttttgctgggggtcaacccccatggctcgctcccatggggaaatataggtcttgaacacagtgatatgttttccttctccgcctgcctggtctcctgatcctgtctcaccaacccctgctgtgccagcagctcctcctctgccagcctggcccgcgggaccacctgtacccccagctccagacccagagcccagatggtgctgctgatcagagccatactgtccggcagagccactgccccctgcctggctgccgcctctgccgttgctcttgctgtatgagaatccctgaccagctgtg

SEQ ID NO: 472640 - DNA, 312 bp, Homo Sapiens
tcaggagggtgtctgcttgggctcggggctctgctgggcctcggcgttgtccttctggccctcctcctgccgctcaggctccagcagcagcagcttgccctgcaccggcagctcttctttctcctcctcttccccctcctcctcctcttcctcctcttcctcgcccgctgatgacaaggagaagttatcctgactcacacaggccatgagctttttcatggaggattcgtggccccggccatggcccgtgctgtggcctgggctgtggcctgggctctggcctgtgttgagcttggcacagcgggaacccat

SEQ ID NO: 472641 - DNA, 1000 bp, Homo Sapiens
ttttttttttttttttttaatagtaacaaaggctagcatttattgaacacctactatgtgccaggcactgtcctaaccacttgacacatatgaaccctttttagcctcacaactcttcgaggtaggttctgttattaaccccatttgacagatgaggaaactgaggaccagagaagtgaagtgacttgcccgaggccaggcagctggtcagtgccagaggctctgccattcactggccaggtgcccttggacgggtcacagccacttctctggggtcctttccccttctattccgtgcaggacaccacctcatggtttctctgacgactgagctggtctctgtacagcgtcccagcacacagtaggtgcttagtaagtgaacagccttctttcctcttaactctgatgggggaaacctggggtgggggcatctcagcggcgtgctccctccagcattctcccccaggccaggattgagtgacccgccccttcccgactctgcaacgccacccccatctcccattctaaccccagagccacaccgtgcccggtctcgcctcagttttaatgccgttggtcagaatcccgcacctctgggctccaaagctgcacccctagaggaggaggaatggaagagtccgctcctagcaagtcccccctccgtccagccgccaagggagggttgggggagggcaggaaagggggtccgcgggggaaacgcgttgtcctggggccccggcgtgtgctgggcgggtgagcagccgcgccccgacggcagggcgaggggctaggaggcctgggcctcgtcgtccccgcggtggccggcgtagagcgcggccaggggccggaagcgcggaccccagctgctgagataggcgaagtcctgctcggagcccgacgagccgctgtgcagggagctgagcgaggcggccggcgagtccgcgccctcgaaggcgtaggtctggaaggcgtcgtagggcggcaccgacaggtccccgtc

SEQ ID NO: 472642 - DNA, 1000 bp, Homo Sapiens; identical to SEQ ID NO: 341785

SEQ ID NO: 472643 - DNA, 1000 bp, Homo Sapiens; identical to SEQ ID NO: 341787

SEQ ID NO: 472644 - DNA, 1000 bp, Homo Sapiens; identical to SEQ ID NO: 341788

SEQ ID NO: 472645 - DNA, 1000 bp, Homo Sapiens; identical to SEQ ID NO: 161044

SEQ ID NO: 472646 - DNA, 980 bp, Homo Sapiens
gtatagtaaaaatttaatgaaaaaggaaattaatatattggctaaatatgaagaacatatattgttacattcaccacaatgtaaaggtacacatgatattacataaaaaaataatttaaatcttaaaaataattaaataaatatttaaataaatagatgaacagagacatcagcatggtcatctgtaaagtactagtgcctgcacaggtatacacgacgcttctttacactgctgaaaacatttgaaaattttgattcaactcgtggtggttatagaagtgagtctttgaaattgaggaactcatgaaagtgtgagataatgtattagtcaatcaggatcattgccatgttgaaccagttttcaatccttcctccttaatattttttgcaagtttgttgaaaaagagagggatctcatgatttctgctctgacaacctcccaggcacaagggctgtatttcttctctgttagataaagagtgattctttggaagtatttcctcacagccaggatggagtcctcattcatcaggggagtctcttccatcccaacctcctgtatcacacatgcttccaggttattcagttgctggtaaagttcagtggaaaatttttctaggaggctctgttcccaagcagcagatgagtcctctgtgctgaagagattgaaggtctgctggatcatctcatggaggacagagatggcttgagtcttctggaactggttgccatcaaactcctcctggggaagtccaaagtcatgtctgtccttcaggcaggagaaaggagagattcttcccatttgtgccaggagtatcaaggccctcctattacccaggctgtgggtctgaggcagatcacagcctagagaacagatggatttgtagctgagcaccagcacggccatcagtaaagaaaaggacagggccattgggatgttgcaaatgttgctaggctacttgagatgggtaaccttgaac

SEQ ID NO: 472647 - DNA, 1000 bp, Homo Sapiens; identical to SEQ ID NO: 341790

SEQ ID NO: 472648 - DNA, 1000 bp, Homo Sapiens
tttgtgtcataaaatattttattggaaaaaaagtcaccgtcttcgcaacagggggtaggggccccagcgacatcggggacccggcctccaggcatagccgacgggttgccccggggcaatctcaggccgttgtggcctgagcccaaccgctgggtccccgacgtccagaagcgggtgtgtgcctggaggctccccggccgggagggcaggccccagacggggtgggggtgcaggcgaggagcggggcgtgaatacgcgtggagcgctctgcgcaccggagctcagggtagagactgtagcttccgccgggctggatgcgagtctcccaggttagagcccagaagcgcgctgggacctgggtctggcttttgggtctgtgtccttcctcgtttggccccaattgtccgcattcaagatcataataaaaaggcttaggaagtaaacttcttggacgcggaagggccggctcgcgggtttccgccgagtgagggggctgcgggtggcgcgggcatcccaggccccgcaccgtataccgccctcagtcctcgcggctcctgtcgctgggctcgcccggcacctccgccggtttctctgcatccttggcgcgctcctgctcagtaagctgctcgctcgttggaattgagttcttcttgggccgccccttgggcttggtgggagactccaggccgccgccctgcagcactattttcttccacttcatcctccgattctggtaccacgtcttcacctgcaactggctcaggcccagggactcagcaagatctattctgtccggcgtggaaaggtacttctgcttctcgaagcgtttctccaggcccatcagctgcagctcggtgaacacagtgcggctccgacgccccttcttggctttggtgcctggctccccagggcctgccgcctccagcttcccgcggagctgcaactcgagcggcaggtgtggcgcacccgcggcgccgggcagcccgggccctgccgccag

SEQ ID NO: 472649 - DNA, 1000 bp, Homo Sapiens; identical to SEQ ID NO: 341791

SEQ ID NO: 472650 - DNA, 1000 bp, Homo Sapiens
ttttttttgaagcagcagcgtttattcaagatacaacagtgagggaatccggtcacgttcccttctccccagagagggcgcatcttgacaagtgatccagtagaaatcttttagactctaagttaagttcataaaaatcactcccttcaccctgtctcccagggtcaggcctggactccgagatgaactggcttggggcgccctcgggtggccacataaaaaaccacagtctgaggccagcttggggctcccagacctgggcagatctgcccaggccacctgtccttcggctttgggtcgctgtctcttggcagatggcccaacacttgggggtggcccaaggacacctcaggaaggttcccgctctacggatggcccgattagccagaggtttccaggccatctgtctgcctccaggagatggactgggacctttagacttcggtggagaacaggatgctctgtctcttgctgtccggggcagggatggcctccagctgcaggaagtacagcagcacctggacctgggacatgacctccaaggaccagctgtcagtcatggtgataggctggctggggttggcagggagcttgctctccttctcggagggccggagcagcgtggggccaaagaccgtggcgaggttgtgcagggacatcttattgactgcctccttctctgccacccttttcaggtggtccagaaggaaaaggaaggtgagcaggttggcctccggcagggacagcagcaggttgagcatgcagctctcctttgcaaccgggtctgaaagagcgatgccctctgcgaagttggggtagaactcgtcagtgaagaggggctcgggcagctcacggaagtacagcttcagcgtgcctgcgatggcgttcacgtccatctcgctcatcatcaccgacacatccttgttattgacgtcgaaggctgccttcagtgcctggatgtccgtggccacaccggacacgcggtagatgcccacctcct

SEQ ID NO: 472651 - DNA, 1000 bp, Homo Sapiens
tcaggcgatccacctaccttggcctcccaaagtgctgggataacaggcatgagccaccgcgcccggcctgaacttgccaggtgcacacatagtcccgtccaaggggggccccttcttggtcttgcaaaagtaggggttgtcaggatggctgcaccacagctgcttgcaggggtcaaaggtccggaacgccgtgcacatcatgtagcccaggccgaagtcaaagcggcattgctcgttcatggagtagtgcagtcccgggagctggggcagcgccggccagtcgtgggcgaaggggtcatccagcaggcagtcataggagtgcaggtagcggctcagctcctgctggctgcagcgggaccagtggaagcggtggaaggcggcctgcaccaggggcgccatgatgctgcccagccgcacctcgtcgccacagcggttgccctgcccgtcgtgctccatgcccagcacgtggccagtctcatgggccaccacaaacgctgaggagaagccgtcctcatggttcagggtgcagctgcggaccggatggcacatgccggtgacaggagcatagccttgcatgccggaaggcccaaagtcctgccgtgtgaggaagatggcgtgatcgtggtattcatcgtggcccgtgtctggcttctgctggaggtaggcccagcggcagacattctccaggctctgagaggggttcccgatctcgatgaggctcatggactttccatagctcaggaggatgatccgcaccaggaccacgttgatgtgggcacccaaggactcgtcatggtagatttcattgacaatgttcatgagtgtcagcaggtacttctgtacgtgctccttcccgtggaactgcaccacagagtcatccacgcccagcaggacctcgatgttgtagtcatcgtctgcagcatgcctgcgtgccctccgcctcgagctgttggcgtgctcctctaggacgcccagggcgcggctgaggctgtccaggctg

SEQ ID NO: 472652 - DNA, 958 bp, Homo Sapiens
tggtttctcaggacacaccgtttattccacgggggaaggcactggaggccagggcctccctggggtgggagtggttgcgggagaggaatgatgttcctgtggctcttctggggcccagttgggtccatggcccttcccaagctctgctgggaggccctcggctccgagtccatttgcgggctctggaccagtctctgcctcccccatcccatgtgtggggacggatcacctcatagcacccccagaaggctgggtcccgtccatccccagagaactccctccaagttgctgccctgttgtccttctactccaggccctttggcaagagctggggaccaggggctggagacaaatggcagctctggtgggccagcttcagaggccagctggggggtccaggaaaggggttgggccatgagccaggcagctccgaagcagtcactgaggccagggagcctgcacccaggtcatggggcgacctggctctcactcctggcctgggtgctcacctacagaccacttcacttcccctgtccgcagcgtcactatgtcctcataggtggctgtctggtcaatgtccaggccctcgtaggtgtgatcttcctccatgccagccttgctgtcatccttgtccagcagcaggaagataggcacgatgatgaagaggatgatcagcagcgtctggatcatgatgataccatccttcagcgtgttcctctgcttcagctgtgccaaggtgctgaatcctttgggattccggtaccggtcctccgatctggctgctggtactggctcagctgagagcagcagcagcaacgccaccatccagtggctgggcacaggagacaacgccagcctggccatggtcactgctctgtccccgaccccaaacccgtgacaacgtccgaggctccttggaggaaaacgtgtaactgcaccggctgcagcctgtcccctg

SEQ ID NO: 472653 - DNA, 1000 bp, Homo Sapiens; identical to SEQ ID NO: 341794

SEQ ID NO: 472654 - DNA, 1000 bp, Homo Sapiens; identical to SEQ ID NO: 341795

SEQ ID NO: 472655 - DNA, 1000 bp, Homo Sapiens; identical to SEQ ID NO: 341796

SEQ ID NO: 472656 - DNA, 1000 bp, Homo Sapiens; identical to SEQ ID NO: 341797

SEQ ID NO: 472657 - DNA, 1000 bp, Homo Sapiens; identical to SEQ ID NO: 341798

SEQ ID NO: 472658 - DNA, 1000 bp, Homo Sapiens; identical to SEQ ID NO: 341801

SEQ ID NO: 472659 - DNA, 1000 bp, Homo Sapiens
ttttttttttttttttttaattttaaaatatttgtttaatgaaacaaattgactagtttcacagatccctctgcataatacaaagttctgaaagtttatggtcctggttttcaattaatcctccacactggcactggtctaaggaaactgaattgacacatatgtgtcccacattccaccattacagtattagccctttcccaccaactgccccttatgaagcttttcagtcactgcaacactcccgacaccaattatctcatctgttttaaaaattcacagtacttcatttcctccacttaaaagtacttgggcttcctttactcatttaattgacacagtcgagcaattgctgtgtatgtgcttaggttaacatcaaatttgcctgtgtatcacagcatacattttaataggatgagtttatcaggctatctcagccttatacatgttctctcagtgtatgcttttcggccacataatgaactacaaatttttgctcaacccttttccacatagatctgagttttcttcctatgggttttctgtaacataaaataagacataattgatcacggaaggcacaaccacattcactgcattcacaaggtttctgtcctgtgcaaatcctctgttatctcctgaggctgcacatctgaccactggctgtcccacaaggactacgttcctgtttgcgaggaggccgctgatgtttaatgatgtctgaggggccacagaaggcacttgtgtagtcgccccgttagcagagtttttctcctgcatgacatcactggtgtgtaatgagctgtgcctctctgcaggaggattttccaccttggctgcctcttgtttctcccttgtgtgtattctcttatgcttaaccagacacgacatatacgcaaacgctttcccacactcgttacagccatagggtctctctcctgtatgagtcctttgatggacaatgagcttttgctttgtgctaaaggctttcccacattca

SEQ ID NO: 472660 - DNA, 1000 bp, Homo Sapiens
agccacaaactctcggcatttgagaccgttgatttttaatattttcttaaaaaaatacaaaggaaattaactctgtaggtcaatacaactcagggaaagagggaaaaatggaatttcagagcaaaggttgtttaggttatcacattcccacactcctaatacccacaaaacaagaatttcactccatgacacagaggaacattgaatggtagctcagaaatgttgatagctgaggtactgaaactaacaaaaggattttggttgtccttgattattctgtcctgtgatgaataaaatctacactaaaggacaggtaaggaaaacttatagcagaaaaaagactagatgtaccaaacacagcagtacaaaccactccttggcagacatgtgcttctaaaagaatggggcagtaatcaggtagctgaactactaggctactgtcactcccagcccatccccaaataaatagtgtggaagtgtaatagtgtagtagtatttgatccaacaaagaaaggctttcacccccattcaaggcaaacattgccatggctagatgagccctggcaggtaataagatgactgtaaaatcacaggttcttctagtttatccccagttatactgaactcccacattgatgtcatcttctctcatcccaacatttgttcactcttttatgctgtctccagtgcgaaagacctcggggaaataaaaagatccttcaaataatatacccttctcagtcttccaggttatgtaatacttcagtgctgttctaggttcactcacaatcaaattcagtttaattcacttaattctaacttcaattctgatatacaaatcctgacctccaaaagaagtgtcagatgagtctctctctcccttgtccccaaagttttgtggggctctcccttttgtttccctctagaatggaactgtgttgcccctagctacctgtatatgagaaaatgtagttgttcctggaaaaaaaaaaaaagactt

SEQ ID NO: 472661 - DNA, 1000 bp, Homo Sapiens; identical to SEQ ID NO: 341802

SEQ ID NO: 472662 - DNA, 1000 bp, Homo Sapiens
cctccaaatttcaaaaagttttattttgaaagaatgagagaaataaaacagagaggtatcaattaccaagaacaattacactgaagaaaacacaataataagtactcttcccacacaaccccccccatttccccatccctggcacaataatattaaaaccaccaaagcacacctaacaaggaaaaacaacagtacgtaatgaaaaaagcaaatgtccatactgctcagtccaactaacccttatgaaatgtccttcccccagctaaaccctacccactggaatgataaagaaatgtagagacaaccctaggggagacttggaactctgcttatactagcaaagctcagtgaagaatcagtaagagtagtgaatctgtttggcagtgaaacactggatatagcttctttttcaaattttggatgattgcagagaacaggtagagtttgaggctcacagacttctaacagggctgatccctgttccctcaaccgtaacagtggagcagctgccaaatcctggttggctgctgagaatagtggaagtgaggcaactttgggcttaagacaatctgaaaaagatgtctggaaacaagtttactgcttcagtttcaaactgtgagtaaagggttttaataggtggggcttggacaaaggcaaggtgaaacttcctatattatcacttgaagaattaaactatcaatttgactgcatgcatcccttgttttaattaaattcaatatggactatttaaaatgtaaacaactgttggactagagcctaattaatttcatatataactcagtgtccgaaattgaatgtttttttttttctcctaaagtagtaagtttaagttgttagtatctgtggagagattcccggccatgagactacatgacttgtttcatatcaggattctcttcataggaaatttgttttattccgcctttgctggaatcaatctataaagggaaggatgcctgtgcaggattagttcaagatc

SEQ ID NO: 472663 - DNA, 1000 bp, Homo Sapiens; identical to SEQ ID NO: 341803

SEQ ID NO: 472664 - DNA, 1000 bp, Homo Sapiens; identical to SEQ ID NO: 341804

SEQ ID NO: 472665 - DNA, 1000 bp, Homo Sapiens
atttcaaatgcactctattttatgcagtaatggccacgggggatggagttaggctcttacattgttttcactttttaacattcttacttgttaaatgaagggttggtgactctgtgggttccctggctttctgcaaaccctcaaacctgagtactgctggtcacgcatgtccacagcaaagagccagagttcaccgccctttctcctaccttcttctccagtttgtttcattgccattcagtttgcttggatggagatggaatgggtggcagggtctctgataaattaaaaactaaaaccctgctattttcatataataaatgctaaaagccatatcagagcattaagttgcagccagagaccagtcatcagggctgccaaggctgaggtgtcactggggaaaggggacactgggcccaacccttgcttctcccccactgctgtggaggctcagtgaaaggccagacttttgagtcctcttcctccttgctgcagggctggggcctgccagagtggtaacctgctactctctcaggagcagcactgaagcatgtccatgttttagcagaagctcaaccaggaagtcgctgcccttccttgcactgtttctgcagacgtgcctggtaggctggacttcccctcctgagccccgagaactgtgttgtgtctgttgtcatggaaacgatggcaaagccacagagtcaatgctgccagtcacaggaggccttggggacgcgtgacctcctctgcagcagcactggtcacggtctccatgtcatgggagggctcagatgagtgtcagtgaggcagtagacgcatgctcctgcgatcccacgggctcctggccctggccgcgctccctgttggactctgcagcttcctgccttgcttctgcttgccggatggggccgctgtctgtgcttcctccaaagccaaacttgtcacagaagggaggtgcccagtgggcctcgcagtggcagttcttcctgttgttgcacac

SEQ ID NO: 472666 - DNA, 1000 bp, Homo Sapiens
tgttttggttataatgttttattacaaaggtaatatatgatcattatagaaaaataaaataggtcatcaataattgcatcaccttgaaacaatcacttttaatttgttgttagaggttagtctattttaacatttctgaagtcatatagacttacatgattgctctcatgtaacctgtaacataagcgtttctcatgttgctacatctgttaataacagtggtttgactaattgtattggctgtgtggatgtggaacagaagattcttgatgtcaagaacggctgaggcacagaaggtgcagtcagtcatttgggaccatattgtctgtggctttcaggacagggagctttgggactcaggtagatgactctggaagagtccttctcttttggaactgcagcatcccttcgtcttccccaaggggaatttagtccaggaaataccagatcctcacctctctaattctcttctcaaatcccaaggcaaaacaatggagacttaatgtggttctggtaattgggctctttgttcttctggagcttccgactgcataagcagtgaataggtgattttgttctcagcatggagaaggcagaaaccagcagtagggatccacagagagggcataggaaagaagatgttaaagaggctggacattggggctgatgctggtcatcccagcactttgggaggccgaggcgggcagatcgctagaggccagaagttcgagatcggcctggccaacattgcgaaaccctgtctctactaaaaaaaaaaaataaaaaatacaaaaattagctgggtatgatggcacatgcctctaatcccagctactgggaggctgaggcatgagaatcgcttaaacctgggaggcgggtttgcagtgagccaagatagcaccactgcactccagcctgggtaacagattgagactctgtcaaaaaaaaaaaagatgttaaaggaaaaatctgaggcgcaattcatgaagtttagtgttcc

SEQ ID NO: 472667 - DNA, 1000 bp, Homo Sapiens; identical to SEQ ID NO: 341806

SEQ ID NO: 472668 - DNA, 1000 bp, Homo Sapiens; identical to SEQ ID NO: 341808

SEQ ID NO: 472669 - DNA, 1000 bp, Homo Sapiens; identical to SEQ ID NO: 246547

SEQ ID NO: 472670 - DNA, 1000 bp, Homo Sapiens; identical to SEQ ID NO: 160020

SEQ ID NO: 472671 - DNA, 1000 bp, Homo Sapiens; identical to SEQ ID NO: 160021

SEQ ID NO: 472672 - DNA, 1000 bp, Homo Sapiens; identical to SEQ ID NO: 341811

SEQ ID NO: 472673 - DNA, 1000 bp, Homo Sapiens; identical to SEQ ID NO: 341812

SEQ ID NO: 472674 - DNA, 1000 bp, Homo Sapiens
ttttttttttttttaaaattttaaaaatgttacatatatacaattgtccttgtatgctaatataaatatgaaaagtaaaaaacaaaacaaaaataaaaatacatgtttaaagttagcctatgggatattggcctttcaaagctttaaagtcctgcagaaaaatcctatatgccttagccctgcatgctcatttctattatgggatgttgtttccttaaatatggaaaacaataaacagaagcttcatgcatatagcattactgtttacagtgaggatgtgcctcagaacgtcaagttctgaatccactattgtaccttaggaaacttgctacatttgggtcatgtgagttaactttatgaatatttctacatattatctgtcatgcggattatccattaacataccagtacctttattgttccatgttatagtgtaatatttcagtagttcttttcatggttagttaaatcctaagccaatgacaaaaagaaaatggtaaccagatgtgaaactccgcttcctctcctctgtagcatctcagagggtcttcgtattgtctgaagagcagatagatttgcagtgattccatgagcctgggtttctataaaagttgaagtaaacagttttcgatgtatcacatgtaaacagttgatcttaaatggatgtctcccatagcctggcactttgtcggttcactttcttgtcctcatcaggaagtggaggcattgggtaagggtattttctgctggaggcaatagacccagttgatgaagaaggagacttggcaggagataaagtctcagttgaattagaccgaggtctaaatcttttgcctctgattttctttttgttgcctcccaggttaccttgccaagagttacttcgaggtcgcccattttcacagatgtctgaaatatgttttgtgtctggaatcctttcactccaagaatgagagagcccatttgacctcttcttagaactagatgctgagtttgtgct

SEQ ID NO: 472675 - DNA, 1000 bp, Homo Sapiens; identical to SEQ ID NO: 160022

SEQ ID NO: 472676 - DNA, 1000 bp, Homo Sapiens; identical to SEQ ID NO: 341813

SEQ ID NO: 472677 - DNA, 1000 bp, Homo Sapiens
tttttttttttttttgtgctagaaccattttaatataattatacatatctgccaaatccaggaagaaaaggtttatgcatatataacttttccatttaacatctgcaagcataaacgacaatgatctcagtttaataattcatcagggtcagagcaattgaccaatgtctctttactgctaggcttaccaacagtaaattacagatgaattagtgtccttttgcttctcttctctgactctctttgtccagagacattttgtcgtaaagtttcagtgcagctcacctccagccaaaggtaatctttttagatcagtactcagttgctctgaattttgcttataattataacctatttaatcacagaagaacccctgcagaggtggagttcaaggttgcatacaataacaggagatcacagttttgaagtctagcacagattaaaaaccacagatgtaccatttataagacacacactgattgtctcttaaactacatattgactccttatgaacattattttttaaataaagtagtgcatctaggacaatcagtcacacaattcacacagccctgaaaagttttttcagtgccaactaccagttggtcatgaaacgtgaatgagcttgagacactgttcattcctaagattcaaccaaggattggctaaaacaatggaacacctctgcttaagaaggctatgaccttccctcccttccttcacaacttagttttgtttgattttatttttggtggtgtttggttgcacatggctagaatgcttttgatcactttgcaaatcaggataaccaatgatctaaaactatgacaggatcttaagcagattggtttgtccatttcatgttgctggtttgtaggcccctctaaggcccttcgtttttccttctatgcctctcggaactttgatcagatgagtctgagcatcatcccatctaactcttttaaccaatgcctggctaaaactggaatgtccagcccag

SEQ ID NO: 472678 - DNA, 1000 bp, Homo Sapiens; identical to SEQ ID NO: 160023

SEQ ID NO: 472679 - DNA, 1000 bp, Homo Sapiens
ttttttttttttttatttctgtcccatcccacagtacttctgccacccctgcacacacacacacacacacacccgcacacacacagatttccaagggtttatgatcttagtagggttgccagatgaaaagaaaaagacacccagtttaatttgaatttcagatacacaaataattttagtatgagcacacctcaaatattgcatgggatatactgatgctgagacaaaaaacaaaaaattaacaaaaaacttgttaattttaagttaaaatttaacggggccatccttatttttacttgctaaatctagcaaccctaaaaccaacctcaaatcttaaaacctttccatgattttgagttcgaagcttctaagaaggataggacagaatggtcctttgaccatggttaaacactgtcatctgaaatgattttccttcgcacatgcacaggggaaaggatttgtcctcctacctggtccccacagctctgtgcactgctcctgcagtgtggggcatgtccccatcaagcagtggcccttcccgtgatggcaagggaagccattgacttggaatctatcatcaggacaattaccagatttaccattacacatttcaggcaggtcgcactcatcttttgctggtctgcacaccatcccagcctttttaaattggcatttttcacaacattctcctaatgcacattgaaaagttgctttgattttacatgtcttagcatcacagcaaatattggtacattcctcagatgtcccacaatcacagtcctctcccatttccaccaactggttcccacaaattggagtggatatgatatctgtaggcaatggagcattaaagaggcaatttgataatttatcttcaaaaaacttgtcatagctgagacggctgcaggaactgaagtctgtgggtatatagaagctcagtgctttgtccatcacacatattgtagaaggacacttgcaagaatagtcgtcatgaaacatt

SEQ ID NO: 472680 - DNA, 1000 bp, Homo Sapiens; identical to SEQ ID NO: 341817

SEQ ID NO: 472681 - DNA, 1000 bp, Homo Sapiens; identical to SEQ ID NO: 344494

SEQ ID NO: 472682 - DNA, 1000 bp, Homo Sapiens; identical to SEQ ID NO: 160025

SEQ ID NO: 472683 - DNA, 1000 bp, Homo Sapiens; identical to SEQ ID NO: 341819

SEQ ID NO: 472684 - DNA, 1000 bp, Homo Sapiens; identical to SEQ ID NO: 341820

SEQ ID NO: 472685 - DNA, 1000 bp, Homo Sapiens
tgttttgactgctgattttattgcaggactttaggtaggggcaacatgtcctaagcaaaagagactggaactctagggaatatagaccaggtcaggtttatgcccagttgcagcaatcacagctggtgtcgaagacaagcccggcctggcagttctgctggtacgtgactccattcacgcagtgccagaaggcatttctgttatttgccacggggtagaggccgttggctctgacagcacagaatccactgcctcccgagctgcctccagagctgctactcccgctcccgttcccgctgccactgggagcagcagttattggctcaatgggctgagctggagccgtgcaacttgcactctgcaggccgagggccttcttcagggtggagattaggggaaacttgccctggttgcagaaagtgccagtgaagtcatccagatcaatggcccagaccatggcgcctccaaatttgttgtgcttaagccattgagccttaatatcgaagctcttgatgttgtcatagccaacccacacattgccctgataggcataaggcacttcctgaggggcatcccatccctgagtggctccatttttcaggaaggtacagatctcgtagtaagcccagatcccagactccttggcatagggcccagcaggaccagcaccagaggtgggggcaccaattccagtgttggaggggttgctcaggatgaagttgtgtccataggtagggaatccaacgatgagcttctcagctggtgctccattgtccttccagtagttcatgacataatccacattgaggtaggcgttgctgccggtgtcagtcgggtatttgtagagggggctgttctctccagtgtagccctcccaggagccatggaggtcgtaggtcatgacatggatgtagtccaggtactgtgacagttgggggatctcatagccagactggatattggagatgccagcagctactgcagcagtgaccatcagcct

SEQ ID NO: 472686 - DNA, 1000 bp, Homo Sapiens
tttttttgaactttgggaaaattatttatttctccccacggggttcagacaagtaatttcacatttcattgtaagtcaagggtaagaaaacattttttgtacatccatcactaatagagatcacagtatgtcaatgaaatatttaaatacactgtacagagattgctttttaatggatttctataagtagtattaataggaaaaagcatataatacaatctactctgtatctaagagctttaatttattcaaatattggaagaaattcatcttctgaatttttcttatttaaaaagcattatgagaactgattcaaggatggaggaatcaattagtactcagcaattcacagacatgacataaacatgacatttttaagacataaacaaagactgcatgttggcagcataggggacagtcttgctcttcctcattttttgaagcagagatatttcatatttcatagtttctgaacttcctcaggagttctgagggagcatccttggaccagcggaaacgaaggtgccaaccattcacatctgcaaaacctgaagaatctgaattttgcggggagactgacttctctaggggcttgggttctttctgctccgttttctctgcggttgaagccagctcctctttctttctttctctttgctcattacattcctcattttccatcttggtggtatgagtcttgtcagattcttccagcatcaggtcttttttacctctgacaacccagtgcattgacgtcttcactgagtcattcaaagcttcccactgctggaatggcatcgacatctggctccttcgccagtggtcatagcgggctcgactctcttcattggtcagaatctcctttgccttctgcagtttctgaaaagtctccacagctttggggttttcaggatgcttgtctgggtgacattccagagctctgactttaaattctgccaggatttgttcaaccgaagatagttcatcacatcccagtaat

SEQ ID NO: 472687 - DNA, 998 bp, Homo Sapiens; identical to SEQ ID NO: 341821

SEQ ID NO: 472688 - DNA, 642 bp, Homo Sapiens
tatttctttatataatttaatagggctcctccacttggaatacaaagaaatgactttcactactatattagagtatgtaacatagtgtccaactgcaagttagatcctcaggaatcttcacttccgtgtgttctagaggacagatgctgatgaatcatcttttggagaagtgatttgaatctttctaggaattctttgggtggttttttctcataagaatcacatgaagggcatgttagtctgtgtttctgtcttctccctgcatttgtggaaggtggtttcctcttcagctttttaattgatacattgattatcctttcattgtttcctgtatttgctgactttagttgggccttctgaaaacaggaaaaagctgaccactcacagtttgtctctacatcttctggagctggcagaaattcagggaccaagtcattcacataatttttcagctgatcaacaatatctataagttgacgcattctaatcatgtggcgatcttgaccttgggagcttgatttgtggaccagtgtccccaagaagatgaccatcagacagatgacaatcctctccatgttgccaggactggatctcataagtaccaacagtagagctagaccttggtctcgttttcacttcagc

SEQ ID NO: 472689 - DNA, 1000 bp, Homo Sapiens; identical to SEQ ID NO: 341822

SEQ ID NO: 472690 - DNA, 1000 bp, Homo Sapiens
gtggggccatcactttattaaggggtcatctagaaggtgggccccctgacaaaccgcgggactgtgatcgggctccagctacttcaccaccccgggccagcctgctccaggggtcccttcctgctgagagcaggcgagaggcagtcaggctcatgaagcagccaccgggtttggctcactggaaggaatcacactggaaacatgtttagcccgcagtgcagagtggctccagaagggagaggttctggaagacgccccaacctgccgggctgctcccagagatgcacagtgaggggcaggcacccagggccgttccaggactcaagatggggatggagatggcgtgaggaatggaggacagggctagatgggctgaccggggggaacagtgttacgaaaaggaggcgggtaccctgggctcccgtgacaaagtgcggcagggctaccccctgcagcccccatagcccccaccaccttgagaccacgttctggtcactgcctcggagccccgatgtgttggggccagggagcgctcctgcccgggtgtggggtgtgagcctcagcctctgtccgcccggcagcgcgcgtgcctcccttggtctggcctccctcggcccggtcctggcactggccgtgctagctggccgtgcttctccgcgggatacagccttccatctccagcgcctcggggcagccttcgtacttgttgctgtgcttactgttcttcacgtgctgctcaaaggggctcttgttctgcacacccttggccccgacaaacacccagctgtcccggaaggccagctccttggcgttcctgctgcccagctcactgaagagctttctggtctcttcattcatcttggtggctgggtcgtcgtaggatgccacgaacaccagggtgccttcgtgcagtggccgaataaacttcaacaggtcgttgacatctccggcccacatgtcaaaggcccgggcctcgatgagctcgccgctgaccccgttc

SEQ ID NO: 472691 - DNA, 1000 bp, Homo Sapiens; identical to SEQ ID NO: 160027

SEQ ID NO: 472692 - DNA, 1000 bp, Homo Sapiens; identical to SEQ ID NO: 341824

SEQ ID NO: 472693 - DNA, 1000 bp, Homo Sapiens
taacgttttcaaaatctatttttatttttcttcagtattacctgctgttcccaagtggctgggtaatctatgggttatattttcatttaccctcaaagctaggctgccagtggaagctaagaataacacaattaaattcaagtttctctagaaaatatgacaaatcaaattttaagaaagtgtaacttgtggttttgctttggttcaagatggctgatctgagaatatcaaagcatttaattcaaactaatagtgtgtcctcatcctaggactagaaggtaatttttcttttaaggagggaaaagaagagcaaaggggaaaaatccctgaatagtgattcccttccatgaattatttcaattctccaaaatagacttttttttttaggaaggaacacctgactctgaatatatttcctcaaacggagtcgcttttgaacccaaagagtccagcaaatcaggttgcaactcctgttccaagctggccagagagctgagggatggggcccctccacactccccttcctcgctgtagacgtgaggtaggtagccggggtcatcttccagcacattggcaacatggagtttctgattcaatgtctctgccatccttccttccaccggagccaggagttgtctgtgcattgtggcatctgggtaagcaggagtagagtgtatgtttttcacacttcttggctcaaagggcttgccataaccccagctccccagagcacagcgtgcttgggctgactgactcgctgcagatggaggcacttcctcgagatccttaactccctgcgtgggtcctgctgcagctgtgcagatgagcagagccggcctctggccttcaacatctgaccatgtccatatcagaggtttcatgaggatcttgttctgttcatgtataactcagtcatgaactggcaaggccaaattgcgtcttagtcatctgtgtagctataaagttcagcacagttccagggtaccagtagatgctacat

SEQ ID NO: 472694 - DNA, 1000 bp, Homo Sapiens; identical to SEQ ID NO: 341825

SEQ ID NO: 472695 - DNA, 1000 bp, Homo Sapiens; identical to SEQ ID NO: 160028

SEQ ID NO: 472696 - DNA, 1000 bp, Homo Sapiens; identical to SEQ ID NO: 160029

SEQ ID NO: 472697 - DNA, 1000 bp, Homo Sapiens; identical to SEQ ID NO: 341828

SEQ ID NO: 472698 - DNA, 1000 bp, Homo Sapiens; identical to SEQ ID NO: 160030

SEQ ID NO: 472699 - DNA, 1000 bp, Homo Sapiens
ttttttttttttttttttttttttttttttttttttttttttttttttttttttttttttggggagagggaaatcacctttaacgaggtgggagcatgccgaaagctcaggtgtgcgtgggagctgggcacccagacggagaggatactgaccaagcccccacccaagacactgcctgcttcccagtgatgcaaagcaggctctgaggtgggtcaggcaggcatgctggcagggagaggctgcctcctcagaatccccagggccctgggggtgtgtggtgcaggacccagaggaaggctgcctgtggacagacactcctgaaggctcttgttcagctcctgcctgaagtgcacgtagccgaagaagcctacagtctgaatgaggaggtagaacaggaagatgccaggctgcaggcacgaggaggcccttgggggctggccaggtgggcggggggccttggctgctgccttcgccgggccccgaagctcctcctgcaggaggcccaggatgtggtccagctctaagaaatgatgctcaatgcccacaggcaggtaggagacctgggcttctgcagccatgcggacagctgcatccctcatctcttgcagggcctggagcagagtccactgtccatggagcagggcaccgaccttggcagagtccttattgagtgacatggagaggtggccacccctccctggggtggatggaatctggcaggaagcatccagggcccagcctccgtcaggcctggcttggcctgggggccccagctgcttcttccattgtctctcagcctgggccagctgcttggagagaccccgcagagcctgcaggatccggcggtgtctgcccagcgtctcctccaggtcaaagagcctttccccttctccttgagcttcagagtctgattttggagttacatcctccctggtgcccaagcccagccttgcccacagcccttccagctgcctcgccaggcggagctgctgcatctcca

SEQ ID NO: 472700 - DNA, 1000 bp, Homo Sapiens; identical to SEQ ID NO: 341830

SEQ ID NO: 472701 - DNA, 1000 bp, Homo Sapiens; identical to SEQ ID NO: 160032

SEQ ID NO: 472702 - DNA, 1000 bp, Homo Sapiens; identical to SEQ ID NO: 160033

SEQ ID NO: 472703 - DNA, 1000 bp, Homo Sapiens
ttttttttttttttacttgaccgtaggacatattaagatgtttattatttactaagagtaacatgtatacatttgcagtaatttgtacaatccaactacattacaattcacagtaacatacactagctctaacctgccttggatacaattaagtctcctcaacacactattttatcgccaaacttacattctggcttttataatcattttgcaacacctggtacagtatacacctatagctttgccatagaaatgcccctaaatgcccttcagagagcagaggtgaatactttctcatgaagaaacgccaacttttctaagcgagttcgtttcagtagtgggagccattcccagtaggataactctaccacacggtagccaagccgagccagctgccgcctcttcatattgtgcagtccaaggagatccctggagccatagcaatactggttcctgtttgtgaactgaacagccagcttcattcttggggtctgcatgcaggctgcggggcacaggccagccatctccatggcccctgatttatctgctacattgcaaaggaagccccccagaggtacagctgccttattctccaactccatgggctgctgcccaggctctgactcagttttgccctggaaatgtcctcttgctttcccttttagtaacttattcatcaaatcatctgtaaggctgactcccacatgctcaagccttaatttggctacattttcagccggcgtggcttctctattaaatggtaatggcttcaggttaacatcaagctggacctctaagtcagaagatcgggtatgaggcaaaatcatatggtgcttgacgtactggggcccccccagcatggtctccagtaaaaagacagtttctaagaattcaggctttgaattcatatccttctctgctaaataccacagcaattcagacccctcttgctgaaggtgagtactaagacgattgcctctgtaatctggacactcaatgc

SEQ ID NO: 472704 - DNA, 1000 bp, Homo Sapiens; identical to SEQ ID NO: 160034

SEQ ID NO: 472705 - DNA, 1000 bp, Homo Sapiens; identical to SEQ ID NO: 341834

SEQ ID NO: 472706 - DNA, 1000 bp, Homo Sapiens; identical to SEQ ID NO: 160035

SEQ ID NO: 472707 - DNA, 1000 bp, Homo Sapiens
cattcatccatttaacatgtatttattgagtcatggctctgtactgttaggcatttgggaatacagagatgagacagacaaaggccctgcccccaaggaacttacagtctagcacaaaaacagaccaaaaaagtgtagtttcaatgacgtgtaacagagagttaagaaggaaatgcaaggggccatgggaacactgtgcagaaatatttaacttagtctagggggacagggaaggcttccccaaaggagaagtgtggatacctctgacagggcgagatttagcatggcctctcttggtgctatgtgttccttcatgatcggcttcacttccggcctcatctgccattttatagctcttgctttcaaatgtggagtctcctctgttgtaactcgtgctactagtaaattgtttgctgtaacttgaagatttaccacgggaagggaattcagctatcccagggtgatgagaactggattcctttgtatttgtgaagatgccagattctgagcccctagactcagtctcactgacaaactctcctaacataggtgagaagaaacctgggaatgtttttccagttgaggcagtgtcgaagaaggcagcttcatcagggtgcctatggcggaacccatccagagtacctatgccagacaatgtgcctaaatccattgcctcgggacagtcagaaccatcttcggaggtcaccacttctttggtaacttctttgtgaccatcaggaccaataacagtcttagtaacggttttagagcatgaacgacgcgtggtggttgtgctaccagaggtgaccttctctttaccagtcctgagctctttatctcctttagaagtgaccagtttttctgtgtggtactctctccttgtccctggacttacatttcctgacacctcttcaaatgtgccccagtctgggttgttaggcctcgcgttcccagagcctgggctatctggcctaaaacttccagattcagagtgccattg

SEQ ID NO: 472708 - DNA, 1000 bp, Homo Sapiens; identical to SEQ ID NO: 161306

SEQ ID NO: 472709 - DNA, 1000 bp, Homo Sapiens; identical to SEQ ID NO: 161306

SEQ ID NO: 472710 - DNA, 1000 bp, Homo Sapiens
ttttttttttttgccgagtcacactgttcactggtttattgagattcggggagatccttccccaagagacaccacagtgtgaaagggacaccacctcccaccccataggtccatctgtctatcccaacagtcaagggtgccttcctttggtcaggattctcatcaactatccactggaagcagctctccaaacctgcccccacttatttttccttaattcccctcaaaaaaacacaaaacaaaagggagcagtcttgggagaagatgattgtgagtgtagactgagggtagtacatgaatgcaatggagatggggggaatctgagcagaaatggagattctgtgacaaggagagggtgtggatggccccaccaaacatgaattggggaaaagtgcataacaatgtgcagggtagggtacatatggctctgtcagaagaataccatgatttaagggaagaaagtacacaaggtacatggagggtacacagggaaagtacatggataaacatggacgtgtgcaaataggaaagacatgactcagcatgctagacaaattgcacatgcctacccaaacacgctcaagggcagacccatgaccatgagaggggcacacgtagctgtgaatgcagggcacccgagagcacatgtgactgaacatgaagaaagcatacgggaaaagcgtgtgtacacatgagcatgttcagtgggcacacgcaggagaggggaggatgcatgtgtgctgagcgtgagtgcacagagcagaggcaaggagcatgtgagccttggcgaaaagaatgagctcccaaaggaagcaaaattcagggggagccacatgtgagaaagtatagaagggcaagtaagatggaaagagattatgacagtggagaaaaggagaggcccctttggggtggaaagagcacttgttgggagacccctgctggacaggaacagagcacaaaggcagaggagctgcaggggttgccgtggtaactagaagag

SEQ ID NO: 472711 - DNA, 1000 bp, Homo Sapiens; identical to SEQ ID NO: 341837

SEQ ID NO: 472712 - DNA, 1000 bp, Homo Sapiens; identical to SEQ ID NO: 341838

SEQ ID NO: 472713 - DNA, 1000 bp, Homo Sapiens; identical to SEQ ID NO: 341839

SEQ ID NO: 472714 - DNA, 1000 bp, Homo Sapiens; identical to SEQ ID NO: 341840

SEQ ID NO: 472715 - DNA, 1000 bp, Homo Sapiens; identical to SEQ ID NO: 341841

SEQ ID NO: 472716 - DNA, 1000 bp, Homo Sapiens; identical to SEQ ID NO: 341842

SEQ ID NO: 472717 - DNA, 1000 bp, Homo Sapiens; identical to SEQ ID NO: 341843

SEQ ID NO: 472718 - DNA, 1000 bp, Homo Sapiens
ttttttttttttttttttattattatcccaataattattaaaatatagacctacaaaaagtagtaaataattcacttagtgacagcaggcatgctcactagaagaaacataactcagagggtaaaccatgcaaacattttaactttcaatggcaacgctaaaaaaaaaagtacaaagctataaaggaacgtttttagagaaagcactgaagacacacattttgctgacctaaaagattttaaaatgaattagaataatttacatcatataaagaggtatttagtctttaagtggagaaagttgctagtcacatgtaagaaaaacaagtattatgggccttcctaagacaaatggaataaattccatcacttttggcttttttataaaccagacttctaacaaataaccatattaattttccagtaatcaaacatatcctaaaagaggaaaaagagaatgtctacttttaaatcacatccaatgtgaatttgcgtgaatgcaaggcataaaatacagttattatgactctacaggcacctgaaagttttaactacctttcatgcttactttatattccataaagaataatggaaatacagggaatacttcaaatatgtattttttacaaatctgttttatgtagttcttattcttgtaagataatattccactgtggcagccttgtttttttgttttgttcataatattaagtagcccattaacctttccctttaaacaggccttttgatgttagttcttataccaaaaaaaaaaaaaaaaaacccaaaaccaaaaaacaaaccaacaatacatgaagatgtaagggaagagattaatgagatacaattcattaagtataaaaatatgttgtttcaaattcagaataatttaataactcttcgttatttcatatgtatctggaaatgggacagatacgtgtcctgatcctgtcacaagaggtagaattccagcatttggtacgacgttccaagacagggtc

SEQ ID NO: 472719 - DNA, 1000 bp, Homo Sapiens
ttttttttttttttggagttttaaaaaaatttattggctatgtttgattatccacaacagaatttcccttaattagcacaggaaattgaaagttggttataatttaatatctctgctcgtcttcaacagacatactcagcatttatacttgtaaatagaattgagttttcattgtttcgttttctgtttttgtttccttaggaacaagaggatgaaggaaatatggtcagcattttaataacaccataaatccaagataataagtaattctataaagttttccagtttcattaattcagaatttcatcatataacttgaaatccaattggcttcctctttcttagaaacaaaaaccaaagaaacctttttctgaaagacattattttccagtattaggccaatttgtcctcaaattaagtagaatctcaacatcttgttgagccagtttgtaaattccaacttcatttaatgctgctgtggcaggaagctgccctgaagctgactgcagtacatctttcagcagtagtgcagaaccgacgttcaaattcaaaacaatacaggcttcttttatatgtttaaaataattttctggtctcttgcaatagtgagaaaacaaagggaaaagattccgagtcatatcaaactgcagctgggctgctcctccttcattgaagtgattagcaagaattatttcttggtagatgtatacatccagcttctctacaagcatttgccagaaaattttaaataaggagaaacaaagctgctgctccaactgaagtaaatggtctcgtaacgtcagcagcaacgggcaagccgaactggacagggacatcactgcctgctctgactgagatggcaaggacaaccatctttcttttttatacaattttgcagcatctttaacttctctaaaaacgtggtctacttgacgggtcaacatatcatgctttaaacgttctaagaggttaatcatgtcatcaaagacagagctctcca

SEQ ID NO: 472720 - DNA, 1000 bp, Homo Sapiens; identical to SEQ ID NO: 341844

SEQ ID NO: 472721 - DNA, 1000 bp, Homo Sapiens; identical to SEQ ID NO: 160037

SEQ ID NO: 472722 - DNA, 1000 bp, Homo Sapiens
gacaaaaataaggatataatattaaaataaatcaaatgatatacagtactgttattattctgatacagaatttttacacagcaatactgatacaggtacaaacggcaatccattacaatcgacctttcagttacaaacaaggtttaaattacaacttaataccgctttaaaaatggtaattagtgttgtgccagattaaaataaatacttcctcttcaagtgacattttctagaatatctctaagtaggagactaaggaaaaaaaactttataaaaagtaaaagaagtaaatgtaatcttttatttttagaaaaacccaaacctagaaatctggactaaattaatttggctttccattccttctgtccacacaccagcccaacagcagagctgaagtcctcttgagtgacaggtttaggaagggtccagcagcactcctagcttccgtgccatgacaggagtttggagtgtcaagttcacatatacactcttttcactatttaaatgccagcaaaaagctggattcccatcagtgattctgccatcaaactcaaagagacaaaccctccactttaaaatgcaagaggagggaagagaaatggacaaaaataaagtaaggtaagagccttgaaattctttgaggtggaagaggcaagggaccaaaagctgtaggtgtatttgtgcggcagggcacaaatggggcttggggtggtgagaaaaaaaaaaaaaagtttttctaacaaaatatcaaattcttattttcctcatttttgtgaaaatgggtacgtttttgacatttaagaaaaaagccaaatcaaaccaaaacacaaacagggaaataagaaccagttccataatgccttacacttcatatttctatccaaaagtaaaattctctttcgataaaaaaaaaaaaaaaaatcatttacaaatcaaagataaaaatgttacttggaaagttgaggaagcaagagcatttctttctggcacattttttgtt

SEQ ID NO: 472723 - DNA, 1000 bp, Homo Sapiens; identical to SEQ ID NO: 341845

SEQ ID NO: 472724 - DNA, 1000 bp, Homo Sapiens
tttttttttttttttttttttttttttttttttttttttttttagcaagtaaaacttttattaaataaatttttagttgtttttttttttttttttttttctccagaccaaagagaggcgttttgaacattaagacgctttgctgcttctcacctgaaacacgtaacaggaacaccaacctcttcagccgcgggaaatcttctttgacacaaaactcaaaccgagtcaacccaaagttccaagttctttgctttctcttctgtgtgtgtgttggtttgtcccaaaagtcagtttgcaagttgaaacttcatgaaattactcgtagcagaaataaagtacattgtacaaatcacgcaggtctgggccatgcctacagcctcagggcggctgtgggcgcggtcagtaggggtgtcccgggtctttgggccgcttcagctggactttgagcctcttcatgccgatctggaagccgttcatggcctggatggctgcctgggcgctggccgggttatcaaagctcacgaagccgaaacacttgctctggttggtagctcgatccataaacaccttggaggaaatgatattgccgaagggtaggaacatctgcgtcagctccgtgtctccaaactcctgggggaggtggtagataaacaggttacagccctcgggaccttctcgctgctgctgctgcaggaggggcggcggctgggggacgctgtgcgcgatgggcgtgatggccgcggtggggtacatggctgtgtactgctggactccggagaaggcaggatgcagtgtctcggccacagtcgggctctgagctgggtagggcacaaggccattggcatagacggtttccagggcagggtgcccacctggaaagggcacgacacctgcaaagccattggtgatgggagccacgaggccaggcacagcggtggtgcccagcagcgggggtgagtgcagcccagaggcaggagcgatgggtgtggcaggcagcccg

SEQ ID NO: 472725 - DNA, 1000 bp, Homo Sapiens; identical to SEQ ID NO: 160039

SEQ ID NO: 472726 - DNA, 1000 bp, Homo Sapiens; identical to SEQ ID NO: 341848

SEQ ID NO: 472727 - DNA, 1000 bp, Homo Sapiens; identical to SEQ ID NO: 341849

SEQ ID NO: 472728 - DNA, 1000 bp, Homo Sapiens; identical to SEQ ID NO: 341851

SEQ ID NO: 472729 - DNA, 1000 bp, Homo Sapiens; identical to SEQ ID NO: 341852

SEQ ID NO: 472730 - DNA, 1000 bp, Homo Sapiens; identical to SEQ ID NO: 160041

SEQ ID NO: 472731 - DNA, 1000 bp, Homo Sapiens; identical to SEQ ID NO: 160042

SEQ ID NO: 472732 - DNA, 1000 bp, Homo Sapiens
ttttttttttttttttttttttttgcctgggctcatacacagttttatttcctgttgattttacagacactccatcctgcaagcccattcccttggaaaacccagaaagagtgggcacagtgctccctagaggaatagaggggacaagatggctgccagggagagggcagttgaggcacttagggatttactccggccctgatggaagatctggtgcccagggtagggggagagggcctgggctgggctggagcctcctaggtatttcccagaagccccttcaggaactgtcacctggactccagtaccacccctcgtcatgttgtcacttcctgtggtggcgggagcgcagggtgtgagggaaaatttgggtgacagggcagtgctgtggccggcagtgttcaaggccttgccccctagggacctggcatggggctggaaggggggatcaacagcgccttccagcgtcccagtagcctcccctgacgtccttctgggtcctcctctgggtgcagagctcgggcaggtcttctgggcacacaggagatctggggggcctcccaacgaccgttctcttggcatcggatcagcggcagattgcgctgggccagtccttcccggcaccggtagcgaagcacagtgtccacctcatagcgcagccgtgggcggccgaacacttgagccaggggcagctccggtggcggcccacaggacaccagccccatcttgcaggtgtaggacaggtggtagttgcagggcacgtcactccattgtccctgatcatgccacaccatgaccacgcagttctctccagacaggaagtagctgtcaggctgcccagggttccagttctcatagagcagggggacgccatccgaccacaagaagtcgccttcgatggtcctgtcgttgagtccgatccactggtactcccggtaccggttgttgatgaagtcctgttcctcgggtgtgctgatgctggccagatgcgcgccgtaca

SEQ ID NO: 472733 - DNA, 1000 bp, Homo Sapiens; identical to SEQ ID NO: 341854

SEQ ID NO: 472734 - DNA, 1000 bp, Homo Sapiens; identical to SEQ ID NO: 341855

SEQ ID NO: 472735 - DNA, 1000 bp, Homo Sapiens
ttttttttttttttttttttctaagcattataaaatcctttcctggtacacctcaggataatccaatgttttaatacttaggcaacactggcttataaagtccatggttgaatataagccttgaaaagtttgtttctctctctttcgtgtatgtgtgtgtgtgcgcgcgtgtgttttgttcgtatatatttctatatatattttagtaagtaagaatgggaaattcaggacttgtgggctttgttggttttaaaggaaacttgcaacactctgtctcccaggcggtacccgttgaggctggcgatggccatggccgcctcatcatagttggtcatggtgacaaagccgaatcccttgcacttgttggtgttgaagtcacgaatcacctttacgttgttcactgctccaaaggggccaaagagctgccagaggacactctcatcggaatcgggggacaggttgtagacaaagatgcaccacccagttcctgtgtgaccagggatgttcattcccacaaggcttgtcattccatcaatggtaattggggagaacctgggggaacaagcagaaggggggactggtccagacatcagtctctttacgccataggccatattaagcaaattgtccagcctgaacctctgagcctggtggtgaagtggacctgggtagcgccggttaggggactggtagagctgggagagcagggcctggctggacttctggctggggttgttggcaaacttcacagtaatcggttccgtagcaccgctgggcttctggccattcagccctttgatggcttcttctgcctcaatcctcttatcaaagcggatgaatcccacccctctggacactcctgtgacttgatcaaccaggattcgtgaggtgatgatacggccgtattgcgagaaaagttgctccagttccttctgggtcatggttttgggaaggccgctaacatagaggttagcatccctgattgaggcagagctcggac

SEQ ID NO: 472736 - DNA, 1000 bp, Homo Sapiens; identical to SEQ ID NO: 160043

SEQ ID NO: 472737 - DNA, 628 bp, Homo Sapiens; identical to SEQ ID NO: 160044

SEQ ID NO: 472738 - DNA, 1000 bp, Homo Sapiens
ttttttttttttaagttattaaatattaatgtgtttatttacttggattttacaagttatcatctatgaagattgaccaaattttaaaaaggctttctatttaaacaatagaaaaatgttacagtaagatggtggtaccatgtacatggtaatatcttgcattaattacaacatcaattctagatttcaaaagtgacataaatgtccattaatatgcatcaaaatatggacttaggatagctattcactcatggatttttgtctctgtaaaactacatctaaatcatggttctgatgcatgtgaaaaatgaaaataatcagtaaaaacctagctatttaaaaaatgtaggtagtgcacattcatgggtaagatcaaggttttcgggggggaaatgggaaatttgtgtggtggggtagagaagctgcataaatagtaagcaaaggattatgatgatcatttaaaaataaacagagtaagagaaaatccttaccacttaaattcaccattttaaaaacacttttccgtcttctgcctttaatgagtgctcctcctcatgcctaactttatgggggaaacaagagttggggaaaataacttggatcttatcctaaattacaaaattatcattcactcaatttcttccactttttaggcagagaataaactccattgtaatacttagaaggagaaaatgaaatttgtggcatttttattttaaataattagtcttactttgcttttttaaattagctcttcatgcagcacatgaattcagttcttatattcaccatgcagctttttcttcccatgaggaacgtggctcagtgaaaatggtgacttgatatttaaccgatccctttcagcctcctcttcctcatcgtatctctcatcctccacttcatcttccacatcactgctctgaggactggaggcctgagaccctgaaggagaaggtggtactgaggaaggcctgggatatttaaatccttctgtcgttgg

SEQ ID NO: 472739 - DNA, 1000 bp, Homo Sapiens; identical to SEQ ID NO: 341856

SEQ ID NO: 472740 - DNA, 1000 bp, Homo Sapiens; identical to SEQ ID NO: 341857

SEQ ID NO: 472741 - DNA, 1000 bp, Homo Sapiens; identical to SEQ ID NO: 341858

SEQ ID NO: 472742 - DNA, 1000 bp, Homo Sapiens; identical to SEQ ID NO: 341859

SEQ ID NO: 472743 - DNA, 1000 bp, Homo Sapiens
ttacttggtgtgggtggaatagcaagtttctgatctaaaacaagtaatgcattgcttctataaaggtgacaacatgtaaggcagttcaaagaatgctgactaaccaaacgaaatgcagttattatcatcgtatatcagcttaacttgttattacgcattgctcttaaatctgtacagcactccatttacacatagtaaccccactcttgattaatctgttctaaagtgccagtattatttcactttttttttttttttagccaaaagtctggccagttgtggcatcaggtgaagatgtcatcccagctctattatcatttacattcaccaagggaaattctgaaaattcagcacttgtccctggtccccgaaggttcacctgtccattggcagtgctaaattgagtagctattccagctcttgatccatgatagggagcacggaagggctgttcaaaggagctcatttggtaagcttggtggacaggctgggcctcagctttcttctgagaagtgacttgatccagaaagtcctgtgttgatgtggcagaagcatggtttgtctcatcacctgaaaagggaaatgagtgctgtgaatcaccaactattagtccaaagtgggacttatctggagttgttcttagtggagaattcattcctgatcgaaagctattgatgggcatggtggcatagacctgcttgtctatggaagagaatgctggctgatttgggagggtctggttatcagtcacaaagttaaggctcgggctattcaaataggcatcattttggctagttctgtccaaagcctgctgcagaaacttggagtattcctgcaacatgttggctttatctgatgaggatgcttgggagcttgatccaacattctctgatggggtgacctctggtacttctgaagaatttattgatatgctagaagtcacttcagtatctgcaacactgaaggatatctcatgctgtccattagctttgtgggaata

SEQ ID NO: 472744 - DNA, 1000 bp, Homo Sapiens
ttttaaggttgaaattaggaatttcttttttattggccactaaatgtcctagcaagtttctgacagaagcacagacagaaaatggaaacaaataccttactgggaatgtttccttgcttgcactaaccttgactacagcaataacgcattgcttaacagtcaaagtgcaccaggtcatttccgcaaatggcagggtgagtgactgtgccgttcccaaggaagcaaaacagacacaaacaggtcccacgcgctgggtgtcctggctgagtacagaggaggctgctagaccggcagtacccttttcccaagtgaggaaagccagctgtgacactctgcttgccggcaggggtccccaccctcccctccaccatctggcccatagctgtaccaccaattacattttcttccagcttccacttcatttcctacttttacagcatttcatcctctccttttgcagcctttacaaataagatcagaaatgtgtccaaacaagtgcattaagataggcccctattggccaagtcaaagagctctcacacatggtggtctttttgccttctcaagaggaacttgtataaacccatgtaccaacatacttgatgtaatcaaggaaggatcccctccaaattttaagcatttaattgcagagtcttgtcaagaaacttcttcccaactttacaactgaatggctgaatttgaaagaaggtatccagcttaatagctaaaataatactatttacaaaataagagaggaaaacacctattgatatattttgttggaagtgcaccattgtgatttgtacaaagctttagaagatgtgagagaaggtggtacagggatgttggggatgggatgggggaggcagggccatcgggtgggtggcaggagtgaggtgggctgttgggagttctataataaaaccttcccccattgtagacctgacctaggatgaaaagataaaccctcctccatgctgggagtgtctccttctgcctg

SEQ ID NO: 472745 - DNA, 1000 bp, Homo Sapiens; identical to SEQ ID NO: 160046

SEQ ID NO: 472746 - DNA, 356 bp, Homo Sapiens
tagggtggccctgaaaagggccttttattgatagaaagggacgctcaaccaccgaaaccgtagagggtgcggccctggcgcttgagcgcgtagaccacatccatggcggtgaccgtcttgcgcttggcgtgctctgtataggtcacggcgtcccggatcacgttctccaggaacaccttcagcaccccgcgagtctcctcgtagatgaggccggagatgcgcttcacgccgccgcggcgagcaaggcgccggatggccggcttggtgatgccctggatattgtcgcgcagtactttacggtggcgcttagcgccgcctttgccaagacccttcccgcctttgccgcggccagacat

SEQ ID NO: 472747 - DNA, 546 bp, Homo Sapiens
ggaaagttgaatattttattatttacacatataaagtgagaatgaaaattgggcatggggcaagggcaggaagatgactccagctcagtcggtgatgatgagctcgtccaccccccagtcttcatagctcccatctggcaggtaacggcgaatgatgatggggatctttcgggccttgagttccttcatggcaatgagcagaggatctgtctccccctccagctccaccatcacaggggcacacatcgcaatctggagcgctcgggtgcccagcacgcgggctcgctcgtacttggtcatgtatggtgtggtgattcgcttctggttggcctgcggtcgctccccagaggggaggatctcgacattctcctggccttcctcttcggcattctccaagtcatctagcccttcatcctcctccacatcatcaaagtcgtcgccatcaaaattgtcctcgttgtctgacatgacaccctcgcctcagcgaccccgctgcgccccggtcccgccgcggagacccgcaaacagcgacactacgactcgcgc

SEQ ID NO: 472748 - DNA, 1000 bp, Homo Sapiens; identical to SEQ ID NO: 341861

SEQ ID NO: 472749 - DNA, 1000 bp, Homo Sapiens
tttttttttttttttttttttttttttttttttttgagatcaatttcagctttactttacatttgcatttatgcatttgtttgcaaaaagtatacctgtccttaacattactgcaatgttcagtttagttttaaagtagtacataaaaataaacaatttaagctcctatatattttactgtttccaagcttctacagaacaggtgtgcaaacttaaggtttctcatctcaaacaaatctccatgcacgaactaatcaaaaatgctcaagtcagcaaacacgcaaaatgcattaaagagaaacctcgaataatgtttttaaaaaacaaactttggaacttttataattaaactaagttgttgcacctctcctttcatttgcatataccaaagacttccaacaatagatctcgtacttggcacaaggacatttcaaagaaacaaacaaaaaaaaagagagagagagaaaggcaaagaggtttacgctgacttgagtgcaagcttagtccacttcttcgatggtgggtcccccggaggctcctgaaccgccgccgccgctgccgccgccaggaccaccttggtaaagtttgctgatgatggggttgcaaactctttcgagctctttctgcttgtgttcatactcatctttctctgccatctggtttcggtcgagccagttgatcacctcctgacacttgtcgaggatcttgtttttgtcctgctcgctaatcttgcccctcagtttctcgtcttccaccgtctgcttgatgttgtaggtataggactccagggcgtttttggccgcgactcggtcgcgattcgcctcatcttccgatttgtaccgctccgcctcctgcaccatccggtcaatgtcgtccttgctcagacgacctttgtcattggtgatggtgattttgttttccttaccggtgctcttgtcggcggcggtaacgttaaggatgccattggcgtcaatgtcgaaggtaacctcgatttggggga

SEQ ID NO: 472750 - DNA, 1000 bp, Homo Sapiens; identical to SEQ ID NO: 160048

SEQ ID NO: 472751 - DNA, 1000 bp, Homo Sapiens
ttttgagcacacgccccctttattataaactgccccaaaccctcttaagaaggaggtggctagtcccctgagagtgcggctcactttggggtgcaggaaaccgagggagcctagacctgttccatttcaaaggctcactctgggggcctgagtgaggaattggctacatgtggttgggagacatcaaaggacccaggacccctgtgaccagagaaaaggggtctagggcgccttcacaccagggtattagaaatgctacgttaagggcaatatgcaataaacgggggactggcgcggcagggttcaggcactctgagtcgggctgaggcttcagagcctgccccgcaaaggcacggctgcagaacgtggcaagcctgccgggccctgcctttgtaactgcgcctcccctccccctgtctcactgttcccatgccgcgttactgtgagatcctgtgtgctactgtgtgcacagccctctgcagttcacagtggcctttccacgtcccttttccggttgaattcgcctgactgacagggaggcgggacagggctggtctgcacgctagtgaagcactggtggctgcaggtctttgggtccccatccatggcaacccccagctccgtggtcagctcctcaggcagctgatatccttgtccagtgtagaaaagcggatcagcttcaggctgggtggctggggcttcctgtcgtcccagaggtactcgggggacagcaccttggacggcttgtttgagatgaagtgacggttcaggtggctttcctcccgccaggcagccatgatgccattggccttgtccgccaggatggccatgtggcagcccctagtaaactcatataccctggccacctgccccccgaagactgccccaccataatagaagtccccttcgctgtctgccacaaaggcagtggaaacacgcctgcgctcataggggaactgctggcggggaacggcgtagtagcttgggtgaatggcagcca

SEQ ID NO: 472752 - DNA, 1000 bp, Homo Sapiens
tttttttttttttttttaagtgcaataaatgctttttattgtatgctcatttcaatgagtaacatttagaaataataatcccacataacagtagcgatcttattttacagcgtgtacatcatttacagccacataacacacaattttagtagatattccaaatttaatattctgaagttaagaaagataaaaaatttattctcaaggaactgattcttatctggtgcaaaaacagaaaggtgaacattatttgaaacacaaagccacaatatagcatgaagtaaaattacattttaattatgttgaacagctgaatgtaaacatgaagcaactaaaacttaaaagtacatatcatatgcattacatttatgaacaggattttcataaaatttccctaaaccagcttttaatattaagtgccattttgatttgcagcatgctaacacaaagcgttgttaaagggatgcatattttaagtttatacactgtaaactaaatatccacctccaaactctattggcagcagattgctctgttaaatactgcataaacactgcctcatattgaaaatgcatgttaatcatatggtatatagattttaaaaatcaatttcaataatggcataaaattgcacctttaaacattagagcaagtaagactagaacaatcatacttgctaagactgtcctaaaaaaactctagacattataatatttaagaaaactgtgttctctcaaattaatctttagatcattaagaaatatagtgctgattttgtttgcaacgctaatgttgcatccattttagaaagccacatttgactcaaatatacttttgtcatatatgccatactgaacaacaatcaacttgaacatcagaaaaaagggaactttaatctttatagacttcaccttagatctcagcacagaatgctatattttaagtatcctatcctgtgataaaatattaacagctctgaattcttttttaatagtactga

SEQ ID NO: 472753 - DNA, 1000 bp, Homo Sapiens; identical to SEQ ID NO: 341865

SEQ ID NO: 472754 - DNA, 1000 bp, Homo Sapiens; identical to SEQ ID NO: 341866

SEQ ID NO: 472755 - DNA, 713 bp, Homo Sapiens
cagaggaaaaaaccaaatgcacatttattaagctcaagacatggacactgaggggccagggggacggatcttcggggatgagacaaggaggtgcaggggggccatacacggggatgctgggggtgctgggccgggatggactcccggatcccaggagctggaggcctgaggccctgggtctggggtgcagacgggctctttgggggatcgtcattgccaaggcctggagagggacagcagggtgcagcggctccagccttggggtgggtggggcggctcattccggggagcgctcccggcgcgcggctgggtccccaccgcctccacccggtcctcaggctcccgcgctcaggcagggtcggcagcggagtttcctcgggaaggtgttacacgccgccgccaccaggggctgaagagggaagctcagacttacaggatttgcaggttgggctctcagacctggagtccgccttcctgcacttcaccttcttgctgatgacgatgaggatacccagcaggaacaagatggttgccagagtcatgcccacagtctgcaccgtgttgtagtcatagtaaaatgggtcaggttcctcaggagcctttgtgggggtctgggtcggggtcgccatgctgggccggagcagggggctgctggatgctttggcggcgaaggcgcgctgcagcagctggaagcaggacggaccgatgtgggg

SEQ ID NO: 472756 - DNA, 1000 bp, Homo Sapiens; identical to SEQ ID NO: 471906

SEQ ID NO: 472757 - DNA, 1000 bp, Homo Sapiens; identical to SEQ ID NO: 160050

SEQ ID NO: 472758 - DNA, 1000 bp, Homo Sapiens
ttttttttttttttttttcaactaaaatggttttattgagatgttttggttggaggagatactttttctggcaacatttctgactcaaggtccctctgggccccagctcttcccatgagacagtcacaacactgtttaatcagctctgcagaggccagccctggagcagaggaggattcagggccatggaggggacctactctgccctgttctggtcactacttctctagactctcatgcactattgtctgtagcaagtgacatttccactggaagcacataaagatggcgacagcctcatttcttcctgagtgaactgaagcccaaagaaaggggaggtcccaccaaaggggaagagagccagggccccacccaacaaggatgctgaaataaactacatgtaatgctttctaggagacaacacagaaatctctactctgaaatccagaatgttaaatatggctccccctctataagttaactgtacaagcttatcaatcatttaaaaccccagcaaccaacaatagcaattaggaatccaaattcatagcacaaaagaacacagataccagtgttggacagtggttttgttatggggactgggtgacagcttatcctaaatcctgcgcatccgtccataccaggagccgggttacccttggtaccaggtgcctgccccacaaagcctgggtcgggagagggcttggtgacgggcctgcagctcccgtgagtaactgtcttttcccaggctgtgcacgcatggccaggtggtcctcagggtggctggttctccttccaggagcaaccatggcaggggcttaaaagttgagtagctctgggaaatggtccttggaaggcagcgatgggtccatgagcacagtggtccctctttgccttggctcctttcttcttggtctgccctaggcttctgtggctgccacctccccattcacgtaatccggttccccgtcctcctcgtctgggcttcccaccgggccag

SEQ ID NO: 472759 - DNA, 1000 bp, Homo Sapiens; identical to SEQ ID NO: 246548

SEQ ID NO: 472760 - DNA, 1000 bp, Homo Sapiens; identical to SEQ ID NO: 341870

SEQ ID NO: 472761 - DNA, 876 bp, Homo Sapiens; identical to SEQ ID NO: 341871

SEQ ID NO: 472762 - DNA, 1000 bp, Homo Sapiens; identical to SEQ ID NO: 341872

SEQ ID NO: 472763 - DNA, 1000 bp, Homo Sapiens
tacaatttaggatgattccatttttattgtcattatttattcggtttttagagacactaagcgtgttaaaaattgtcgtctttggaatacaatgccggtttaaggggtctgtgctcctgccctctgtgcctccggtcttgagtagtgatggtgacacagcaagggtgggggcttggtggggagaaaacgcctgaagcaactgctctgggaaaggagagatcagagccggagtaaagatcaggatgctggggactggggctcctgggtctgagggaggaggggctgggggcctggactcccgggtctgagggaggaggggctgggggcctggactcctgggtctgagggaggaggggctggggcctggactcctgggtcctgagtagagagaggagggcctgggcagctgacgaggtccatcccaccgtgaagaccatcatttgtcccgcatcgtttcctcaatccagcttctgtacttgcacaggttggtgtagacaccggggtagccaggcagggcgcagcgctccattccccaagacacgaggccctggagctgtcctctgcacaccaggggtcccccagagtcaccctgacaagagtccttcccgccctggggaactcctgcacagaccatgccaggcgtgatggttctaggataggccttctggcacacctcatccggggagatgttgatgttcacgcattgcagagaggcggggtacctggcgatggggctggatatagttccccagcctgacactcggcaggaggtcccggggctggcacaggcctgggtgacctcaatgggcctgactgccctcccgatccgtgcgggctgctgtagctgcagcagcatgaggtcgttgtcgtgggtccgggagttgtagttggggtgcgtcacctgacgaaccacgcgcagcacctgctgggtggcctcccacctcctcaggttgtgcttgcccagggcaacctgaaggatcgggcggccgcagtgagcagc

SEQ ID NO: 472764 - DNA, 1000 bp, Homo Sapiens; identical to SEQ ID NO: 341873

SEQ ID NO: 472765 - DNA, 1000 bp, Homo Sapiens; identical to SEQ ID NO: 160051

SEQ ID NO: 472766 - DNA, 1000 bp, Homo Sapiens
ttttttttttttttttttttttttttttttttttctgaactttaatatttgaatcaaggaaaatgtgaacagatgaaactgttagtaagagagaaatggtgcatgcacaaaagggatagattaataaaatgacagctgattgttggtgatgaacatatttgttttccttaacatgtcccaacttccataattattcagatgtacaacaagtggtcctaatgtcctggctgaaattgcccaggcgtgcaacaaagcaagctggttttgttcctgaattatgcagttaactgaggctgtttgggcccagatttgatgtggtaagtagtcagaatgctgacatatgattattaaaaattattaaaattactttcttcccattttaatttgataaggtgatttcacacaattttgcatttcaaatatttctaagtaaatttagtaaaccaaagatgaatatgacaaacctcaaataatatgttttagaacactttcccatttgaactgttcactatatatgactgagtttattatacctccttcaacatatacaatattgatgttaaatgtcgtggtaatatatatgaactacataaaaacagtgttgctttctaacgtgtggcttgtttaaaccctaaaagagcacagctggctttgctgagccaaccatattattgatccgtcttgactgtgattccacttgtgagataaagtcccaactgggagctttctcataaattggtcaagacaggaagaactctaggtagccagaggtgtctctgtgtctcttttcaaataattgaaggccatttcttctggtgtctggaagaagtaaaatatccttgtctaacgggtatcgcttcagtataccacatgcccaataagttctagcatctaggagcatgcaatagcagctaatattagctatgcagtcatggtattattagtgtttaattatatcatgtgcattgagatattttaaatgttaaagagaaaacagaag

SEQ ID NO: 472767 - DNA, 1000 bp, Homo Sapiens; identical to SEQ ID NO: 341875

SEQ ID NO: 472768 - DNA, 1000 bp, Homo Sapiens; identical to SEQ ID NO: 160052

SEQ ID NO: 472769 - DNA, 1000 bp, Homo Sapiens
ttttttttttttttttttttttgacataacaagacaccatactttattgtgaaaaggaacagagatcctgggggtaacaggggtggacaagtgcacagaacaactggcccctttggaaggatgagagtcagccctgtgagttgggcttcggcttcttagccccagccagatctcctggttcagtcacagggaaatacatcttgggccatgcaagaacatgaggagctctgacgtagtcacactggttgttacgaaggcagcattttctgctgctcctgggagaaggcaggcacggagctggagaaggctgtgggcactagggtgaacaaggcactctgggtcccttggtggctggtatcccgcacaaagagcttgtcattcacgatgcacagactggaactgctgccaggggtagcaatgaaggtccgggtgaaggcgagaacagaaccctgagactgtccttccacttccttgaacaccccgttgacagaaaagcagagcatccattccgtctggtaccacatgtccaccaggaaggagctgaggtcatgctgagttttaggcaacgcactgagggagtccacaatatcaagttttgtgtgcttcagcagctccccccgaaggtaggggtccttgagaatttttatattcctgctatccttgaagaacttgcagaagctgctcggggctgagtcctcaggattgaagggaatgctcagggagaagcaggcctcatcgtggtaagcactaaggagaccctgtcgatctccagagtcatagatcaagtaatactgctgcaggaattgcaggaccagattcttcaacatctcagatccaaagaagcttcccttacaggttggtaacctcttgtgggcttcagtaccacataaagttgctctgggtgactgctggccatccaggcataataatttggggaacaattccaggatggagtttatgttgctggaggtatccgagaaggtcgtgcacactgggcttc

SEQ ID NO: 472770 - DNA, 1000 bp, Homo Sapiens
tttttttttttttttttttttttttttaaaaaaattttttttgtttcattttattggataaagattaagaaagcgccagcagtgactgagagaagcaaaccacgcccggcggccccgcggcctggagagggtccccggcgcgggcggacgggcggtctacctggaggcgctggtctcggccagccggttgttcatgatgcccagcgcgcccacgccgcccgagaagccgttctggcgcgtgttgacgcacacgctgcgcgggtagccgttggccgtctccgacagctgcttctgcagcagcgccagcgacaccttgttggaggccgtgaggtcgcgcatggagatgagctcgcccgagaggcggcggccctcggcgtcgctgtcgcgggccgcggggtcggcaccgagcgcggccaggcggcggcgcagccgggagcctggggtgatggcattgcgccgggccaggggcgcgccaggagccgggcagcagcgcgcgcagcagcggcagctcagcttgcgcagcatccagttgagcacctgcttgatgaggatggagatgacgttgaagagcgagtaaatgcagcacacgccgagcaggatgaagaggaagttgcccaggcggtagagcccctggttccggtaggcggcgtgctggctgctcaccaggtccccgaagccgatggtgctgaaggtgacgaagcagaagtagagcgagtccacgtagtcccagccctccacgctggtgtacatggccgaggcgcagcaggacagcagcacggcgaacaggcccaggatgagcagcacgtggtacaccgagggcttccagcccgccaggctgtcggcctccgagagcgcggagccgcggcggaaggtggcgggcagcaggccgctgcggcgcagctggcgctcccggcaggcgcgcatgatgaaggccagcagcgagatgatgcgctccaggaagaggttgaagaacaggatggtcccagcgcagccgaacagc

SEQ ID NO: 472771 - DNA, 1000 bp, Homo Sapiens
aaatgcataaatacaattattaaaaaatgctttcaaactaactttttgatttgggtcttttgaaataagtcactaatgctaagctataaaaactaaaaagaagtttgactacctttcaaaaattctcctgaatgaaattatcaggcgtcttcaggtctctaaagtatgagaatacaaactaggtgtatatgacttatctctttaaggaagctattgctctcataaaactgacaatcagaatccagtttacaaatgtcttacgttcagcaaggaacacacagattctgcattggctattgtttctgctcacagggatgtctcctgctccgaaattttaacaccgaaatgaaacaagttttgccctacttaccgtatgaaagtggatttgggttgagggacagaatttaccatacatgatccaagcagttttattaataattgtgacactcttctcatatatatgtaaaaaataaattgaagatcgagtcatagacaagtctccctgtcaacaactatccctgagtcagctttcttctcttttcggctttcaatgctttggggaatcagcttctagagtgattaggaaggggagcttttggaaggaaagcttgactccttatcttttgagttatcggcagtaatcagaaggttcctccacaaggcagtctttgacatttcatcagatatattgatcacagatggatcatctctatagtgcccttccaatgggagttgtactgtgccctcatcttccataggtagcacacattgttcttcttctttttcagcatattccagtttctttttcttactctcaggcatcaaatcatccaaccagcagagttcccgtttcgtgaacaacaagtccatcaactttcttacaaaaaccagggataacaccatcatgggagagacaatagcagctcttgaaacttttattatccacaaaaggccaaggcaactcatctgaataattgtgaagagatgcacttttcgaagc

SEQ ID NO: 472772 - DNA, 1000 bp, Homo Sapiens; identical to SEQ ID NO: 341877

SEQ ID NO: 472773 - DNA, 1000 bp, Homo Sapiens
ccctacccctgtcaggaagtaatctttctctaagaaatcccaagcactcatctctaggagaccagatgtcaaaacacaaccacctctggcaacatttggaattataggatgcattcccatgtaaactggcattaagaaaaacaaaattgcactaaccaaaaataacccaaatttaaggaccagaagcataagccatgaatttactatctcaggtagactgagcatttggataattctcattctccagaaatcccacaggaaggaaaaaataaataaatttatatatattcatataaagacttttatctattgtgcaaagagagggtcatctggctccccagaaggttctcaaccccatcaagactgtccattttacatctctagctccagttcttctcagagagtaaaagtgctccaaaggcctgtgatcatgggtactgattaagggctgcagactcttcagatccagttaaatccctggtgtttgagctgtgtgggagctgtggttgcttgcttcctggctttgcctgaggtcctgccgcaaaccctgcagcagctggtttaggagtgtaaggtggctgtctctgcgaggcagaggcaggggtgggaggcaattccctttatactcgatcactgccatcttggcccgatccaaactccgatttgggatctgcagcattcttgtgtagcccccagtttgatctttgtaccgaggggccagtacttgaaacagctttgggatcaaatccttctctgtgagccagaagtcagccatgcgcatggctcgttcgttagtgtctcccagcttcccatagtcgatgagcttctccgcgtagcccctcatttcgtccacacgcgcccatggtgcctcgatgcgttcgtgccgcaccagccctgtgagcaagttccgcaacagatggatgcgggactcgggaccgaggcccatacggcgaaatacgcggccatgggagatcgctgcagcgaccgacagccgcatgtt

SEQ ID NO: 472774 - DNA, 1000 bp, Homo Sapiens; identical to SEQ ID NO: 341879

SEQ ID NO: 472775 - DNA, 1000 bp, Homo Sapiens; identical to SEQ ID NO: 160054

SEQ ID NO: 472776 - DNA, 1000 bp, Homo Sapiens; identical to SEQ ID NO: 341881

SEQ ID NO: 472777 - DNA, 1000 bp, Homo Sapiens
gggataaaatttttgaatttatgttcaacatgtttcctgcagatttagtggaggaaaaatccacacatacccccatcccaatcccccagattttcttcaacatgccgcttctgttcttggaagagttaactgcctcgattctgcataagagtcccaaacactgagaactagggtgtcttccccttcctttccttccaaaaaggccagcagcctcaagcaagccaaagtcctttcctcttgaatgcgtagtcttgtgaactccactgtcttcacaaactcagcagctggtggaagctctctgaagaactgagacaggaggtggcactgctctgacaccatcctttgaaggtgacagagcatctcagggcttgggggacgccagccggactttgagaggagacagaagaggtgcttgcagaggtatttcacaaagatcagggtctcggcccaaaagttgacttctgctttttcaaacaggtagtcttcttccacctgatgcatgctctccacacaggccacgaggtcatcactctctcccaacagccatcccagcaggatgggcagtccaggggccaactggtcccactgctggagcagatcacacaggacggccagggccagggccagagcgatggaggcatccacctggcagaaggcaaactctgttgactggcaggtattttcttgtgacatggcagttgtcacggtttccgtggctgcatctctaacagcttgctcctcactctgcagaagggtaaggacacacttccagagagcaagtgtatcctgcaactcaagaataggatgggggttggtgaggaaaagtggtgtagtactggtgaggacttcaacgacggccagcctagactctgtaggaagatggtcttcacatgacaagatgaccagctgaacccactgcttcagctcagcagctatcaattccctgttctccacacatgtctgcatgtggtgggaaatgactttggaagcaagtctcaga

SEQ ID NO: 472778 - DNA, 1000 bp, Homo Sapiens; identical to SEQ ID NO: 160055

SEQ ID NO: 472779 - DNA, 1000 bp, Homo Sapiens
tttttttttttttttttttttttttttttttttttttttttttttttttgaaggcaccaaggaagaaatacctttattaggagtctaggcatgtcagaaaaacccagttcagtcacagaaaaggaggcaaatattggtacagagcaagaatccaagtgtgaaaataaaacctccatctaaatatcctaacagaaatgctgctgaatttagcccaggtgaaacttctgaaagctcctggtgaaatgagatttttgcataaagagagagctctccagcactgctgcatctgagcttcttataaagtgacgggtcttggccagcagtagaggaagagataaaggggatgtctcatcacccaagcaaggtcgtctgtgttcaagtgagagaagaaccttagggttttggacagagtaaactggggcagcagagggaaaatggctgaggaaacacaacgtctaggccgtgtgtggcataatgtggaggggtctgtgcagtctggtgtgagtgcatctccaggaggtcttgggaaacactggcattccttcctgaggccattttggttctgttctgacttcattcagagcagaactgccaatgtccagcgccaagtcctggatcataattagctgagtggaatgcagtagccaccctatgactcccatacctcttcctttctggagcagtcacttttctcagaccaagtgagatcttacccagtaggggcccaatctagaaatcactcccaccttcatatgagcaccaggtggagagaatcattctcatgactcaaagctttagatctcgatcctcagatgatgttccttggacagaagatcagtctgaagttatctgtgtcaagagtagctggcactgcccatgggtaatgggcccaagcgatgtgatgccgcagctctcccaaagaagagctctctctgctttcacaggcaggagaggaggaaatgaggcaggcttcaaggtagtcaatgccacttaattcttc

SEQ ID NO: 472780 - DNA, 1000 bp, Homo Sapiens
ttttttttttttttttttcctgagaagtcactggtgtttaatggaaaggtatcctattagtccttggttaagataaggcagtaagagtatcactaatactatgtttttgcttagaatgaggctgatccttccactggcgtcttcacgggcaattagttccctctcttttgctcctagaaacacaggtaggagctgtctgccccctattgctgttgcattttctgagtgtgttgaaggctcatctagtctcatcacagcagcttccccagtggggatggagcgctgtatattgcattgtagcatctctccaggaagtgcacgggccccacagaggaaaacacaggcatctttctttctgactcctcttctgtttctcttagggacggggcccataaatgattccttcacatgatcaatcagaatgcgagacactgttgactaaaacataaagcaagtagccctgatttcagagaaatggagttacaaataacattttcaacagtgccttaacttgccaggtagcttttactgcagaaggatatcagctccttttgtctacctatcagaagagaaacaaaccatttccgtcgaactagaaatgcttagctcttatgagaatattgtgcttttaaaaaaaattcaaatgttaacattatttgcagtctgtgttctaaggtttcaatttgttttttctctagtccatttgatcattgtctctggtgagcgatataggaatattaatttggcatagagatcttcttctagctccagttctcctgtctctcgaactaaaaaaatatctgtgcacaacttcaaaattcgatccacatttggaagctcttcaaacatgatggagtgagaaatcccactgaagaattcacggacaaatttcccaatcacaaggacaactgaagcatataatcccataataccatagccagccaggaaccccagacttgggggactgactttgtcattgaagaccaccagttccagggcc

SEQ ID NO: 472781 - DNA, 1000 bp, Homo Sapiens; identical to SEQ ID NO: 341883

SEQ ID NO: 472782 - DNA, 1000 bp, Homo Sapiens; identical to SEQ ID NO: 341884

SEQ ID NO: 472783 - DNA, 1000 bp, Homo Sapiens; identical to SEQ ID NO: 341885

SEQ ID NO: 472784 - DNA, 1000 bp, Homo Sapiens; identical to SEQ ID NO: 160057

SEQ ID NO: 472785 - DNA, 1000 bp, Homo Sapiens; identical to SEQ ID NO: 341887

SEQ ID NO: 472786 - DNA, 1000 bp, Homo Sapiens; identical to SEQ ID NO: 160058

SEQ ID NO: 472787 - DNA, 1000 bp, Homo Sapiens; identical to SEQ ID NO: 160877

SEQ ID NO: 472788 - DNA, 1000 bp, Homo Sapiens; identical to SEQ ID NO: 341890

SEQ ID NO: 472789 - DNA, 1000 bp, Homo Sapiens; identical to SEQ ID NO: 341892

SEQ ID NO: 472790 - DNA, 1000 bp, Homo Sapiens; identical to SEQ ID NO: 160059

SEQ ID NO: 472791 - DNA, 1000 bp, Homo Sapiens; identical to SEQ ID NO: 341894

SEQ ID NO: 472792 - DNA, 1000 bp, Homo Sapiens; identical to SEQ ID NO: 341895

SEQ ID NO: 472793 - DNA, 1000 bp, Homo Sapiens
tttaatatattaggctatttattaatatgatattcatagcacaggagctaggggaatggacattgtgagactaactccaaagagtatatttaaaagtaagtcttacataagccagatcattccttttcccattatatttcataatcctcttctgatttcattaacctctccataacaaagacgggcgaactcaatctttcattttgcctttttgacttctgggatatcttctcttttctcctggctcaattcctagcctattgcaccatttagctggatattctagtgcttaggtatctttttcatataccacacgaacaggttaaacagatacttagaattgggaaaatctcatgatagcaactaggcagtagtacttaatcttttctgctgtgtttttattctcaaaacatattttcacatgcctcattcaaaattaaagttcttaagttttttagacatagaattcagtatatcataaatatgaaagagacagaattacagcttaattttacaatgatattaagattgaaattattcattaaaaaagtatatcagcttacagtgacttctgctgtagctgtagcttttgttcaatgatgtccgagaaacgaggaactttttttgaaatagccacacggatatcatcactcagattaaagcagcttctggactttgttttgaaatgtaaaagtgatgaaaatcccaactcacaaaggtatgtagttgcaaatggcataaggatttctagagctgtctttgccaggtttggaaatgctgtgaattgggcacaccagaaatcctcaagcttcattgtctcaaattccattaggatttggccactagctcgtaattcagcaagatcatttttcattaaataactatcatcaacaaaatcgatattaaaaagaaatggatccaatatccatttacttgcctcattaagatctccaatggaaaaatatccatggaagaagttgctcaattgttgcagatgcag

SEQ ID NO: 472794 - DNA, 1000 bp, Homo Sapiens
tttttttttttttttttttttttttttttttttttacagcctgtaaaggtgtgactttataaagacatctccagcttcctgtctctgcactctgcgggaagcaatgcgagggcatgtccgcggctcaaaaaactaaagcaagtccctgatgtacaggctgcgccgcacggcgttggaaacaccctcgttgaagcggaaccagacctcgctcctgcccaccgctgtgcccatgcgccgctccactgagtcctgctccggggccgtgtcccctgcactcgggactgctgtgctcctgacgaccacacgtccaaagaagtccttctcaggctgttcctcccgggccgctcgcctcatgatgtgctccagccgctgctcatggttgcgtggggcaggtcggtgcacccctttctccccaatgccccccagcagaccctcgagccctggggggctcccatccacctgggggctgttctctacccgggcagaagcctccgcccgccgcatcttctccacctcgatctcgcgggcgatgagctgcttcgtctggtaggtgaggggcttgcgggcaggcagctcagggaagcggcagagttcctccacgttcggctccagcctgtagatgtactggccatcgggcgtgcgctcctggcggtaggtcaggctgtaagcgagcatcgtgcccaccaggctggccagctgttgcttttcacgggtgctgtacagctgtgtgctcacggggcggagcttgggtgcaagaatgtccaggagcaggcagagggcatcgaggagcagggcctggggcgtggcccggctgcgcgtggctggcgcgatgccggacaccagcgtctggatcaggttcctcatctggctcatccggttctgggcctcctgctggctgctggggaaggtgatcctgggtgtgtggctggaagcaaacagcacatggaaggccacgggcaggaagggtgggtagcgcagcagctggaagctctggctgtga

SEQ ID NO: 472795 - DNA, 1000 bp, Homo Sapiens; identical to SEQ ID NO: 341897

SEQ ID NO: 472796 - DNA, 1000 bp, Homo Sapiens; identical to SEQ ID NO: 341898

SEQ ID NO: 472797 - DNA, 1000 bp, Homo Sapiens; identical to SEQ ID NO: 341899

SEQ ID NO: 472798 - DNA, 1000 bp, Homo Sapiens; identical to SEQ ID NO: 341900

SEQ ID NO: 472799 - DNA, 1000 bp, Homo Sapiens; identical to SEQ ID NO: 341901

SEQ ID NO: 472800 - DNA, 1000 bp, Homo Sapiens; identical to SEQ ID NO: 341902

SEQ ID NO: 472801 - DNA, 1000 bp, Homo Sapiens; identical to SEQ ID NO: 341904

SEQ ID NO: 472802 - DNA, 1000 bp, Homo Sapiens
tttttttttttttttttccagaggggaattatatttattcacacaaccaaaacatcagacagactcagcagcagtggggagggagggtgggcagggctgaaggtccattcacagcccgtaaacccctcagtctcagggatcgggggtgctggtagtgggactgggagaatagtcttaatctctcaggtgcccacccaccttcccttcttactgggaggaagggtagagctgtctctcaggttataacctctcaggtggaggcctgagccctcagaccctactgcctagtagcttgacaactggtggtgtccccacaagttagggaaaagactcccagccactccttgagatgggtgcctgggatcccccttactgcctcaagctcccatggacctgtgggcggggagttaaatccctgttccatctcgcctgttcccagagtttgaggactttcaccctgtccagttcccagggaaggtgatgtgggagatgaatattgagatttgtgccgtgtctttcagtctctggtacccctgccaagcaagagttgagggcatgcaatgggctgcccagctttgagaccagtggcaaggaagggctggttggggctcaagtctcagcaggtgtgtgtggggggccgggacctttgctcctccattcgacccccaccctgaactctcagcagcaactccaggagctcttgcccccctggagggaggggaggctctgaccgctgggcttccatccgctggcactggtgactgaggatagtgctgtaaagctgttctctgtcctcgagaggacggagtggggcaggggctaggcttgaggggttttggggggtgtagaaggtggccctctgctcctccaggcggcgggactgggcttcagccaccaggtccagaaggagttcagtctgcagggagagcagggaggccgagcggggtcccagggctgtgtggcgggtccctggaggaggaggggatggaggagcagatcg

SEQ ID NO: 472803 - DNA, 1000 bp, Homo Sapiens; identical to SEQ ID NO: 160061

SEQ ID NO: 472804 - DNA, 1000 bp, Homo Sapiens; identical to SEQ ID NO: 341907

SEQ ID NO: 472805 - DNA, 1000 bp, Homo Sapiens; identical to SEQ ID NO: 341908

SEQ ID NO: 472806 - DNA, 1000 bp, Homo Sapiens; identical to SEQ ID NO: 341909

SEQ ID NO: 472807 - DNA, 1000 bp, Homo Sapiens; identical to SEQ ID NO: 160062

SEQ ID NO: 472808 - DNA, 1000 bp, Homo Sapiens; identical to SEQ ID NO: 341911

SEQ ID NO: 472809 - DNA, 1000 bp, Homo Sapiens
tttttttttttttttttttgaacttgctcagaattttattgggattaacagggtccacggggagaggcgagccttctgggggacggggacaagaataccgcaaagaataccgcaatggcgaagcggccttgcatagacaccgaggcgggctagcggcgcggcgggaagaggagagggatggagaaagaacttgggagaggaaggtggcagcagcgcctccatgggcactgcgcggctgtgacgaaggccacagcggccctccccgcttcgggggtcagggtgtccactccacacagcacagggagaggggctggggccacaactgactgggagaagtgggtagaggggccctgaccaaggcatcacaataaatacagttagcagcacacagaagcctgcgggggcggagggccaaaagaaggggactagccccctttccctccccccaaaataagaactctgcaatgactaaaccataaaaataaactttaaacccgtgtacgaagtcggtcaccccccagaagtgcaatgtggggccgcgtggccctagctgaggaggagggcaaatgggatagtgggtgggggatacagagaggtgatccccaaaaggggaaaacccttatccggttttccccctcttccccggattggcccaaccgtttgggacctgaagcacatcctctaggtcagagtcgtccgaatcttccccttcttcccagacatcttcacttccttcctcctcatagtttccttcctcatagatgtcctcatcttgctggatgccttcctcaatgccctcttcttccactgattcgtctgagatgatctctatcacgtcctcgtagtcagcctgatccttgtcaaagtcttcaataactttctcatagtactcaatgtctctgtcgtcatcatcgctgccttcattgtcaccttcattgccatcatcatcactgccctcattgtcaccttcgttgccatcattatcttcatcatcactggc

SEQ ID NO: 472810 - DNA, 1000 bp, Homo Sapiens; identical to SEQ ID NO: 160063

SEQ ID NO: 472811 - DNA, 1000 bp, Homo Sapiens; identical to SEQ ID NO: 160065

SEQ ID NO: 472812 - DNA, 1000 bp, Homo Sapiens; identical to SEQ ID NO: 341913

SEQ ID NO: 472813 - DNA, 1000 bp, Homo Sapiens; identical to SEQ ID NO: 160066

SEQ ID NO: 472814 - DNA, 1000 bp, Homo Sapiens; identical to SEQ ID NO: 341915

SEQ ID NO: 472815 - DNA, 1000 bp, Homo Sapiens; identical to SEQ ID NO: 341916

SEQ ID NO: 472816 - DNA, 1000 bp, Homo Sapiens
caggcactttcaagatcattgtttatttattacttcagataaaaagatagtatacatattagggaatcccttaaaattcaactctagagttatacaccatctagtacttttgcaatgaatgttaacaacaacaaaaaaaatctctaaacacctgaaagccccactattaacatggactatggtaataaaaaattttgacatttaatttgttcaacatatagtatttacattatgaaaccaatggtgatgatacaataaagtgataaagaaatagtaaaaataaactttaaaaagcaaaggtttatagtctgacaatgctaattatcctaattgtatataaaaaattaaaacatagagctttctgttacaaaattcttaatcctctgggttgtaatcattacttgctaccaatttacatgcaacatctgctaggactgacatttgatttttttccccaagaatgtgtgagtagataaatgacatttcagagcagatattaatttacttgtggacagaaaaagaaactcaagattggtactggtcacaagcctcttcccaatagaaattataaaaacagtaagataaaatttaaaaaaaatctaacaaggggatgcataggcaaagagtaccataaatggcacagctcaaaaaatcccaggaccaatcagacacacatcttttctctctccttcagcgacaagaggtcgattttgccatcaaataaccatgattgaagcaagcgaggggcaccaggtgtacaactgattagatcttgcaaaatactaagatgggagcaggggtggccagaagaaggggtaatttatatataattcaaactatatacagcataaatggaatgcagcccatcccaaactggctctgtgaaacaattggacctttatagttaaaattataacaagtgtaataatacaatagatttacatgggaagcaaaatccaagggacattttatattaagtatttactgtgctgtttcaatt

SEQ ID NO: 472817 - DNA, 1000 bp, Homo Sapiens; identical to SEQ ID NO: 341917

SEQ ID NO: 472818 - DNA, 1000 bp, Homo Sapiens; identical to SEQ ID NO: 341918

SEQ ID NO: 472819 - DNA, 1000 bp, Homo Sapiens; identical to SEQ ID NO: 341919

SEQ ID NO: 472820 - DNA, 1000 bp, Homo Sapiens; identical to SEQ ID NO: 341920

SEQ ID NO: 472821 - DNA, 1000 bp, Homo Sapiens
tggagaggtcacacccaatctgcccctgggcactgagacagctgcgtctctgggagcctcactggtaggtttgcagggaggtgaagagtttccctgttggcaccgcacccctcagtgcaggctttctgtcctgtcccctcccctgcttagatattaaatatctacttttttaaaggcccttccgtgtgtccttttcttctttgcctcccctctcatgcgttatacagagtagatgctaagcatggatgaaaacgtttcgagtgacgtaatgcaaatcctttgtggataatttgctccgagggtcactaagatactggtgcacccaccaatgctgggccctttgggggtccggagagcaggaatgcacggaccctctgagagccggtacctgtgtgggctattcatgggatctggactcccttcctctcccagggcagtttccatctctccttagcccaacctccctggacaaggccgagagccaagtgacttatcaattttgacaactaatggcatggggcaatatagtcctcccaccagaaaagaactcgtggagtccgcagtacaattgcaggactcccgtctttatacacaagggtcagtctccaaacagaagtttagtaggcccaggatagagtcctggattttagaaagctggactatgtgtccagagtgcccaccacccacagcaggcagagggagagaaataaacaaacagcaatgccaatgcctgtacaaaagaactatacaatttacatatatatttatatacagcatataaatctctttcttctcaggccccaacaacaccctcccccacccccccaaaaccctctaaaagttgtcagtagcagatccaaaaacttacaataagagagagaataaagtctttcttccctttccttttcccactgtggtattagatattggtgttttaaaatgaaaccaaaaacaaaacacgcaagtaagagttattaaaagtgcaaacatggtgggcacc

SEQ ID NO: 472822 - DNA, 1000 bp, Homo Sapiens; identical to SEQ ID NO: 341921

SEQ ID NO: 472823 - DNA, 1000 bp, Homo Sapiens; identical to SEQ ID NO: 160067

SEQ ID NO: 472824 - DNA, 1000 bp, Homo Sapiens; identical to SEQ ID NO: 160068

SEQ ID NO: 472825 - DNA, 1000 bp, Homo Sapiens; identical to SEQ ID NO: 160069

SEQ ID NO: 472826 - DNA, 1000 bp, Homo Sapiens
tttttttttttttttttttccacaaatgtttaatttattaagtgtgccagggtatactgctaactcattgcattttaatttttctctagatactcaaatagctaagcaaatgaaggtacatgccagtctttcttcttttatacacaacagacaaaagtgttggggggctagacaccaaccagctatttttttcccctggaaccagatcatcatactgctgagttccttcaaaccatcaaagtacagccttccttccaatgttgcataatctgttcaaaatcacagtataaatacaaagttcttccatccattttacaaaaccagcaaaactctacaataaaatcctacaggaaaaagtagaccaatctcatttacaaacagcattttaacagtaattattaaatgttacaaaacataagatacaaaatctaaatccttaaagtcacacgatttctacagaaataagaccctcgccccacccatattacttatgactcaggacagtagttcgtcctcacggggacccactggccaacttttcaccaaccctcaccagaggtggatgccggccctagcactggccctggccctcatactggcttcagctctggccttggctctggccctgtcggcctcgtctgctagggcctcacggtactgcactggccagtgctgcggttccttcttatgcagtttggccacgaaccccaggacttccatcttgctgatttccaggttgcttcggggaccccaagagaattcatattctggtggattggtgtgaggcacccgcctgtaactgagatatcgctgctgcacaaaatcttccataataagcctcttcggatacccaaagaggaaatgatactttgagggttgcacccccaaccgacgcagcatctcccagacctgggcctccctggcgctattacctctcatatagataaggcccaggatcatcattaacagacccaatctggggccatctcctcccagatcc

SEQ ID NO: 472827 - DNA, 1000 bp, Homo Sapiens; identical to SEQ ID NO: 341926

SEQ ID NO: 472828 - DNA, 1000 bp, Homo Sapiens; identical to SEQ ID NO: 341927

SEQ ID NO: 472829 - DNA, 1000 bp, Homo Sapiens; identical to SEQ ID NO: 160071

SEQ ID NO: 472830 - DNA, 1000 bp, Homo Sapiens; identical to SEQ ID NO: 341928

SEQ ID NO: 472831 - DNA, 1000 bp, Homo Sapiens; identical to SEQ ID NO: 341931

SEQ ID NO: 472832 - DNA, 755 bp, Homo Sapiens
tgagggtcaaatatctttaaataaagtgccaggaacaataaatactgtacaggaagagagtgcacgtgaacgtccagatctgtggtttcaacctcgagactccaaggacgagtagctctgatgctgttggcgccggcgggcagagcgcatcttctcgaaccgggcctccatctcctccagcactcgcggtgtgtaacggacaaccagcttcaccgagccctgggccgccttcagcagctccaccgccttctcatgctgctcaccctcaacgctcacaccgttcaccgacaacagttgatccccacgcttgaggcctccatggcggtcagccacaccccctgggatgacccgggagatgtagatgggcgagttttgctctttgccacccatgatgttgaagcctaggccctcatccgtcttgggtagctccactaccctgggatgtgcgtggccctcgctggctgtgaaggcagccactgtggccttggctgtggcatgggctcggatctcggcgctgccggtgatgtccagcgtgtcataaagctgctcatacacctctcggatagcggagcagaagcggctctgcagaactcgctggagggcctgcagcttctgcggcggcagctccccgctgcgctggagccgctcgaggagctcaaccgcccgggacacgtcccgctccagccccagcggctccaccagcgcagccatgtcggcgccacagctgccagccgcccgcctgccctggcgccggc

SEQ ID NO: 472833 - DNA, 1000 bp, Homo Sapiens
gtttaaataaccttcccatttttatgttgcatgtcccgttgagcctgtggccgaagggcatgaaattaaaaaccaaatctgaaatgctatttcctggacgggaaaagtctggttcatgtggtttggtcactcccaacagcaccggtgtgcaattgacgaaggttttgtgtgtctgacctcagaacggaagggctctggcaggggatgggtgctgctgtgctgtctagctcaggagttttgctccaagcattgctttgtgagtttcatcgcgttgccttgtgagtttcatggtcatggctgtcaaagttcccattttcaaggatcaaagaaggtcatggtcttgagtctggtgctcacaaacatcatcctatttctgctactttgtgtggcagccttgagggaaggaggcccagacccctggacaggtggcagttgcacttgtggctggaccttggccatgccacatcaaaaggctttcccacttacctagttactaaggagaatagttcaacccaaggagggctgctgagaggctcagagctctcctaaggctgcagcctccatgggaaagggcccacgaccatgactttcaaggctggcaccagagtcccccagccaagagaagcagaaaaatgaaccaaagggcagggctggagtttgaacccatggttggtctgggcagtgcttgtcaaactggcatttgcagagcccttgggttctgaagaggtaccgtaggagataccctgggcaaggggaccgcccagagggctgagctttgggagggaacctcgcacttgtcagcttcaaccagagcagcttggatttcgtcagcaccctgaacctccacttatgactgtgctccgtaaacgaagttctgctgctcgaaagaaaagtctgaaaatcacacgtctggggtcaggggtgggtcactggaaggggaagacaaggaacctgtaggacttgaggatcaaccagaagaggtgagacagtcacagtgcag

SEQ ID NO: 472834 - DNA, 1000 bp, Homo Sapiens; identical to SEQ ID NO: 160074

SEQ ID NO: 472835 - DNA, 1000 bp, Homo Sapiens
ttttttttttttttttttttttttttttttttttttttttacacattgcatactgtataaatataggttttattaataatgggtgaaatcccacaaatacaactggcatccctgtgtgataggaagaatctgtggcagggtgagaggaggtagacagggatgtgtacaggaaaaagggggaaaatgagccctgggggaggggaaatcagaagcagaatgagcctggacccaccaggaaagccagacatgctctgagtgtgtctgccacctggtgcccagggcaggctgttctgatgcccaggggccacctgctgataggaacagtggagggacatggacagaagtttgaatgagcagcagtggctggggaaggggtaggggagtgaagatgccagcatggagcacaaaaggagggccgtgggtggcagtggccaaggccaacttatgcccgtggttgtgcttgtgttggttcctgaactccagggatctagtgccctgtgccacccctggcttgggaggagggaagacttgggggtagacacctgcagttcctgtagacaccctgggcagcaccagccttatccttagagtctccaacatgggatccccaggaggaggttggcactgtcctcccaccagcacccgccaccaccagcatgccaccatcactcttcctctgtgctgtaggggatggcaagtgtgtagggctgagatggcctgttctcatgtatgtgcctgtcactccggagagggagggagcatcacgagaccgtgcatgcgttaggggcagcgagaaaggagggttgggtcttcccccactcaccccccgcccagaataaagtgcattctccagttccagtggcaggtgggagagaaacacagacattattgcacaggtgccaccaggccctgcccccaccaaaggtgatggggagggggatggggcatcccacagccccaggcctctccaatccccaggattgggagtggtgacctagac

SEQ ID NO: 472836 - DNA, 1000 bp, Homo Sapiens; identical to SEQ ID NO: 160075

SEQ ID NO: 472837 - DNA, 1000 bp, Homo Sapiens; identical to SEQ ID NO: 160076

SEQ ID NO: 472838 - DNA, 1000 bp, Homo Sapiens; identical to SEQ ID NO: 341934

SEQ ID NO: 472839 - DNA, 1000 bp, Homo Sapiens; identical to SEQ ID NO: 341936

SEQ ID NO: 472840 - DNA, 1000 bp, Homo Sapiens; identical to SEQ ID NO: 341937

SEQ ID NO: 472841 - DNA, 1000 bp, Homo Sapiens; identical to SEQ ID NO: 341938

SEQ ID NO: 472842 - DNA, 1000 bp, Homo Sapiens
ttttttttttttttttttttttgccagtcacatgcttacctgcatttttaaagacagctttcaggtatttggggactacattattaccaaaccttggctttgggagattatacaggtccgaggaactcgtgtctactgcagacgaatgcaattaccccaccttcctccatacagaattgttaggaaatgtccactcctttgggggtgatttttctcctcaagttgtagccaacattttgtccgtaactgatttcagggcaaacatttctgacatcttcctccagctcagtctgccatgccttggcaatccagtttcctgtcatatgcgagccatccaagttgatgccaagtaagatttgcccagctcaaagtgaaagtgtttgcgtcttggtatccggaatcctcagccccagtagcaaagctttagtcattcaccttcatccaatagacgtttgtgaacgtcctgctgtccattttgtcaataaacaggcagccctgcaggtggtccatctcgtgctggatgatgcgggctgcccacccgctcgcctgccacaccacctgttctccattggggtccagccctgagatctgcaccgcctggaagcggggcacgcaggccaggaagccggcgacgctctcgcagccctcgggaaaggtgaccaggcggctgtcaagcactcgcaggctggggttcacgaacacgcgcagggggaagggctccatttggcggagcgcgcgctggcggggcgggcactcccgacacagcgcctcggggagctccagcgccagcacctgccgcggcacccccagctgcggcgcgcttaggcccacgcagcgccgccgccgcatcacctggaccagccgttgcgtcagccgctgcagctcgggcccgcctagctgcgcccgctccaccggggccgccacgccgcgcagcaccgggtccccgacttggcacacgtgcgagaacggcggttcgggaggacccagcaccagacgcctc

SEQ ID NO: 472843 - DNA, 1000 bp, Homo Sapiens; identical to SEQ ID NO: 341939

SEQ ID NO: 472844 - DNA, 1000 bp, Homo Sapiens
tttttttttttttttttttacacaaagaaaaagattttattgtcttcttagtcaatatccctggtgaaattagaggcatagcttgagactggtgacagtgcaacacagaccttcaggagctgctttgaggactggcctgcccagatgcctgctgttaagccagcagccccctcactccggcccctgccatcttgacagatggagctgccatggtttcagggacactcagcagggcatctgggttggtccctcccacatggaccttgtaaagttgctattcaggggaacctggtatcgtttcaggcaaaacacagaaccatattagcacttctaagccccctgccccggccgcctccctggaacatttgggcttgtcgcacattccaggagggagcaggagcacagctgcagccacagctgccaggaacaggcctgggctcccgccctgtgtggggggagggcagaggctgagggcttcctctgggggccctgagtaagctcaccctcaccccacctctctgacttcatccatccaaggccgcttggccaagagcccaggcagggtgaggggctgtctcccagaccaggcctgggctgcctagcagaggtgggggagggggagcttcaggcctagcccaactctccagaaaccaggggtagcctgctgagctctgaaatgccagaagtttaagaaaagagggaagggggcaagaggtggtggtggtagtggtactttgctatttaaaggtagaagaatgcaaggaagtaaaactttttttctccatttgttgtttggcgaccccattggagaattccaggaggcatgcaggatgacatcatgttttacaactgagaaatctcagtaattctgtaaaatggagtccctgcctgctccatgttcctgatggaagctgctttatatttatgtgcttaaagctgtattttatgtcacatttaaatgagggtttaataatcttaattatctaccaaaagtagatta

SEQ ID NO: 472845 - DNA, 1000 bp, Homo Sapiens
tttttttttttttttttttaagaagctacagtccactgaaaaggaagtattatggtttttctgagaagaaaagttgctaaatactgcagcaaactcaggcttttcctgagaaaagccacaaacaaaatcatctctgaaattttttaagcaacaacttcctgaagcgtggaatttatggggccagtgagacactaaaatttcacaactctcacatacattatctatctaggactcagtgaagatgttcttcagatttttatttaagttaaattggtaaaatacaaaaagaaaatctggattgagtttcaaatcatcttaaatagcaatcctatgaacaattataactgcaatttcaaacactaagacttaaatatacaacttgatcatacaattatctcaaaacatatgatcaaaaactttggtcaagagcttctttcatgaattcttcaaggacagctatcacatttttggcttcaggcatttcttcatgttccactttaacaatcttcaaaagtatatctccactaccacagttctttaggaacatgtaacatttaaacaaagcataatgattcatttctgcctgtcggataaatctcttcaaattgtttgtgtcttgtatggcctttagtttaaagttctccagtacttgtcggaaaagaaaagggttacctcctttggcaccatttaaaaaagcttgcatccaatcctcacaaaaccggttacttcctgcattgcagaactgaggctgggagctgctgcaatcgatgaccacagacttatgctgctcctctgtcatggccatgcacaaagaagtcatggtgccttcatgaataagtccttgaagactggccacactcagaaacctgttaatgtctctctttgttttttcatctgattctttaacttcaacaggagtgtaactcaaagcagcatgtagcagaaaggtaagcttttcctgaaagagaagaacaaccctttggattgggcatacaacatc

SEQ ID NO: 472846 - DNA, 1000 bp, Homo Sapiens; identical to SEQ ID NO: 341940

SEQ ID NO: 472847 - DNA, 1000 bp, Homo Sapiens
tttttttttttttttgattcaacaatacatttttaatatagctttaaaaaggcaaacgaattttaagatcaccaggggcaaatgcagagcataagacattcactggatccagttacgtgtgtaaatgccctttaccaagtcaatactattaaagagactagtggttgtggcagaaattgtttctgcttataagggaggcaagccaggttctagtgtcctcagcaaaggcacaaactcatagcataatgccaggccagtcatttaacttcccagagtctcattcccttcgctgacaaaataggaagattgaatcagttgatttctcatgattaactattttcatatccagtgaattttcagcttatcagctactcaattgccatctgcttttcttctctgtcttccatcacaatgcaaatgccctcccatgtgtatctcgtgattggctggttgttccttctaccactcttggtgacatactcaacacagtgcagggataagatacactaggcaaggttaagtgaagccggccagcacactcaccccagggaagtcagagtaagcctgtttccaccgcagcacagcagtgagcacagctaggcagaattccagcagagtgcaaatcagcatcagagagagagttccagccagactggctttggctgtatagcagtccgtggtataaagtgaatcatgataaaagtaagaaacataacttcttgttggtatattatttttgtccaactcacactgcagtgaggcaggatttaaggtggcctgtttgacagacaggataatgaaacccaccagggcagacagagcactcagaatgcttccaaccaggctgctatgcaccaaaagcttggttaaccttttctctgtggcgattgatagagagccagagatgataaaaaaaaagggtcctatgaatgggtaagcagagttcaacagtgtagaagtcacttgggtaaaatttggagagaaggaagcagatgccaaa

SEQ ID NO: 472848 - DNA, 1000 bp, Homo Sapiens; identical to SEQ ID NO: 160077

SEQ ID NO: 472849 - DNA, 1000 bp, Homo Sapiens; identical to SEQ ID NO: 160078

SEQ ID NO: 472850 - DNA, 1000 bp, Homo Sapiens
aaaaaaaaccatgaatcatttattctttggttgtctacacagacacttaagtactgtatcgctgttatgcagcggcctgtggaggcccctgggggtggctgggcctgtgtcctgagccctcagccagatccagggggtgcggtgtctggtcatgtccactccaagagcagtagcaccatgtagaaggctgtgagcagggtcccctcggctgagtggcagatgtaggctcactgctctgcagccccgaggggctggccagctcagagtgcagaagagttcctctccatgggtctagtcacccatccgtctgacctggacgctgtcatagctcatccttgggcttcgattcactgcctgagagagactcttgtgcaggttcgggggggccctgctgggcatccaggggctgctcctgggagaggaccatctcttctgggctgaagagcatcttcaccaggtcatctgcctgcaccctgtcctgcaaggacaaacccctgcccattcagagaggcctccgctccagacactcgctatctctcagctgctacttcccaggggacaaggaaggttccttaatggccccaggctcatctccttcccagcaggtcctactctctggaaaaggacagctgaagtggggcccaaggagggaaccaagaactcagcatcgctccctgtcttgacctctttccccacctggatcccgttcacagcaggcccagggaggacaaggcaatgtgaccataatgacagggcgttggagctggtgtcccaagtgctcctttcgtgtctcagccactggcaatgggatttggggaagagaaaggcaaaccaagggcgctctgggaacgggtcaccacagcaccagctgctctcacccgctcgagctgctctcacccgctcgctgtgtcgagggtccagggtgaaccacagggcgatggcacagcgctgccccctggtgacagccttcactccatgtgggttttcagtgcctgaagag

SEQ ID NO: 472851 - DNA, 1000 bp, Homo Sapiens; identical to SEQ ID NO: 341946

SEQ ID NO: 472852 - DNA, 1000 bp, Homo Sapiens; identical to SEQ ID NO: 341947

SEQ ID NO: 472853 - DNA, 1000 bp, Homo Sapiens; identical to SEQ ID NO: 341949

SEQ ID NO: 472854 - DNA, 1000 bp, Homo Sapiens; identical to SEQ ID NO: 160080

SEQ ID NO: 472855 - DNA, 1000 bp, Homo Sapiens
ttttttttttttttttttttttttttttaagccttatatttttaataaaaaataaacagtctctgacaagcagttttctgaatcccaaaacaaaggaaaagggagggggagaggtgaaggggtcagctagggtaaaggagtgaagaaggctcagattacccctgccattctgccagggcagaagggatcagagtctgccccaactgaagcaagaagaaaggtggtcagacttcaggaaagacttcctgggagtcagcggtgcacgactggtaagggaagcaggagggagcagatccctgcatgaccctgggagaagggagtgttggtgtccaaagcggcagcttcagagtggagtttccaggagtggcatgttagcatatgattgtttagatgtttggtgttcattaccatagggtcctgggacaggcaggttttttagggtctcttgaaacactgtgtttctggagggtccctggaatggccagaactgaaggatcctctccaggttcttcaatatcagtgtaggagcaggtctgggggtagcccccaccctgttagagagctcatgtgcttggtagaagggagtcccataggggaggcagactgctgtgcatcaccctgctgagtgtcatcagtgatgcagagtagcagaagctcctctcaggggagaaaggtggtcttttgtgctgctgtcatcctagtcagggctgtgcttgggccgcccagccagcatggccaggtgcctgcaccgcagccccggcctgtgcctagagtttaagctacctcagtgcctaggcagttgttgtcagcgtccacatcactggcagaggtcctgcattccttgggagactggaggtgttgctctctgcttaacggggccttctccccagggcgcagggtctcacagccctgaaccttgccccgagcccggagtgctctcaatggggaggccacgaggatgatgagggctcctgaaagcactaaggcaaagaggacagtg

SEQ ID NO: 472856 - DNA, 1000 bp, Homo Sapiens
tctgatcagactctttttattgttttgttttttataaacaagtctcaggtggaaaaagaaagaaagggaggagctagctctctgccttctcagccaattgaaatcgtggaaaccaatgggcttcagctagccccactcatcactgctgggggggaaaagacatccctactccccttccccgtggcactcatgatattctcaatgccccaacaagggtcatcttggttcctctcggcgtttctgtcctggcctttggctctggctccggctctgactccgactccggctccggccagggccccgggagcccctagagctgctggagcccctggaagagttgctgccggccgtggaacatgtgctggtgccctggccccgggacaggaagcttggtctgctgtatgggagccaggcctcttcatctgggtggagcacccgctgggctgccaggggcacggcctggaccgctttcctctccccactgcgctcccgctccagggaggacatgctgcctgctgccctcagctctagggcccagctcgcctcttcctctggcggtggcaagggtggtgggggcaagtccccaggactgttctccctcctgtagggaagagccttgggtttcttccggaatcgagcacggggtccttgaagtgggggagtcatctccccattcccctgccaggttctgcctggggcactgctggctgtgctaggggcaggactggggctgaggtggggtgaggctgcagggccagcacccaagccagcaggcctcgcttcacggatgcccagcatgggctgggatacactgagaggggaactcggcccaaggggcaccctcctgggcatctgatggagatggggcatgtcagttgggggctggggagggtcaggaggtgagggtgtaagagtggctgtggactgctgtccataggaaggtgtgggagagggggtttcccttcgggatggggtgaccaggcaccctccactggagctg

SEQ ID NO: 472857 - DNA, 1000 bp, Homo Sapiens; identical to SEQ ID NO: 160081

SEQ ID NO: 472858 - DNA, 1000 bp, Homo Sapiens
ttttttttttttttttttttttttttttttttttttttttttttttttttttttttttggtttttttttttttttttttttttttcccgagcaacatctgcgtgtcggtctgcttttattacctcccagactgagcccccgacctggcccagcctggcccgtccccaatccagtgggctggccaggccacctgcaccagggaggacagctgctggcagggactaataaacccttccacctggccatggtggtggtgttctctatggaccgaggccctgaaacgcgggcagggaggggcagagaacgcactagcttgggggtgggcaccagcctcagacccctcagcagctttgggccctcggccgactttcccaggcagtgcaggctagcccagtccaggagtgtgcagcctggcttgggtcgagctctgtcacatctggataagcaactgggggctgagagtcccagggcagcctggcccagcaggtcaaggcgccacagggggccatcaggtccagctggcgcaggccggcaggggagggtctgctctgacctgggtgctgcatgggtccctccagctgccaccacctgcaccaggcagtcccgaggggtcacaggctagcccagcacactgtcattgaaggccaggcagacaacagccttctggtggccgccatactctctcttgatctctccagtctccacacaccagagccgggccaggttgtccgaggaagctggagggggagattgtgcagggctaagagcgcaggtgcaggccaagcaggcggccccagcagaggggaagctgcagccgaggtgggctggctctggaggccagcgccgggggccagggatgggggaggccagggcggggctcaccagtgacgatgtactgggagtcccccgagaaggcgcagccccacatccagccgcgggaggactccccggggttgccgctcttgatgctcagctccgtcatcagggagaagttggacgt

SEQ ID NO: 472859 - DNA, 1000 bp, Homo Sapiens; identical to SEQ ID NO: 341953

SEQ ID NO: 472860 - DNA, 1000 bp, Homo Sapiens; identical to SEQ ID NO: 341954

SEQ ID NO: 472861 - DNA, 1000 bp, Homo Sapiens; identical to SEQ ID NO: 341955

SEQ ID NO: 472862 - DNA, 1000 bp, Homo Sapiens; identical to SEQ ID NO: 341956

SEQ ID NO: 472863 - DNA, 1000 bp, Homo Sapiens; identical to SEQ ID NO: 160084

SEQ ID NO: 472864 - DNA, 1000 bp, Homo Sapiens; identical to SEQ ID NO: 341957

SEQ ID NO: 472865 - DNA, 1000 bp, Homo Sapiens
ttttttttttttttttttttttttttttttcgataagtatccatttattaacactggtaacattttcagggcacacagaacatgcattctttggtagcaaaattttaaaatcacagatatatttcttttatatattatgaatatatttctagtaaggaatatataactagtcttcagaaactgaagatggaaacatagctaagcctcaacttccggtcaagcagaaagtaatgaaaagtgccgaaaatgccacagtcacatgggccactgctccttaaatgccacaatcacgcgggccactgctcctttcattctctacagacaacctgagtctcacactgtcatagcaccaagaagaaaacagttactttcacttttcttatagcaacatagggatttgtgtacataaaacatgttggacaggttctccttcaatcatggtttgtatgtcaacagttggtttcataaaacagagaaaggtggaaagaagatagaagatggtctctttacaaaagaaaggtgaatacatttcgatgcaccaggttgtttaggctaagtcagtaactgtgtgtattatcagccctatgactgctaagtgtcaatatttagaatttcagtgtgggaaagaacctcagacaccatcagtccaaccgcttccattttacagctaaggaaaagggtccggaaacttaggtgaatatcagactgggatgagaacgcaggctttggagttaggctccttagtatatgaagttcatgtatccccatagacaaactcattttctggtaatatgaatacacttctggatgaaccaacagtttttcagtctaaggtatgtcagaaacgaattcaatttttatgcttaagtttcctctgcacagctttctccatttaggttgtgatgatgatgcagactgttaccccctctagacttttgcattcttacttttgaatttgggggttaatgtgtgagtagggctccacgaatcatcatttatc

SEQ ID NO: 472866 - DNA, 1000 bp, Homo Sapiens; identical to SEQ ID NO: 341958

SEQ ID NO: 472867 - DNA, 1000 bp, Homo Sapiens; identical to SEQ ID NO: 341959

SEQ ID NO: 472868 - DNA, 1000 bp, Homo Sapiens; identical to SEQ ID NO: 160085

SEQ ID NO: 472869 - DNA, 1000 bp, Homo Sapiens; identical to SEQ ID NO: 341960

SEQ ID NO: 472870 - DNA, 1000 bp, Homo Sapiens; identical to SEQ ID NO: 341961

SEQ ID NO: 472871 - DNA, 1000 bp, Homo Sapiens; identical to SEQ ID NO: 341962

SEQ ID NO: 472872 - DNA, 1000 bp, Homo Sapiens; identical to SEQ ID NO: 341964

SEQ ID NO: 472873 - DNA, 1000 bp, Homo Sapiens; identical to SEQ ID NO: 341965

SEQ ID NO: 472874 - DNA, 1000 bp, Homo Sapiens; identical to SEQ ID NO: 341967

SEQ ID NO: 472875 - DNA, 1000 bp, Homo Sapiens; identical to SEQ ID NO: 246552

SEQ ID NO: 472876 - DNA, 1000 bp, Homo Sapiens; identical to SEQ ID NO: 160086

SEQ ID NO: 472877 - DNA, 1000 bp, Homo Sapiens; identical to SEQ ID NO: 160087

SEQ ID NO: 472878 - DNA, 1000 bp, Homo Sapiens
atgcaaaaggagctgggagagagcatgaggatgtttgaggttccagagctggaaggctctgaaaagtaggattttgtacctaagaccctggttaaagtgcagtgatggtctggagagagacaggatgccccctctcccctccttagcacctggtcttgcccttccagtctctgctctcatgggcacagagtatagcctcagagcatagtccttcatgttccgggaggttacaggtgccacagttgactggggaaggggatgggggcaccctaaggctctgataccccagaagggactagtccttatgaagtgtcaccaaatacacagcagacacagaagaggtgggaggcggtaggtctaacaggaagggctcaataaccagaatagttcaggaaaagcccagatattaatctcagctctgctgacattctaaaaaggagctagcaccccagggtgccgttgaggattcttcctttctctagagactactctgctctgagctaacctccccattttctgcccttggcagcatctatttattgctacattgtcaaggaggaacaattgccccacaatgcttctccctgccaatctggttctcttggggaaacctcagagtgggggagaaaaaggaggacaaagaggagaaagttttttagggtctcccttcccataagaaggcaaggtagactcctctcagagcccttaaggccctaatcccagggtctgttccttagcccaccctttaccatccccccccaaaatatccctgatagggagtgagaaaagtaggaggtaaaagagccaataaggaaaggacatgtggaaagaaagatggaaggggaaggaagggaagagaaaaggagagagagaaggaccaagagttacaacttgtgaggtgttgtgtttggtttttacttttttttttctttaaacatagaaaaacagcctttggtttgaatctcaaggaagcagagagtgggatggctgtggccttggg

SEQ ID NO: 472879 - DNA, 1000 bp, Homo Sapiens; identical to SEQ ID NO: 341971

SEQ ID NO: 472880 - DNA, 1000 bp, Homo Sapiens
ttttttttttttttttttgctctggaaaccatgtgctttatttggaaccttaatccaagggaacctcccccctggctcgtagaaaagctgcaaaccacgtggtttggtccaaggcaatggctaagggagtgcgggacatcccttaccgctgggccccccgtcctctgggcctcagacttccctgctcatcaaaactgtcggctgagctccaggggtgtctgcccagttctcagcctctccctcagccaaggaatgaggaaacaggtacaggccaggggctggggtccccatccaaggctgggcgcctctgccccccacccggggcctgctgcctcccacagcgatggctcctcacgtcctcagagccctgttgctcccaggatgaggagccagggacaggaggatgcccgggagcacaggtgagtgaccggggcagggcggccccggccagctgcggcgcccctcagtacagatctgcaaagggcttggaatagttgaacatcaggtaatccatgtagtagaagtcgtaggtgcgctgcctttgcagggccgagagttgggcgaagtactggtgggcgatcctcgctgtggtccgcgcctcctgcgagtgccggtccttgaaccgggggaaggtcaggttccgcggcgcgcggatgaggctcaggaagaagttggcatcgtcctccatgctctcgaacttgcctacgaaatcgtagtcgatgaggcaggggctgcagagccggctgacatggtcccagtgaatgtccatccccacgggccggtgcacgtccagcaggtactggacgaactcgggaaaacgcaccccagagccggtccgcagggcctcccgagaggcattggcgcggtaccgggccaggatggccttgccgaagaccgggtgatagtagctgttggggtgctcaaacttgtcgcggaaggcggacaccagcctctcgaagggctcgcggacaaagagcatcttggtgtaggtgctgagacg

SEQ ID NO: 472881 - DNA, 1000 bp, Homo Sapiens; identical to SEQ ID NO: 341972

SEQ ID NO: 472882 - DNA, 1000 bp, Homo Sapiens; identical to SEQ ID NO: 341974

SEQ ID NO: 472883 - DNA, 1000 bp, Homo Sapiens; identical to SEQ ID NO: 341975

SEQ ID NO: 472884 - DNA, 1000 bp, Homo Sapiens; identical to SEQ ID NO: 341976

SEQ ID NO: 472885 - DNA, 1000 bp, Homo Sapiens; identical to SEQ ID NO: 341977

SEQ ID NO: 472886 - DNA, 1000 bp, Homo Sapiens
tttttttttttttttttttctttttttttttttttttttttttttttttgggaagtgctaacatgtatttattccacaaggtgggagatggggtgaggagatgatcaccagtaagacgtcaccaaatgagacactgcgaatcccacacagggcaagggggcagctacagggttcagctctgggcagggcttggccagggacagtgtggggaaaaagagatggggactgggagatgggacagcctcccatcgggggcaccccacagggcagggctgagacacatccttccggccagtgacatggggccaaacccacacccttctcatccctcgtccccatccaggtgagtaatgaagcagcaagcccaaggccacacagctaggtcagcatcgtcacacactccggaacgcacagccagacacacacacacacaccctgccacgcacagcacgcaggcacacacacacttgtgcatgcacacgcgttcatatattaactctgatttatatgtgcaccctaaccagagggcaatcgaaaaaaatactcttcagagaggaaacgactgccttctcctctgccagccagcagagcgtggggtgaaatgaggtgagccaaaagcatcttcaagggtcctggcagcctttgcttcagcccttaggttctggatggaggaccgctgcttctccccggtggcagcctctgggagtcagggctccctggtccttgacccagctccatcctgcggggcccttgtggctgagatcctactgcaggcttagcctatttctgtctctggcttcctctagacacaggcaggagagctggcccaagcacactgataagagcctagtgcccagggattaggagagaaagcatcagctccatcaggtcatctcaggaggggccagaaaagtccagagctgcagtgcccaaagctaccctggtgggaagggttaggggcagtagctgccttggggcgtgaacaggcaggtgtcatctg

SEQ ID NO: 472887 - DNA, 1000 bp, Homo Sapiens
ttttttttttctcaactctttttattaagttagaaaactgataaaagcaacacaacttttggggaaagcaccatggcacgtcctttgtgctatgtgataagtgtgctttatctcaatgaagcaaccccacgggtccaggcaccctccctgcagtccccgcggccaggctcctgctgggtctacagggtccaaggagccccatgcagccagtgccccatggcgggcgcgtcagtgggcaaaccctgcccaaaggtcccacccccaagaggcctccaggacccgcaccaaggcatgggggacactcgtggctgcttaagtaactggtatgtgcacagccccctccgcggccctaatcttgagccagccaagcagtgttcacactgcaggtgcctgggaagccccaagtttggacaccctgcccagtccctgtcagggcaccaacacccctccctctcaaatggtggcttgggagtgagcgagaggcattaggatggtcactgacaggcgccaacctctccatagcccaggtgtcagggaggtgctggtgagggaccccagtgactcaggaggtgacagcaatgaacaaatgttcagcagttctctcggggccattcttatcttggagctcagggagcaaatgggggccaaaacgcaagaggatggtgagggtcccgtcactgtcctccacactgagatggatgcggccctggtgggatctgcaggggacaccctggggtccctctgctgtctccagctcacagctgctcctggtcttggagggcagcgtggtctcctggggagaagcccccagtgctgttggcaggtgtgtgccatgggggtcactgctgcctctcagggtgggctctgaggaggggaggggaggggtgacccccagggcactcggagccttgagtctgctgcaggcccagctccactgagtggccacgagcaactgtgtccccaccgggccacagcactgagcaaggccctgagtaggtgg

SEQ ID NO: 472888 - DNA, 1000 bp, Homo Sapiens; identical to SEQ ID NO: 341978

SEQ ID NO: 472889 - DNA, 1000 bp, Homo Sapiens; identical to SEQ ID NO: 160088

SEQ ID NO: 472890 - DNA, 1000 bp, Homo Sapiens
tttttttttttttttttttttttttttttttttttgcctatgtagcattcttatttatttattttatgtttattttttaagacagtctccctttgtcacacaggctgcagtgcagtggccccatctcagctcactacaacctctgcctcccaggttcaagccattgtctgcctcagcctcccgaatagctgaaactacaggtgcacaccagcacgcccagttaatttttgtatttttagtagagacggggtttcaccatgttggccaggctggtctcgaactcctgacctcaagtgacctgcctgcctcggcctcccaaagtgttgggattacaggcgtgagccaccacgtccggtcactatgtagcattcttaaataaggccctatatttttaataatatttatttgtttaatatgaagaaagaaaaagtagaaaaggttttgcaatttagtcaggaattgttacacaagatacagactttatttccatggatttctgaagccagtgcttaaaaaaaaaactctaatcaaatttacccccactatataatatttaccattataccaaccaaacttatacaataattactcttgaaaaataagtagactgtaatatctaatcaattgcaaaatataatagattgcaaccaatttgttaacaacaagaaaaaaaaaactcccctaaagagcttgaaccttcataataatttacagaattctgtttaacttaatatacaagaaaatctgctgtggataaggcattgctttatgaaccctccatctttcctcagagaataaggcaccaatcactaacattataaatcacaaaagtgtaagaaaatctgaagacagcagatgccatatatgccacaaagaaaagcaggtacctttagggcactgactttaataaactgtgcaaatataagatgtatagcaactaaattttccttctctaataaagaggaatcattttaatagaagatcaacctgaaagaaaaag

SEQ ID NO: 472891 - DNA, 1000 bp, Homo Sapiens; identical to SEQ ID NO: 341980

SEQ ID NO: 472892 - DNA, 1000 bp, Homo Sapiens; identical to SEQ ID NO: 341981

SEQ ID NO: 472893 - DNA, 1000 bp, Homo Sapiens; identical to SEQ ID NO: 341982

SEQ ID NO: 472894 - DNA, 1000 bp, Homo Sapiens; identical to SEQ ID NO: 341983

SEQ ID NO: 472895 - DNA, 1000 bp, Homo Sapiens; identical to SEQ ID NO: 160089

SEQ ID NO: 472896 - DNA, 1000 bp, Homo Sapiens
ttttttttttttttttttttaggtctgctttttattggccacgcatccagccgccagcctcagggcacacacctggcagggggcaggctcgggtagcctgccctcgctgggtgggcagtgagggggcagcggctgctgggtgtcaccctgcagcccctcaggtggacctgtattgtccccagggcctgcccacgctgggcagctggcactgggaggggttttctgttgatgtgatggccaagtttcagctgcagggcagaggcctggcagtggcagcaaaggcagaccgccccccactccaacttcaggggctggacatgctggaacgggggccagaccccatgggaggggaccctggcctgccatggcactgcctgccagcttacccctgcctagggcccccaactcagccacctccaagcagtaaagacttgcaaagcattgcattttgattaaaccttgctgggctgaagggcaggcagagctgtggtggacactggcaggacgcagcaccccccgactggcccttggcaggctgcaccgggcgcatgcgggtgtgggccagggttgcctttaggaagcaggtgggaggctggcacgtgcaggcggtccaggagggcaccaggcctggcagggcactggtgcctgtcgggttcccagccacaacaccccaagaaggctccaggagggccccggctgggtaaggcacggagttttggtttccggggcccagtcccagcctggcccccagaagagcctctcttggcagaatggcagcatgtcctgtggcctgggctctctcacttggccttgggcctgggcctgaggccttactggatcacacacagtttctttgttttattatcatcagaatcagggggaacctcttcctggctcctggagggacgcttcttccttcgcttcccggtcccctttgaggcccggccccgggccctggggagtgtgcccgaccccgaggagtcggtcaccgcatcctcgg

SEQ ID NO: 472897 - DNA, 1000 bp, Homo Sapiens
gaagtccaacctggccatcgctttatatttctgcataagacaagcacagttgagatgctggcttctggcttcatacctgtgctaaagcaaggcttcttttttccttatgttacttttttgagacaaggtctcactctgtgacccaggatggagtgtggccacacaatcatagctcactgcaaccttgatttcccaagctcaagtaatcgtcctgcctcagcctcccgagtagctgggattacaggcgcacaccaccaggcctgactcttttttttttcctccggtagagatggggtctccccatgttgtccagactggtttcaaactcctgagctcaatgatcttcctgcctcggcctcccaaagtgctgggatttcaggtgtgagccaccatccccggaccttttcttttcaaaacatacataaaaatggaaatgaataggaccagccagtggctgtgatgcagccaaaacgccctgtctggaaagcatgcgtctaggtaatcttcctccgctttgccaggcggtctgaggtctgggctggaggcagcgggagggacagggtgcccagtttgtgatcttcttcactgccggcggccacagacacccttcttttggagatcttcagcctcatggctttggctatctccatcatccttttctcactgagcttcaagtccctctgtaacactgtcaggtcaatttggaagtcatgtatgtgcaaggcaagtatgatcacatatgcagtaatcttcgccttcatagaatccgaaattaagttccgtaatctgccattgttgtaggtcaagcaagtaaagtgcttcagcagtttggtgttgatgatgtggggaactccaggtcccagagcacttttccgcttaactaccctatgagctcgaaatttgatgagggtatccagaaaccatatgcatcgggcctggcggtctcggctctccacatctgatggcaaagacttcaacgcttctatgacaaaggtgcaat

SEQ ID NO: 472898 - DNA, 1000 bp, Homo Sapiens; identical to SEQ ID NO: 341984

SEQ ID NO: 472899 - DNA, 1000 bp, Homo Sapiens; identical to SEQ ID NO: 160090

SEQ ID NO: 472900 - DNA, 1000 bp, Homo Sapiens; identical to SEQ ID NO: 341985

SEQ ID NO: 472901 - DNA, 1000 bp, Homo Sapiens
tttttttttttttttttttatacccaacatccattgatctttatttgatttgacaaaatctgcatttttaaaagacaggtaacaaaatctgaggttatactgaatctgacaaattgagttctatagtatctagaatatcatataagaaatatcaactgagggaaaagagaagtaccacatgcagatgctcctggcaaggggggaactgtatctgcaggtgaggtccagagtgtgcagtgcataagaaaatcctacagaaaatgccgttaacttacttggatgaaatgtttttcctttgagggggaggaagaggtggtaaagaagggcaggaattcaaaggcatatgcagaatggcttctccatttcaaaatggtaataaaaatatttaaatcatggcactagggcacctttgaggaaaagaacatcttaaccagagtaggctcattgcataattctttagtaatatgtacaattttcaagtaattaagcagacttaaaggataattttgttttaacagcagctatctatttttcttctccccctctggggcttgatctgtttcagcatcacagggacacttttccacacattttctagggaaccaaccccttattcttgaaacaccttctataaaggaatcatcaagaattttgtctccatataaccagtatcgtaaacctcttgtggctaaaatgaattcccctttttgcagctgtattcgaggctcttcggtgcagggacttgtgaagaaggttttgattcctttattcagagggcagcaggcaccactataatcttctattactttatagcgaacacttctgactctcttatctgctttttgtttcaactgttctattgttaagctgtattggtgacagccttctcttactggccactcaagtccatctccttcagggacccctgaccacgtaaatacctgtttaaagttcctccatctacttcccatatcatatggaaaaacaaagacttcatcta

SEQ ID NO: 472902 - DNA, 1000 bp, Homo Sapiens; identical to SEQ ID NO: 341988

SEQ ID NO: 472903 - DNA, 1000 bp, Homo Sapiens
tttttttttttttttttttttttcacatccacataatttttattacaatatattgttataattgctctatttggctgtgagctgttgttagtctcttactgtgcctaacttataaactgaactttatcatatgtacgtacatacaggaaaaaacattagggtttggtactagcagcggtttcaggcattaactgggggtcttaaaacatatcccccaccatgggccaggtgtggtgactcacgcctgtaatcccagcactttgggaggccaaggcgggcaaatcaccaggtcaggagttcgagaccagcctggccaacatggtgaaactcccatctctactcaaaatacaaaaattagtcgggcatggtggcgcacacctgtagtcccagctactcaggaggctgaggcaggagaatagcttgaacctgggaggtggaggttgcagtgagccaaaattgtgccattgcactccagcctgggcgatagaatgaaacttcatctcaaaaaaaaacaaaacaaaacaaaacaaaaaaacacatcccccgaggatagcggggaaccactgaatttttactaaatgcctaagacatccttctttaatttgtgtaacatatcacccccttctctttctagtccctcctgaaagagtacttttctcagatcccttttcttgactactattaagaccctagaaagtagcgagcaagtgataccaggaatctgcatactcaaaggccacatcacctagtttccacctttactttgtccagggtagcccgctgtgctctcagttcagtttagatgctttcttatgtggacatatcctaacatctgtagataactctccaggcctgaggggctgtcaaaaattcgggattttcaaaattctggtgtttcttgaagcaaattagtccaataacatagattcatccatcatggttaattaattttttctggcctttatttctaatatctcgctggatttccactgatataaag

SEQ ID NO: 472904 - DNA, 549 bp, Homo Sapiens
tttttttgtatataaactatttattaacagacaaggcctacagacttatttcttcttggacacacccacggtgcggccacggcggccagtggtcttggtgtgctggcctcggacacgaaggccccagaagtgacgcagccctctatgggcccgaatcttcttcagtcgctccaggtcttcacggagcttgttgtccagaccattggctaggacctggctgtattttccatcctttacatccttctgtctgttcaagaaccagtctgggatcttgtactggcgtggattctgcataatggtgatcacacgttccacctcatcctcagtgagttctcccgccctcttggtgaggtcaatgtctgctttcctcaacaccacatgagcatatcttcggcccacacccttaatggcagtgatggcaaaggctattttccgccgcccatcgatgttggtgttgagtactcgcaaaatatgctggaacttttcagggatcactagagacatggctgcagcacaagcggcggcgtgtaggcctcctgtggaagagag

SEQ ID NO: 472905 - DNA, 1000 bp, Homo Sapiens; identical to SEQ ID NO: 341989

SEQ ID NO: 472906 - DNA, 1000 bp, Homo Sapiens
ttttttttttttttttttttttttttttttttttttttttaagtgtcatgtcatactaaatatttattttctgcagactgacttcggagtaattcttgagccaggaggggagaggttagtgttcaaattgctgagatcttaggtcaaaaagctacagaaaagaaatcactttgaaaaacacaatgactcagaggcagtcaccccttgccagcaattccaagagctgaggaggcttcatgcctcaggacatggtgactagttgagtgaaccagagattgaggcagtggtttttacaggggaagaaacaagccttgggtgtatgggagcaggaaaggagggtgacagactggagaaatgataaaggccattttggaagcccacagggaagtggtcttgggaaacctgaagacactgggatattcagaaggccaaggggatccagcttatcctgttgggcaaggtgctgggagtgaaggcaggtaagccatgtcaagggcctgggaagcaaggggaaaactggaaggggtaccccaggtgaagaagggtatggaatggggtgcagaagtccatggagatgaccggcagatctcagggcggtttctggcacatcagaagttgggcttatgcttcttgagctccaccataaggtggtgaatgttgatgagctcagcccgggcagggagggctcggagctgcggctgggacagcacccggtggaagcgatgatagagctggatcagctgggtcagcgctccctgaatgatactggtgccatttctgaagttggtgaaactccgcattacatcctgactcagagattccactgatgatttccaggaactaccaaagccacggatcagctgagttacccgggcttcttcccctcgaagtcgctcagcctgtccacgctcaatcaaagcctcagcctccttcacaaatgccactaaacccccaaaagggggagacagcaactcttcaatgaattcctgtgtccgagcat

SEQ ID NO: 472907 - DNA, 1000 bp, Homo Sapiens; identical to SEQ ID NO: 160091

SEQ ID NO: 472908 - DNA, 1000 bp, Homo Sapiens
ttttttttttttttttttagcactaaaagtatcttgagaggcttagttcttgtctccagtgctatctcactttctgcagttcctgtctcagccacgatggcagaggctgtcccagtctgtgtagcagtttggatagttccacattatgatctcggtagtaattagagaggaacgttctagactctggatccataggtggatattttcggcctttgctttttccaaggcattttgtctttcctccttccagtaattgacaccaaaaacccttttggggatcaaacgttagtgcttcagagtaattataacgaggtgtaactcccagaaacttctggacttcatccatcacagtagctgggtcagatctcagctgctgtccatcaataattagcaactgagaagtagcaaagtaagttagccatctttctatgtggactgcataccatccaggtactaggcatcttctctgcaaagtttttaagtcagatggagcccaatgtcctgttgaaataacttcatagaaattgaacctcagagcagctggatcttcatgtgatcgttggtgctggtaccaagagtatgccctgtctgaggggtcaatgaggatggtgatgatcttggctttggggacaagagatgcggctcgtcttggagcttcttccgaatggaagtaattagcactcttttcaaacagaaagtcacttgtagtattggatggtgtagggaaaaagtccatataccagtctattcctttgtgatagttgttgccattaaagaactgaacttcctcaaatgtctttggactagggagattgctgatgattgaaggatgcataagaagaaataaataaagtgcagttgttcctgttttttgtggaccaattactagaaattttggtaagtggtcacaagttttctctctggaccagatgtctttgtgtcgtttatcatcacatggattctgccatagagggtctttctgctcagggaagagctcaaa

SEQ ID NO: 472909 - DNA, 1000 bp, Homo Sapiens; identical to SEQ ID NO: 341991

SEQ ID NO: 472910 - DNA, 1000 bp, Homo Sapiens
tcatctttttttcttaaaaaaaaaaaaaaaaaccaaaaaacaaaaacctctgtggaccttccattgtcacacccactatcctcacagcaggaaggggtgtttagagtctagtttttaacaatatttttgcctctcctaatgttttcttcagtcgtttaaaattaaaaaaaaaataaaaagaaaaaccccctcccccagtctgtaaagtgcctcgtggtgggtgagttaaggtgcatcgtgtgtttgtaacaagtgctggggaccccgcccctgcctcttcctgtgctctctgcggggagcctgcaggctgggaccctcggtccacgccgctgtggctgccctggcctacagcccaggggctgggggtccgggctggtcagtagtcatccacgctctcgatctcaccagaagatccgtgcagggagtaccccaggatgctggggtctgagtgcagcatcagtgcccgcctcttggccttgctgccctccccggggccgagtttggtgctgtggttggcctggaaggccgtctgcagcgaggcgctgctcagccatgcctcctgctgctgctgccgctgctggctggctttctgcttggccctccgctccaggaattgtttggcaaattctttggcttccagcgtgtcccccaggcaggaacggatataatcgtggacatcatagggggattccacctccttgaggatcgctacagccatgggcacgtccaggctgcccgtggcgctcagcgtgtgcagcatctgctcgcaccactgggtgaagccgtcctggggcctgggaatgccctgcagcagcttcagcagcttctcttcttcctccgtctttttgcgaatgggccgacccgataggtggctgtatgagtcactgagagatgggctgctccggctgttcttcaggccgaggccacggaccaggctcccgccgctcttgggggtgtcctcccagagccccaggccgctgctgccgcccccactcttgtc

SEQ ID NO: 472911 - DNA, 1000 bp, Homo Sapiens
tgaaatgatacaacttaattttattaggacaaggctggtgggcactggagtggcaccttcagggccaggagaggcactggggaggggtcacaggatgctactcgggcacctagaagccacagctgccctccacagagcggcactgcaccatgcgcaggaatgtctcgaccttgtccatgtccttcctgaagcagtagagcagcccgtagttcttgagcagtgcgtcatggttgtgcgagtttgtgtcaaacttgctgtaggtctgcttgaggatctgcccagtccggcggctgccgtcttccagcctctgcaaagtgaaggaagagaaggagaggccaagcgcttgggcactgttccctccctctctcatttatccattttcctccctccccttcagggtgtagagaaaggcctggaggattcaccaggcgaaatgaagaataaggtgagttctcttgggtcagcgccttactgctaaaaagagggcagcagtatttctctcccccagccctcgaagccagtggggttccaggattggtgacccctggcgccaccctcacccccatcagcgtttggatgccttcctctaggtcctttaggaggtgatagtcatcgctgtccgaggtgtcatacaccaggttgttggcgaacatactcctgaggaaccgcacgggctccagccacgactcgatgagcagcagggagatgcggagcagctctagattggatttctgttgcgtttcctccatgttggagggtgtcggaatagagtctgagaagcagaaggaggtctgggagtcatgcaggaatgaatacttctggtcctttgggatataggtttcttcaaactcctggtaggtgtcaatggccagctggtgcgcgcgatgggcttggagcatagcgtggtcaaaaagcctggataacggaacggtttggacggcaccagcctcttgaagccagggcaggcagagcagggcaaaagccaggagcagggacgtcc

SEQ ID NO: 472912 - DNA, 1000 bp, Homo Sapiens; identical to SEQ ID NO: 341994

SEQ ID NO: 472913 - DNA, 1000 bp, Homo Sapiens; identical to SEQ ID NO: 341996

SEQ ID NO: 472914 - DNA, 1000 bp, Homo Sapiens; identical to SEQ ID NO: 338982

SEQ ID NO: 472915 - DNA, 1000 bp, Homo Sapiens; identical to SEQ ID NO: 341999

SEQ ID NO: 472916 - DNA, 1000 bp, Homo Sapiens; identical to SEQ ID NO: 342000

SEQ ID NO: 472917 - DNA, 1000 bp, Homo Sapiens
ttttttttttttttttttttttttttatttttcccacagcagaagtatatttattgtgctgaaatcaggtagcagggaatgaatagctcttgggaaccagtacagaatgttcacaaagatttacaaatctcagtcattacacactgagcaacaaaacaaaggtgttgaatcctcttagatcaaactactttatatgttgcaaattttctgtaattctcatgactgcatgcctttggggaaaaagtatttaattttaatgcacaataaatatgttatagcttacaaaatattctgaaatagtttgtacaaacagcatacatcctacacatgcagctttgacatgttgttgagatacttaagaaatattcatgcttttttttggtcacattttgtctttctctagtaatccctttgcaacatcccttaaaaaattaacctatgtagtaaaacatgatacaaattctttcctactttatttccagttgttcacttatattacatgaaatacttcatttgtaaatagcaaattgaatgttatagttctgactactctcacttttattcattttgtgttttaacaacaccttgtaacatcaagcattgaatttaacaatctttagcaccaaggagtcaagaatattgcaccaaaatgggtttatacttcatacctagttaataaataagatcttgcaacttagtcacaaggaaaacgttactccaaaattaaacacattgaaagagaaggatagtttcacagaaatgtttggtgtatgctatttgtcataaaagcaaaaaaaatactagtggatttgaaagttaacattaaaatttacattagaagactccttgattttttaattaaaatttatttaattttaaatgttctttccaacggaagaggtaggtatatttccacatatgaaaaatcaggaacagccataaatcaaaacaaggaaagcctgataaaaatcaacatattctaacagcacataaatgtaac

SEQ ID NO: 472918 - DNA, 1000 bp, Homo Sapiens
ttttttttttttgaatggctgatgtctttattctgagggtgagaggctggcaccctgtggacccttgactggccagatcccctcctggggcctccctgcaggctggaccctgcctttgtaacagctgagcagcaccccagcatggccccttccttggttgatgccctctctgctgggctgagggccaggctggccacagaggggccaactctgcccagtgttctccaccccatgcccccagctggtgcagttcccagacctctctctgcctctcctcaagtttaagtatcaaatcgaacattcttttttaaagtaagctctgccctgactcccccagccatgcagagaggcttgcagagctgcctaggcctagtttggccctttccctggcacccaggccctgtgttcagacccctggctctcatcacagaaacaccctttgttgagcagttgtttattctggccctcacagccttggctagtccacaaaggccctggggatgggcaacaggctacaggaacccacctgtcttcctggtcagggcccctggcccctagcagcaggccaatcctggtggggcacagggttctgtgccctttggctgcctacctctgaatatcctggccagcaagccatgccttccccgcccctggggccctgggagcccttcagctcctgtccccataatgggtcctgggcctaggatgaggggaaggtcccagtttcttgtagggtgttatctgggggtcctggtgtgggttgagctggagggctgtggggccccaagacccctgtgccattggggtgctccaccctctcaaacaggatgagcatctcacagtgcggggtctgcgggaacaggtccactgccacagccttgaccggccggaagggaatgcccttcacccggttagatggggctctgcagaggtccacaaagttgcccatggctgcccgggggttgcatgagacgtacagcagccgcctgaggttcttagc

SEQ ID NO: 472919 - DNA, 1000 bp, Homo Sapiens
tttttttttttttttttttttacgagtggaaatatctatatttaattgccttaaaaatgtggggtggaaaaacacaattatacattgtgataacaaacctgtacagttaatttctgaataatacaaaacaagtgctgaaatttttttcttgatgattgagataattgtccccgaattatgacatcagctacccaaatatcatgttgccccatctgcaaatacttgaagaggaatagttaccaattgaatgcatttagattcatccttaataaaaagaaaattgcatagctttttatattgttgcaaattcatctcccaatatcattgtcagcttagtgatattctccatattttaaaatttcaatttttaaaagatacataatatataattcctaataattataaacacatcattttactcatctggttttaataacatgcattttataattactgtacaaccaaaatagacattgaattatgctgtgtgcatgtctttattcaacagtatattcttagacaccttgttcaaacaaattaaataagtttaaaagaaaattaaaaagaaaaaaatctttccagtagaaacagaatcacagtgcttcacagacaaaaggaaaggaaaagaagttctcatacgaaaagagatttattattacatagaaaattctcacaatagttgaaacacacttcagaaactagtaaacaccttagatagagttgtgccaattactcagcccacaagcatctgctttgtcttaattagacaggggaggtgaatgaccactgtttattttcattttcctcattaattatgaaaaactgcatttaattcatcttgcattgtgagagattggctgcgcagatgtaagtcgtaagggaagtggctgtcggtgggcaacctgaacatggcaccctgcccaaggggacccctgggtggcactgcacagtaatgcatgccgtaattgtaatttttaccatagtccaaggtttcttcttg

SEQ ID NO: 472920 - DNA, 1000 bp, Homo Sapiens; identical to SEQ ID NO: 160092

SEQ ID NO: 472921 - DNA, 1000 bp, Homo Sapiens
ttttttttttttttttttttttttttttttttttttttttttttccctgcaatatttattaaggaatttacacatacacaggagaaaggcagccaggaactgtggttcccacacatgaaatcttttaagcaaagttttcttgtctgaattttcaagtggggtgaacaatgactgagaggaaagctgtcccggccctctgcctcgtacacctgggaacggtggggaaacagagcaccctggatacacaggcatgaaagagtgatcagcagaccgggagaagggaagggagaaagggagttatcaatgacatggcgttttttaaaccataagaaaaacacaacagttttaggctgctgataaattaattcctctctgttgtaaacctaaaactaaacaaaaacaaaaatacccagagcagatggggagagggtgggaggcggaacacacactcatacacacacacacactcacgcacacacacaagcagtacacgttaagctctgcattcccactataggggttggtcctccagccacggagccagatcctactgaaggcaggggggaggcgggaagggatgtgtgtctgtgtgtgggatcttcataaagtctttggtgctaataaaagctgactgaagcagcaagtcctgaagccccagatccagaaagcaactcagggcgaagagagtagtatttttgctcatcctcataggagggggcttgcctcaccccagggctagggtcaaactgacccaggacccagggagtatttaatttgatttcagtacttgcttcattcccataaatcatgagaacatgatgcttttcaaatttaaacacttagaaacagcttattaacacatatagaaggacctctaagctttcccctgtttgcctaatatacaacacccacagacccttctgagagtctgacaggagctttaaccttgagggaagggactcaaaggtgtgcacacttctcccacagtttaagtgccttc

SEQ ID NO: 472922 - DNA, 1000 bp, Homo Sapiens
ttttttttttttttttttccattcttcaaaaatttattatttattattaaaaatctcaaacaaacacagacatatggggataccagcattcccctcctggataccaggcagcttcagccctggcaggcacgatagaagaaaatacttgttacacatcctcatcaactctcagagggatcctgagccgtagatggaggaaacgcagacggagtaagcacaggtaaaagatctccccaggagctgacacgggcacaacgatacaaatccctgccgtgccggcgggctgtgagcacagcatgctgcatgtgcccatctggacagcacaagtgacaatgcacatggcgaggccgtttaaggacaggctgagtgatacggggccagcgatgagcctcctctggagacccccgagcaaggatcaccatagagaacttttcttcctttggtttcttgttccagctgaaggggatgggatggtacgcctgtgagaagctacaggccaggttggtcaactggggacaagggagttcatggggacacggggcaaagacaaaaccaggtcgagggtccaaaggtgacttctcttttcccttaaggaccagatccctggcatccatgagaaggctgtgcccagcttttgttccattctccaccagtaccaggaaatgacctgtcttacgccataaggtttgaactacctcagtgcggtcagccttgctgggcagttcacttaaggaaaaagctgacactactacatcaaactgcaccttgggtgatacaggtagaaactgtctgaaaaagacacctggaatataaggctccccagattctgaaccacctttcagtagtttttctgccaaaaccaacatggcagctgatctgtccacacacatatattcacgtaggctctggccccaaatactgtgagcagcccaggtgacagaaccagtacctgagccaaagtccatcaaagtttgtggctgaaatgctggatttcgagccc

SEQ ID NO: 472923 - DNA, 1000 bp, Homo Sapiens; identical to SEQ ID NO: 160093

SEQ ID NO: 472924 - DNA, 1000 bp, Homo Sapiens; identical to SEQ ID NO: 160095

SEQ ID NO: 472925 - DNA, 1000 bp, Homo Sapiens
ccaagggaagcgggattcccttacttccaaaatgaactcttcaaagtaatttacgccatagagttagaatcactgttcatactaccgcccctcaaccccacttcattctgttaggtaaaagcaggattttctaagcttattaataatctttagagcaaaattcttcctttttcataactgtagctgattaaaattatgagcagttaacgctttaggatggttttgttaatggaaacttacactgtagttaaaatacaatataaattaggtgcacttgtcagagactttggtttataggaatagtccatatattaaagataagctgacccagcaaaataacgaaaatcccatcccatccacatgctctgagaagctataaaaatgcagtattttaagattaaaagtaaatccaaaatacctaatcatattgactcaagataaaaacattaggtttttttttttttaaaagagtctcttaaaaacagggagcccctgaacacatcttattgtcacaaataaatgactaagtttagactaaatggttgcattaggaatttgacaaccaaaattatatcgctgtattccaggaaatccgttcttgaaaaatgtaaaaaagacccacttagactaggttgaaacatataatgcaaaatataatgctctgctatagaaaaacacaaacatgtaaatggcttaatttcttaaagatgattcttttagccaattgtttacaaaggtagaataattcaaaataattttatttttttttacaaagagcaagtacaggagctgttcaagatcatgtattcaatcaaaatgaaatgtgacttgtaccgactgctgaagttgtcttgatgtttgagagacttgaaatctgtgaagaaatttgaatagattaccttttataaaaatagtagtagtctttaagtgtagaatactgcctaactctggaaatgtaggaaaagtcagcattctttaggttcaagatattaagtttaaa

SEQ ID NO: 472926 - DNA, 1000 bp, Homo Sapiens
ttttttttttttaaaataaaaaccatagatttcccaccctctttaatcccttccttttaaaaatgttctcttctctgctctacgtcctcccacttcccggttcaagtttcactggtgtcccgacccgtccccctgccctctgccccccccccccccgcccctgccccgtttgcattgtttgtgtgcggcatcttcagtataaaaggccagcgcccacggtcccaggagcgcctccctccttctctccctcctccctcgggccattctctccctccctccctccctccctcccctccagtgtttatatgtaagggtactggttgaccttggcggggctcagtgggtatccagtgtagacggtggaggctggcgaggcgctgatgtaggtctggtgggcaaattgggctggatactgactcgggtggatggtgggcgagggcaggacccgggggcccatgctcacggggacctggtggacgatgctggctgggtaggcagtgtgctgcacggtgtggcgcgcagagccttgcgaggccaccaggtgggccacggtgccggtggagcccagggccgccggcgcagtgtaggtgtagaggtggggctgggtggggaggtgggcagcggcagcggctgcagccagatgcgggtgcacagtgccgtggctggggctgttgtgcgggaaggagtacggagcctgggccatggtgggagtgatgtaggcctgctgccttcggtggctcccagtgcggtccgtggtgatgtgctgctgagcctggctgagattgagtggctgctgctgctggaagtgggggcccggccgctgctgccggtaggtgatggctccagatgagctccctgaagagtgaccgctggtggaggtcacgttgctggaggacttggacttgtaggaggacgagtggtgactggtgttgactggcaccaggctatcacactccaccaatacttcgctggcctgggttttcaggggtggcacgatgat

SEQ ID NO: 472927 - DNA, 1000 bp, Homo Sapiens; identical to SEQ ID NO: 342005

SEQ ID NO: 472928 - DNA, 1000 bp, Homo Sapiens; identical to SEQ ID NO: 160097

SEQ ID NO: 472929 - DNA, 1000 bp, Homo Sapiens
ttttttttttttttttttttttttttttttttttttttttttttttttttttttttttttttttttttttttttttttttttttttttttttttttttttttttttttttttttttttttaatcttctccttacaaaagaattttatttatactgcactgattcattccttcaaacacatagcttctaacaggtggagttagaaaagcgggtgccacaaactatggtttaatagtatgcaggccctgtacctgtttatctaactatacctgaaatttgctgataccccaagccagctacttacactaaaggcatctctggggggcatcatctagatgaagtctttaacctgatgggaatatctggttattctacagtttaaacaggatgtttggcttatgcttttgttcagctgactggtgcatgggaaggattaaagcccatatctaactacagcaggtcttcaagcttattatcctgtcatgagttcataaagatgacaaactcatcatttgggagctataaggtcaaagtggccagaatgcaactgcgctgttacactgtgcaaaatcaagtcaactgtcttgtaggtccttggctgtctcttgttataacctcgaacacttaaaaaaggaaacctcaagtatgctgagataattatcagaatgttcaggtacctttgttcctgaatatcaagtaatagggctcatctctgtgactgcttgcgacaagcacatagggcaactcattaccaactgctcattataaatgctgagctcttgagttcctgaggagggggtgggctctagactatcgagggctgagtcaactaggtgaagggccaacctgtacagttctaagtcttattttggttctgggcacatttcagttctgctccaagtccgctttgctccaattcagcgatgacagacatatatttgaactcatttggtctgaggttaaaggtctccactaacccgtaggtctctttccgatcagta

SEQ ID NO: 472930 - DNA, 1000 bp, Homo Sapiens; identical to SEQ ID NO: 342006

SEQ ID NO: 472931 - DNA, 1000 bp, Homo Sapiens; identical to SEQ ID NO: 342007

SEQ ID NO: 472932 - DNA, 1000 bp, Homo Sapiens; identical to SEQ ID NO: 342008

SEQ ID NO: 472933 - DNA, 1000 bp, Homo Sapiens; identical to SEQ ID NO: 160098

SEQ ID NO: 472934 - DNA, 1000 bp, Homo Sapiens; identical to SEQ ID NO: 160099

SEQ ID NO: 472935 - DNA, 1000 bp, Homo Sapiens; identical to SEQ ID NO: 160100

SEQ ID NO: 472936 - DNA, 1000 bp, Homo Sapiens; identical to SEQ ID NO: 342011

SEQ ID NO: 472937 - DNA, 1000 bp, Homo Sapiens; identical to SEQ ID NO: 160101

SEQ ID NO: 472938 - DNA, 1000 bp, Homo Sapiens; identical to SEQ ID NO: 342013

SEQ ID NO: 472939 - DNA, 1000 bp, Homo Sapiens; identical to SEQ ID NO: 342014

SEQ ID NO: 472940 - DNA, 1000 bp, Homo Sapiens; identical to SEQ ID NO: 160102

SEQ ID NO: 472941 - DNA, 1000 bp, Homo Sapiens
ttttttttttttttttttttttttttcacaatgtcagatcatttatttcagagcagttacacccagcagaggggcacaggcttaaacgccggcatattagttttcccgcacgcgagccctgcatggcggtgggctggggagccggggcggtgcgattctgccacacgccacgctctactaggcccccttactcctaattaattgcctgctcaccagactgtgagaaaataattgccactataaattttccctcctctgcataaaatattcgggggaaccagcacttaaaaaacagacttcatgaaagaagggcagcaaggcgtggatgctgcgccccccacaacccccactgcagaggacacagagaggccaggagccccttcctggttccccctggttccaaatgagacagaaaggctcaaagagctcccgggaatggtcacagctgaaaaaaagtcgagtgagtggctacatgcggcagccgcttgtgttcacctgccgtccacccaggacagtccccggcagcagcttgtgttcacctgccctccacccaggacagtccccgggctggctccaggctgcagggggtcagcagagggagcctcctgccccatatccttggcaaactcacttctccttctgggaccacacaagagacatgggagaatgttcctaattaggcaagagcacagaacccctaatcccagtctctgcttggcatgagtacccaggcaggcaaggaagatggagacaggtggatttcagctcctggaaggagccccggctcagagtggctgctgagtacccagccttgccctcctctgacgtgggaacgggtgtggctgtgctgccacctggtggcctcttccctcactgcagggtgaaatgatgtggatgccagcccttaggtgtgggctccagctggggtcacagagcatcccagccctcagcactgcccgacatagagggaacccctaccactggccctatgtggcctggg

SEQ ID NO: 472942 - DNA, 1000 bp, Homo Sapiens; identical to SEQ ID NO: 342016

SEQ ID NO: 472943 - DNA, 1000 bp, Homo Sapiens; identical to SEQ ID NO: 342017

SEQ ID NO: 472944 - DNA, 1000 bp, Homo Sapiens
gaaggaaatctgtctttaatgagcaaatgtaaggctgcgttttctttgcgaagtctccacaggattttcacggcaaaaccaatgagaaaatgtcctttcaaagagaagaccgagtgtcccgagaacattttcttgaaagcgcgtgcacgggccgccctctcgaggcatcgtaatgtgcttcaaagaacacttggtaaaaccctctggctaaaaaatcaaaatttccaaagcatatacatttgaaaaaaacaaaatctccacttaaaagcttattttgacttgttgcccgggatcaattgcaaaagcgcttctgttgagaaaggacagttcagccaaactcaagctggtttttagaaacagaactggaggaagaaaaacccagaaaacataaggcactgggcaaatgtgacgtaggctgggatgaaacccattctcccagagccggtctctcccacagcacaaagctgctcctcatgcagccagctggctgagggcccggagtgtgtccacagagggaggagcggggctggggaggggaagaggggaggctggctccccgaaatgtgacctgaggactgatctgagctgcagtgagcactttttacccaggggctgagcttcctgggctcctgcgacatggatggagctctccctgccgtgctgccagctcaggagcctgaagcccaagggcgcgcttctgtacccagcatccagtccctgccagggccttttgagagccggatcctttgttcatcttctcctgttcagcccacccctggcaaactcgagatcaccttcacatcaccctcccctgcttagccactcactcagtccctggcccctctgctctgtccctccagagaaacagaaaccgactcaaggcccgagcctgcacgattgggaggctgcagtctctgcgcgctgtgagatgaaccgcagggcggcttccccactcacaggagggcctgggcgttcactgagcggtgacttctgagaagaa

SEQ ID NO: 472945 - DNA, 1000 bp, Homo Sapiens; identical to SEQ ID NO: 160105

SEQ ID NO: 472946 - DNA, 1000 bp, Homo Sapiens
tttttttttttttttttctgcccaagtaactttattcgtgtcttctcaaacatttcagatcaaataatgccattttctaatcttgaaaccagcaagattagaaagagaatgaggccatcctttcactcagactttcccagttactcaagattgtattcaggaacgaagtcaaactcggcctcacttcttaattagaataaactagaatcaggtccattgcataactgctaattgttttgcaccagggagccacaaaggaagctaaaactagcctttctaagttatcctaagtttttactatctaaccagcacttctgattttttttcccttaaaactctaaagtacaggtgttgtatgtctgccgcatctgaaaggctgccccggaaatcagagcctatctagcgggaatgtctgggcagtcacccccatcctgcgcgcagatagcaaagggctgctggcaggtgtcagacacacggtaccgcaacagcagtcccgaggtctgagattctgaatgtcagcaggtggctggagagtatcaccagagccactcaggaaccagccatgcggaatggctgggtttcttattgaacatgaaatgcttcctctttggcctggactgttttgctaaaattgttagtgggttttggggcaggccagtgtatgggaaacttttttttttgttggggggggcgatggagtctccctctgtttgcccaggctggagtgcagtggcgcaatcttggctcaccgcaacctccacctcttgggttcaagcgattctcctgcctcagcatccctagtagctgagattacaggcgtgcgccaacaagactggctaagttgtgtatttttagtagagacgaggtttcaccatgttgggcaggctgatctcaaactcctgaccttaggtgatccacccgcctcggcctcccaaagtgctgggattacaggcgtgagccaccgcgcccagccgggaaacatttaccagggacaataaag

SEQ ID NO: 472947 - DNA, 1000 bp, Homo Sapiens; identical to SEQ ID NO: 160106

SEQ ID NO: 472948 - DNA, 1000 bp, Homo Sapiens; identical to SEQ ID NO: 342020

SEQ ID NO: 472949 - DNA, 1000 bp, Homo Sapiens; identical to SEQ ID NO: 342021

SEQ ID NO: 472950 - DNA, 1000 bp, Homo Sapiens; identical to SEQ ID NO: 342022

SEQ ID NO: 472951 - DNA, 1000 bp, Homo Sapiens; identical to SEQ ID NO: 160107

SEQ ID NO: 472952 - DNA, 1000 bp, Homo Sapiens; identical to SEQ ID NO: 160108

SEQ ID NO: 472953 - DNA, 1000 bp, Homo Sapiens
cgagtaagctggtaagtggtataataggaatagtagaagaatatgccatagctatggctcaagaataggaataagaaaaatgtgcagtagacgctgtttgtccgacgatgatgaaagtgtgcacggccggctgtcctccgattgaggggccttgtcaaggcctcagaggcagcgaggtcacagcctggtggagggtctgggtgtgcgctgtgtccatctgcacctcacagacaccagtcatggggggatgaaaccgggccaagaacacatgtgtgcacaggctgtgtgtgcctgcatgtgtgggatgcgtgtaggctgtggcgggggtggagatgagggataggacagaaaatggcccatccaaccccacatcctggccgggcgtgtccaggtccctgtggggcgagggtttggctgccccagacgtgacagggacttggctctgagggtcaggacctggctgggaacacaccattgaagagggaacagaaaccaggccctgggacgctagagaccccaagagctacctggctgggtctatggtcagggctgtagtggaggaaggtgtcaggattgccattgtctcaactcctgtgggcggcacagccccaggctgggcctctgggaggagggtgggatggatgggagatcagagcccctggcgcctgggacaagggttggcctggatgtggggccccaggtgggcagggcctgggagccgccacagtatgtgacaacagaccccaccctggacccccgtgctgggggctgggtcccaccgctctcctctccacgtctctcttggcgatgcccagcttgggctgggcgcagggaagggcaaacgttgctgagccgccgaggggctgggtcttcgcctttatttctggtgcacgtctagaggggcccgggcagaggccacccacggtccctgaagtagggcctcagctcctccaggctgagcggagggaagtaggctccgatcctcttccgcacccaccac

SEQ ID NO: 472954 - DNA, 1000 bp, Homo Sapiens; identical to SEQ ID NO: 160109

SEQ ID NO: 472955 - DNA, 1000 bp, Homo Sapiens; identical to SEQ ID NO: 246553

SEQ ID NO: 472956 - DNA, 1000 bp, Homo Sapiens; identical to SEQ ID NO: 342025

SEQ ID NO: 472957 - DNA, 1000 bp, Homo Sapiens
ttttttttttttttttttttttttttgtctgttaagatactttattttataatcaaaatacgcaatacaaacaaatggacataacaaagattcatataaataactggttataaactttatgaggaaaaatacccgtcagcatggtggctgggctcccaatgcacagggtggagaccaaccaggcggctctgcctttaagcagcaggagcccagaggctgaagggctggctgggtggggctgctctgaatggaagggataagtcactccataaataaaacacaaacttgtaaaaacacttaagaaagagcctcattcaggcccaggcatgaggtccaagatgctgccaacagcccaaagcttagcaaaaatcttgtagtggctgactggcccacacgtggcccctgcctggcctggctccagatctagaggaggcacggctggcccaacaaccagatactaacaagtgtgagatgctccctaaaccaggaggcaagaaaaaccagagggcaaaggtccctcactaaagccccagagaaacaacccaggaaacactaaaagctgtactttaaagctgacttgtactgggtactctgaactttcaaggaggccagagcaggaaagggaaaggaataacccccaccacccccaacacaagagaggcacaaattagagggctgggcacaggctgtagccctgggtgagggggtaagcagcttgacagttgctctgtggtctctgggatataattctgcccaaggctagaaccacagagaagagtttgcactcttaagtccaggaaggggactacctggaaggcctgagaacaaaggagaaagtttagcacactaaacacatggccaggaccctagggacacaaggcagctggagagtgggatctcttgttaaatggcatggtaggcagattagagtcctggctataatccctagggccccaatcctagtagttacgtgctaaccaacacattaccctgaggcttc

SEQ ID NO: 472958 - DNA, 1000 bp, Homo Sapiens; identical to SEQ ID NO: 342026

SEQ ID NO: 472959 - DNA, 1000 bp, Homo Sapiens; identical to SEQ ID NO: 342027

SEQ ID NO: 472960 - DNA, 1000 bp, Homo Sapiens; identical to SEQ ID NO: 342028

SEQ ID NO: 472961 - DNA, 1000 bp, Homo Sapiens; identical to SEQ ID NO: 342029

SEQ ID NO: 472962 - DNA, 1000 bp, Homo Sapiens; identical to SEQ ID NO: 342030

SEQ ID NO: 472963 - DNA, 1000 bp, Homo Sapiens; identical to SEQ ID NO: 342031

SEQ ID NO: 472964 - DNA, 1000 bp, Homo Sapiens; identical to SEQ ID NO: 342032

SEQ ID NO: 472965 - DNA, 1000 bp, Homo Sapiens
ttttttttttttttttttttgagatggagtctcgctctgtcacccaggctggagtgcaatggcacgatcttggcttactgcaacctctgcctcccaggttcaagcgattctcctgcctcagcctcccaagtagctgggactacaggagcccaccaccatgctcagctaattttttgtattcttagtagagatggggtttcaccatattggccaggctggtcttgaactcttgacctcacgtgatccacccacttaggcctcccaaagtgctgggattacaggtgtgagccaccacacccggtcttttttttttttctctttgagatggagttttgcttttttgcccaggctggagtgcagtggcacaaccttggcccactggaacctgtgcctcccgggttcaagcgattctcctgcctcagcctcccaagtagctgggattatagttatgcggcaccatgcctggctaattttttgtatttttagtagagactccatctcaaaaacaaataaacaaacaaaaacttattttagcttaccattgatttttactaaattttttttttttttttgagacagagtcttgctctgtcgccaggctggagtgcaatggtgcaatcttggctcactgcaacctccaccacctggggtcaagtgattctcctgcctcagcctcccaagtagctgggactacaggcgtgagccactgtgcccagacgatttttactaaacttttaagctttagtttaggcaacagatcacaacttctttccccagttattaactcccagattgtttcagatccccaaatgggaagtctgaaatatcatgctgtagaattcctatgtcttagcttctgcagtgtttctctgcaaaggggccaggatgaccccagcattcctgtcttcactctcagagctgtacaaattatgcttttcaatgtattcttggacaagatctggtaccaagtagcgaatgctctggccccttctgagggctc

SEQ ID NO: 472966 - DNA, 1000 bp, Homo Sapiens
ttttttttttttttttttttcatttttaaataaagatatttatttggataaatctctatacattcaataacagcttcctcctcagaatcatccatgtcaaaagactagtaactacactagaatgcacccaaagtagatgctcactgagtgatgagtaaacaaacaaataaaaccaggggctctttcttctccagcaagggggaaatatctagaaagtgcctgtgctgggccagggtagcaggggatgggaaaagaggaagagacaggagtggtggcctccagaaatgggcagaactttgaaaacctttcctgagagaaaatgacaggacaccagcttccggcggccctaagcagcagctgctcttttcaaaatgtgcagaagtgcaggctttccccaaagccccccatcctgtcccgggatcctgctgctccagacagcacttcacaggggccaagcatctgggcatcctggcccttcatggcaagtggttgtacacctggctccaggtttcccaaaaagggaccagcctccagcaggtccggctagcccatcacacggggccgcacacacacacaagctaaggaaacacggtacagcctgcgctccaggcagtagcccttgtgggtgcccttctcgccatggcatggccgccggtagaagacagtctggttgtggtagagcagctccgagttgccccgggggtccatgtgggagcctgtctgtaggctgacgcagtgcgggcacaggcaacgggcgtggtacaggtcctgggggagccggttcaagtctctgtccaactcatatctccagggggagatggccctgctgttgaggggtccatcttcactggccctacaggactctgggtggcggttgggcctagcaggctctaggggaggcacaggcacagtgctccacctcagcagctcctcagaggtgtcctgccctttgctggggcagcagctgggccagtggctgtaggtgtgggttcccatgacc

SEQ ID NO: 472967 - DNA, 1000 bp, Homo Sapiens; identical to SEQ ID NO: 342033

SEQ ID NO: 472968 - DNA, 347 bp, Homo Sapiens
atgaataatatttttattacattgtctggtttttgcttggaatcagattcctcgctactccaatatggctttaaccacctcttggtgtctcagctaagaatgcctgcctcagttcagcctggaaatccaccacaggtacttgctgctgctgagaacgcctcgggtacaactgacactcttggttgctcagtgaggcagtccttctgcgtttgacttggacttccacctctggtacgtgctgttctgtagttcgtctcaggtgtaagcgatcccttgcccgctccatcgcgtcactgaccgctcctcagacagatgcgtcaggcatctccggcggccgctccactctg

SEQ ID NO: 472969 - DNA, 1000 bp, Homo Sapiens; identical to SEQ ID NO: 342034

SEQ ID NO: 472970 - DNA, 1000 bp, Homo Sapiens; identical to SEQ ID NO: 336634

SEQ ID NO: 472971 - DNA, 1000 bp, Homo Sapiens; identical to SEQ ID NO: 342035

SEQ ID NO: 472972 - DNA, 1000 bp, Homo Sapiens; identical to SEQ ID NO: 160110

SEQ ID NO: 472973 - DNA, 1000 bp, Homo Sapiens; identical to SEQ ID NO: 342036

SEQ ID NO: 472974 - DNA, 1000 bp, Homo Sapiens; identical to SEQ ID NO: 342037

SEQ ID NO: 472975 - DNA, 1000 bp, Homo Sapiens
aactatttaaaatatagtatgacatatataaaaattaaacttttgcatattcactcaagctactattactatacatactgtcttataaattagttttggattaaaaatcagttaaaatattgtgaaataagatatttcagtggtggggaagtggatatgaaaatgatacagttcaatgtgtaagaagaaatatagtttattaatgttaaacagcttttttcttacacaaattttattcccttcaaattaaattagaaacccatttagttatgggaagaatactcatggcgcttactgactagattttcctaaccgattgggattaaaacaaaaatgccacatcagaaacatgttgacataatcaaaggaaacagttgtttacaaaaaaagagaatcattagaaatcagtaaatggcattcaaatgtaaagctatcttgtttcttacagctaatgtcatgttagcaatgtgagacttaaagaaagtgaaactcaaacctcagtatatctgttaaagaccaaataacagttatattcactcagggaaaaataaatagcaacttcacaagttagggttttgtttctagttctactgtgaaagataatcactctttagcttaaaaaggctccctgatgtcctcattataaatctagacacaggaacagttatttgagcctgagtccctattatgaattaattgtaaagatgtgttaaatcaaaacatatattcatttactgataggtcttgtcttaactgaagctggcaatccttaattaaacaaagaaatgcttatttctgacaagtgtaaacagaatttcaatgaacagattttctaattttctttcttaactcatatattagctagcaatagatctttgcagtagcatgagaactagtccaaaatgacaacatgcatatatccaaaaaacctgttcaagaacccaaagcaaagcaaaaagagcaacaacagtagaaagattgtctacttatatctcactca

SEQ ID NO: 472976 - DNA, 1000 bp, Homo Sapiens; identical to SEQ ID NO: 342040

SEQ ID NO: 472977 - DNA, 1000 bp, Homo Sapiens; identical to SEQ ID NO: 342042

SEQ ID NO: 472978 - DNA, 1000 bp, Homo Sapiens; identical to SEQ ID NO: 342043

SEQ ID NO: 472979 - DNA, 1000 bp, Homo Sapiens; identical to SEQ ID NO: 160115

SEQ ID NO: 472980 - DNA, 1000 bp, Homo Sapiens
tttttttttttttttcattgtaatatatgtaattagaaaaacagtacacaaaatgttgaatatgggaatggcttagttaaggtatactcacatgatagggtattatacaaatattaaaaatggcatttttgaacaatatctaataagtgaaatgcttaagatatcaagaaattaaaatgtaggctataaaattctatacaatattacctcaactttgaaaaacatttacatatttaatacatctacatgcatagaaaaaaaaactaaaagatagcaaatcaattaatctacgaggaattaaaattttttgtttttttgactttcaaagtttcttatgttatatacagattaatttctttcaagaaccagaagctaaagagaaccaaaatctgaaagacccatcctgtggcagtcactgagctaggagaattttaccaattattcaatctccatagtaatcatgagaggtaggaatctcaagtccatcttacagatgaggaactaggctccacaatttaagtaattgctcagggtgccacagattcgagcctaggcagtccccatgtttcctgctgcaccaaatgcctcacctgctgtggctcctaataggacgttgggagacttacaacaaaggtcattgacaaaacagagctgtgtatagctttcccaagagcaattgctttctaaactctctatttctctctcaaagcagaaaactcttttaaatcccctggacaagaaatggaatcttcttcactgctagggctcgaggttccatcccaaagcagttttgatccagacgcccagctccacaagtctgtgccctctcagagcctactccctcatagccgtggtatcagctatcctgcttactagtttggcattttgtcaggttatgagcagaaggacagggcagactgcacacccccaccccttcccgccagctggctccttggtctcttccttggatactaaaacaaacaggctgtgtgcactggct

SEQ ID NO: 472981 - DNA, 1000 bp, Homo Sapiens; identical to SEQ ID NO: 342046

SEQ ID NO: 472982 - DNA, 1000 bp, Homo Sapiens; identical to SEQ ID NO: 342047

SEQ ID NO: 472983 - DNA, 1000 bp, Homo Sapiens; identical to SEQ ID NO: 160116

SEQ ID NO: 472984 - DNA, 1000 bp, Homo Sapiens; identical to SEQ ID NO: 342048

SEQ ID NO: 472985 - DNA, 1000 bp, Homo Sapiens; identical to SEQ ID NO: 342049

SEQ ID NO: 472986 - DNA, 1000 bp, Homo Sapiens; identical to SEQ ID NO: 342050

SEQ ID NO: 472987 - DNA, 1000 bp, Homo Sapiens; identical to SEQ ID NO: 342051

SEQ ID NO: 472988 - DNA, 1000 bp, Homo Sapiens; identical to SEQ ID NO: 342052

SEQ ID NO: 472989 - DNA, 1000 bp, Homo Sapiens; identical to SEQ ID NO: 157824

SEQ ID NO: 472990 - DNA, 841 bp, Homo Sapiens; identical to SEQ ID NO: 342054

SEQ ID NO: 472991 - DNA, 1000 bp, Homo Sapiens; identical to SEQ ID NO: 342055

SEQ ID NO: 472992 - DNA, 1000 bp, Homo Sapiens; identical to SEQ ID NO: 160117

SEQ ID NO: 472993 - DNA, 1000 bp, Homo Sapiens
tttttttttcaacttggttatgtgattttattcttatcttttgctgctatataaaaagggaataatagaacaaacatttttttccttgttgttctttacttctaagactcttttcatgttttccatggtacaaggtaaacattagaatttacattttggagacctaaggggcaatgaacaggagtgggacctggaggatacggctctctggcaattcaagaatttcaactcaatggtaaagggcttgcaagagaaaatggactgctatttctccacttgctagatggcatcccgtgagtcctataatacacgaggtgtcttccccacactactcaatgtaccattttgggtttttcctactggacctactaaatgctgagtgaaatctaaagaaggtggtagatactagcattcctggctgtgtaatctatacattttcattttaaatatagtaattcaagcataatccatatttaaaaaattagactaaggagagacaataaaggttttaaacgtttctctttgaaaagatggtatcttacagtacatacaaaaatactctgaaaatacatacgacttcatttacaaaacactgaatcaacatattacaagaattacatggttatggattttaataaactgagcatgcattcatgaaacttaaaaaatattaagaaatgcattgaaaaaagcagcgtaaaaaaagacaactcatatagttaaataaaaattacaaaggtcctgagccaattaatggttggtaacaatgtcattcaaaatgcctttaggtttcaataaaatccactgcttatttctgcatgcctagtccgtgaagaaactatttgaagttgtggggtaaataatgatcaggaattatcatgccaagttaattttacacctcaaaaatacaagtgtgccatacttaaaggttatcttattgttgatgctggaatgagttgctcctcagtaaaaaataccagtcaactaacaagaatggcat

SEQ ID NO: 472994 - DNA, 1000 bp, Homo Sapiens; identical to SEQ ID NO: 342057

SEQ ID NO: 472995 - DNA, 1000 bp, Homo Sapiens; identical to SEQ ID NO: 160118

SEQ ID NO: 472996 - DNA, 1000 bp, Homo Sapiens; identical to SEQ ID NO: 160119

SEQ ID NO: 472997 - DNA, 1000 bp, Homo Sapiens; identical to SEQ ID NO: 342060

SEQ ID NO: 472998 - DNA, 1000 bp, Homo Sapiens; identical to SEQ ID NO: 342061

SEQ ID NO: 472999 - DNA, 1000 bp, Homo Sapiens; identical to SEQ ID NO: 160120

SEQ ID NO: 473000 - DNA, 1000 bp, Homo Sapiens
tttttttttttttttttttttttttatgacgtagatctattttattttagcctcttttttctaaggaattgtcaagtacatacaaatttttaaaactttattatatacataaacaatttgaacatacacagaaatagcatactataccatacacaacatacacagaagtagcatattatacccttatttagcgcccagctccatcagctcatatttgaccttgctccatccatacctctagccactgtcccattccacgtgttataatgaagaaaataccagaaatattatttcacccatcaatatatttcattatttcagagatacacatatttgtaaaagatgtaaattcttaatttctctgcatatgaaggtaaaaattatagattgtgctacagtttttaatgtactgtttgcattgataaattattaaattgtgattatagccaattgattatgaggactcagcaaataattttctttagacccttcctattacagccgataggccagtgttttccaaactacgttctttggaatgttattgaactacgagctcttagtagatgtaactgaaagaatgggttttgttgtcaagtaagttcgagaaatttttaatactttgctcttgaataatcagagagcagtttagcttagttaagttttacataaatcctattgtaaagaatcttggccaggcacggtgctccatgcctgtaatcccagcactttgggaggccgaggcgggtagatcatgaggtcaggcgttcgagaccagcctggccaacatggtgaaaccctgtctctactaaaaatacagaaattagccaggcatggtggtgtgcacctgtactcccagctactcgggaggctgagtcagaagaattgcttgaacccaggaggcggaggttgcagtgatctgagactgcgctgctgcagtccagcctgggagacagtgcgagactttgtctcaaaaaaaaaaaaaaaaaaaagaaaaaga

SEQ ID NO: 473001 - DNA, 1000 bp, Homo Sapiens; identical to SEQ ID NO: 160122

SEQ ID NO: 473002 - DNA, 1000 bp, Homo Sapiens; identical to SEQ ID NO: 160123

SEQ ID NO: 473003 - DNA, 1000 bp, Homo Sapiens; identical to SEQ ID NO: 342066

SEQ ID NO: 473004 - DNA, 1000 bp, Homo Sapiens; identical to SEQ ID NO: 342067

SEQ ID NO: 473005 - DNA, 1000 bp, Homo Sapiens; identical to SEQ ID NO: 342068

SEQ ID NO: 473006 - DNA, 1000 bp, Homo Sapiens; identical to SEQ ID NO: 342069

SEQ ID NO: 473007 - DNA, 1000 bp, Homo Sapiens; identical to SEQ ID NO: 342070

SEQ ID NO: 473008 - DNA, 1000 bp, Homo Sapiens
agatggagtctcgctctgtcgccaaggctggaatgcaatggcatgatctcggctcactgtaacctccgcctccccggttcaagtgactctcctgcctcagcctcccggagtagctgggattacaggcgcacaccaacacgcccggctaattttttgtatctttagtagagacagggtttcaccatgttggccaggctggtctggaactcctgacctcatgatccgcctgcctcggcctcccaaagtgctgggattacaggcatgagccactgcgcctgaccaacttttcccagtttctcaatgaagccataaactttcagatctcattggttgtgagagtgagaattcgatccaagtcttctaccaactgcttgaacgttggtctctgggagggcactgcatgccaacagtccctcatcatcatgtacagttcgttggtgcagttggctggcttatccattctgtgtccttccttcagcagcttaaaaagttcctccacgggaatccctgggtagggcgagccccctaaagtgaagatctcccacattaacaccccgaaggaccagacatcactctgatgagtgtatactctatcaaacagggcttctggagccatccacttgactggaagccgcccattggtggtctttttgtaatagtctatattgttgatatctctggcgagtccaaagtctgctattttcatcacattgttttctgttaccaaaacatttctggctgctaaatctcgatgaatacatttttgggaagccaagtactccatgcctctggccagctggtaggtgcatgacaccaagtccttgaaggtcatctgctcctcaggaacacggttaatgtcataggagtactccatcccgggtggcctccgggctcggaggtattctcggaggttgcctttagaggcatactcaactatgacatagagaggcccatcctgtgtgcaggctccaagaagatttatgatattcttgtgtttccc

SEQ ID NO: 473009 - DNA, 1000 bp, Homo Sapiens
ttttttttttttttttttttgataacatgggtggatttatttcttaagatttgagtgcaaacttaaaaacaagaacaaacaaagcttttcatcaagaataaacacaaaatctaaacaattctgcaatcatgcattttaacagaaagtacaaatatgaatacattataatttgtaactgcatttaaaaattaaaatatttctctccaaatccaaaacaccacacaatctttatctgttctcatcttgttaccttagaaacatttgtcatatgctatcaggaaaatataggcaagacttactaatcagttattcatgatcaaagaaacatgattctccttaactgtgactttttgaatcatttatctgtatttctgaaatatcacacaattatacctctactctagagaaaaaaagaataaatacaaatatcaaggaggcaggaacattcatggaattaaagcaaaagtcacaagtgtttgacttagaaatgtacatattgtagtaaatttttaaagtacaactttagttgatggctgatgtgtatgtaataactgtgagcaatttaaacaggtataaaaatgtgagatcaaaatctttaggcttaaatacttgaaaagtcactatggatatggaaagatttgtttacataaacatgtatatttttagatggaaaatcaaggggtagtggcatctccctggtcccttaacaatatttggatttttgcaaagaattagcagcacccaaccttaagtgttaattatgtgtttctaaaggacctataacagatcagttggcagtgttctagcttttgggagttgggggcagattgggggtgcaaatatctgagataagatagtacatgcactcacacatttaaaatcaccattctaaatgggaaaaaaaatcacatattgggaaagtctaagaaactcattcctaagggataaacaaccagggaaggaataaaagctgaacagtagtctacttgataataatggt

SEQ ID NO: 473010 - DNA, 1000 bp, Homo Sapiens; identical to SEQ ID NO: 342072

SEQ ID NO: 473011 - DNA, 1000 bp, Homo Sapiens; identical to SEQ ID NO: 342073

SEQ ID NO: 473012 - DNA, 1000 bp, Homo Sapiens
acaaggatttattgagcccctactgtatgcttggcactcacggggaccacagaacagccctggtacagtgggagaacacaggttcagaaggagtttgtcacttggtcacacagtgagcaagaagaggcagaattcaaacccaaaccgacctggtcccaaaactcagagataggtttcctagagatgacgtgacagtaaagagggccccagggggaccccagtactcctgcaggcaagacttcgggactggggtctcccacggccgggatggccttgtccatggatcatgtccccccagctgcctgtcaacgccgaggacttcggctgggtcctgacctcttagcacagatcgccgcttagagcctggtgggtgttgaattttaaagaacattccatccctcctggatctctaaggagggaaatgtgggtgggggtcagggaaggagagaggaactgggtgagaatggagatggggtctcagaggacaaaagaggagctcagtgcttgcatatctcaacagaccagggcacgccataggctcggtttcctcatttgtaggacgacgacaaacatgcccgggtgttgcaagattgtctcgtgcacagctgctatccggcatagagttaacgtgcaaacggagggtggcttagcagctccagaagtccagccctgtctggggaaggggcagccatcaggcccctgatggggtgcagtagggtagccctagtaggaggcacccaggacttctggcccacaatgagaagttcctgagaactggaagtctggttgtcatgaggacaacgttgacagtctctatggcaacagcttggtgaacagggccccgttgtccacaaggaaaagcctagggggacaggtgttctgttacctcggactccagagtttggtcaccatggcaacagtggtggggtccaaaccgcctgggggtggagcatggagggtggtctggaactggagtgggcctggggacagggacagtttg

SEQ ID NO: 473013 - DNA, 1000 bp, Homo Sapiens; identical to SEQ ID NO: 160125

SEQ ID NO: 473014 - DNA, 1000 bp, Homo Sapiens; identical to SEQ ID NO: 342075

SEQ ID NO: 473015 - DNA, 1000 bp, Homo Sapiens; identical to SEQ ID NO: 160126

SEQ ID NO: 473016 - DNA, 1000 bp, Homo Sapiens; identical to SEQ ID NO: 342077

SEQ ID NO: 473017 - DNA, 1000 bp, Homo Sapiens; identical to SEQ ID NO: 160127

SEQ ID NO: 473018 - DNA, 1000 bp, Homo Sapiens; identical to SEQ ID NO: 342079

SEQ ID NO: 473019 - DNA, 1000 bp, Homo Sapiens; identical to SEQ ID NO: 246554

SEQ ID NO: 473020 - DNA, 1000 bp, Homo Sapiens; identical to SEQ ID NO: 160128

SEQ ID NO: 473021 - DNA, 1000 bp, Homo Sapiens
attttggaattattaaaaaatgaaataaataagaaaagagaaaaatagtttgcacctacatagtagattttagtgtccaagtgcctggaagagaactttggatttctctaccccactgggcacgccttccctagcagcaaagatggagctccagttcctcagacggtgatgagccacaggaagggcagggggtggggccaatgaagatcctcttgggctgcctgaattccctcagtgtacacatcagctcagcccgaagtggggtgaagatctcccaattgacacgaaccaaggaattcaaactctcctcaggggcaggatacgtctccaggcttaacttgctcagcccactggtgtggcgcagcaggtccttcagggcgtcaatagacatgcaattgctgccaaagtagaaggtggtgagctgggagcagcagctcaggccaggcaggatggcactgagttgggagtagtggatctgacagccctctaacacgagggtctcgagagaggcagcaattttctctagcagagctcctaggggttcaagactgatgcggaacagcagcacgtagctgagattcagatgctttaggtaaccgaggcttgggaactgggagagacacttcaagtcctcttctaataggttgccacaagttaattccaagttctccaaggggttctggaggcacctgatcagctgttccaggtgcccactgaagaaggtgatcaattttattttaagcaactggaggtgttccagcctgaggaacacagaggtgaatctggtgactaaccatccctcgagttcattatctgacgtgtaatgatggcacctggagaaaacgagtttgcaaagagtcttcatctccttcaggtaacaataaagctttcttatcagatgtggccagcacgtgttgtgaatttccagctccccaatactattaatgtatattattttcaatgactttctgagatatttaattggcgttagataattgac

SEQ ID NO: 473022 - DNA, 1000 bp, Homo Sapiens; identical to SEQ ID NO: 342082

SEQ ID NO: 473023 - DNA, 1000 bp, Homo Sapiens; identical to SEQ ID NO: 342083

SEQ ID NO: 473024 - DNA, 1000 bp, Homo Sapiens; identical to SEQ ID NO: 342086

SEQ ID NO: 473025 - DNA, 1000 bp, Homo Sapiens; identical to SEQ ID NO: 342087

SEQ ID NO: 473026 - DNA, 1000 bp, Homo Sapiens
cctcgcccgggcttagcaccaatcatcgtcactctcgctgtagggttcgtgcaggcccttcctggagcccggcccgcggggcctggccagtccgtgcgccgggtagtagccgttggggagtcgccggccgtgccgagaaggcgaggcgcaggccgggcccgaggcccggggagtcctgggcgagcgcccggtggcgcccgaggacgcgtgtcgtacggggggtggcgcgtcgtaggccccggccatggcctcctcgccgcccccgctgcccgggccatcggcctcgtcgtagtcggagccccggtagtagccatggtgccggggacccgggggcccctcggacacgtgcgggccagatgccggccaccgggccccgccgtgtcgacaggccctgggggactcgctccgggccgggcctgggacccgcctctccatcctgggcgagcggccgctgctgtggccccccgtgggcggccgatctccggccagaggctcggccgtggggcctgggtacctccgagggccgctggtggccgcccggcccggcctggccaccgcctgctgctgctgctgctgctgctgctgctgctgcgggggccccgagccgccggccttacggatcacaggggaataggacacgtgtggccggggggtggagggggtctgggggagctggcggcggccccgccgcggagtgctggtaccagatgttgagggggctgggcttccacttacggaactactgccctgccggtgcgccatgtgctctcggccctcgctgggcgagcgggaccagcgctggtcccgagcccgtgcccggccgtggtccggccgttcctgggcatagcggtccttgtcggggggcgggggatggtggtggtggtggtggtggtggtggtgctgtcgatgcttccgatccttgggccggccccgctcctggtcccgctccttcgacggcaggtccccggattgggtggtcatgctcaggtctgtccccaag

SEQ ID NO: 473027 - DNA, 1000 bp, Homo Sapiens; identical to SEQ ID NO: 160130

SEQ ID NO: 473028 - DNA, 1000 bp, Homo Sapiens; identical to SEQ ID NO: 160131

SEQ ID NO: 473029 - DNA, 1000 bp, Homo Sapiens
acttccttgctcttcacaacaacctgatggggctggtactactgctcatcatagcctctgtacaaatgaggaaacagactcaagagggacttgctcagggtccctccccaggtcaggtgcaggggcaggactgaagccaccacagctcaggattctaagaatcacctttcacatgaagccaaaactccacagtcaagcgggcaccaagaaacatgaatgttttgcccttggcttttgttctggaagttcagtccagaccacaagaagcatgaattgctttgttttctcaactctacacctgcccccctggagccctctggtaccagctttcaccttgagggcttcccgtggactcacctttggggcaagtgctgccagaggccgggactgctgagggccagcaccagggggccgcagtggggatgcacctcctggcctggggaggctcctgcggcctggcactgggtttgccgggagtgccttctggggcggccgaggcctggagaagtcctgggaaacgatgcaatttggtgcggggggaattggccggcttggaggaggcctcctggacgactccgtcctctctatttgagacccgggccctggggagttcctagcagccctgctcaggtgagctggcagtggtgcaggtggggacccaccacgcagataatctggagggggccggggaggaggctgggagggcttccgcaggatttccggagtgttgatcacctttcgcttgccctggggcgtctgcagcttgaaagttgggttggcatgaccagtcccgctgttctgagaaaccctgaagggacaactgaactgttgcctcagcttggaagggagagctgagggcttgagttggcctagtttgttgttctgtctgcagcagtagtacatcagcatgaggaccgccagcaccaagatggccaccaacactccagctaccacaggacccacactctcagggggcataggcccactgtcgatactgccc

SEQ ID NO: 473030 - DNA, 1000 bp, Homo Sapiens; identical to SEQ ID NO: 160132

SEQ ID NO: 473031 - DNA, 1000 bp, Homo Sapiens; identical to SEQ ID NO: 342090

SEQ ID NO: 473032 - DNA, 1000 bp, Homo Sapiens
aatccaaaaacaaatggatttttgagggatcagggaaccactgatttagaatcttgtgctccaacatagattctttgatgtttagtatatttcacacaacattgctgaaggtatttcttaaatgtgttttgcagtgtctaataagggatgaactacagctgaaggcttttccacactcattacaatcataaggtttttctccagtatgaattctctgatgtttagcaaaggatgaatcatgcctaaaggctttcccacaatgactgcattcataaggttttactccagtatggactctctgatggatagaaagatgtattctctggctaaaggctttcccacattccttacatttatatggtctttctccagtatgagttctctggtgttgagttaggtatgtactatggctgaaggttttactacatacattacaaatatagggtttcacaccagtatgaataatctcatgttgcctaaggtgtctaatctggaaaaacgcttttccacagtctttgcatgtaaaaggtttctctctaacatgagttctcaaatgctggatcagtccaatgctctggctgaaggctttctcacataccctacattcatagggcttttccccggtatgaattctaacatgttgagtaagcgatgaaggatgtctgaaggttttcccacactccttacattcatagggtttctcaccagtatgaattctctgatgcggaataagagatgaactttggctaaaggcttttccacattccttacatctgaaaggtttctccccggtatgaattctcatgtgttcagtaaggtgaataagctgtttgaagattttttcacaaatattacactcaaaggttttcatttttgtataactccttgaatgattaactaaatctatgttgtatctgcttctctttccaggtgtgtcatatttacgatctctttttcttggaagacctattggtcctggcataacttctgacttcacatt

SEQ ID NO: 473033 - DNA, 1000 bp, Homo Sapiens; identical to SEQ ID NO: 342092

SEQ ID NO: 473034 - DNA, 1000 bp, Homo Sapiens; identical to SEQ ID NO: 342093

SEQ ID NO: 473035 - DNA, 1000 bp, Homo Sapiens; identical to SEQ ID NO: 342094

SEQ ID NO: 473036 - DNA, 1000 bp, Homo Sapiens; identical to SEQ ID NO: 342095

SEQ ID NO: 473037 - DNA, 1000 bp, Homo Sapiens; identical to SEQ ID NO: 342097

SEQ ID NO: 473038 - DNA, 1000 bp, Homo Sapiens
gaaacatgagctcacttggtgctctctggcctctttattcccatctccttaggctgaccctgacaagtgccagggccaggcttggaccaagcagtcaactgagtcagcctgccctgggaaccaggcaggggagggagcttacggacgggctaggctcaggagagtaagagagagcagatgaagggcagaagtccgtggccgcagaggcagctgagcatgagggatggagcgtgctgctgtcctgcaggtgccgttagccctgttttgcactggtggattgatctgctcaggcgcacagggagatggcacagcaggacccgccgcccagcctcgctgagggcatgctcccgcctcacctccagaggctgttgggcggaagccgagagctgcagcagttggggccagcgtgggactggaggcccaggtgaatcttgtggggcaggggacggagctgaggctgtccggcccgggccctccccacccaaaggccctagaaccctagccttcaatcctgggggtttgcttctcccctgagtcctggctttcctgacctgccgtccgttagggacaggtggaggggccaagtcttgccatcagaggccagtgtggtggtgccagagctacggggtattccaggacccctgacctaggcacggggcaggagggcccagagccacctggccacttgtcaggagcttaggattgggaggaaagagggagcctgtatccagactaagccaggggtctgcatgtgtcctggctggccagggccaccctcccagacctcaagccaccccacctaccactgcccacctggtgccaccccagcactgccgcagacctggcccagcagctcctgctccttagcaggggatgagcacgcccaccacagccaccctcttctccaggctgcagggcaggctccagctccccatgggggccccatcaggccagggcccctggctttactgcaggggagagggtctcttgtgcagacccc

SEQ ID NO: 473039 - DNA, 1000 bp, Homo Sapiens; identical to SEQ ID NO: 342098

SEQ ID NO: 473040 - DNA, 1000 bp, Homo Sapiens
gcaaatcatcagcgctcatgtttatttataaagttacatcctaaaagtgattcgaacaataaatagttataaagaagatctgctgccctaccctctgggtgtgaggcctccatatggagtcagcagaggatctgggagggatcctgggaagctctgggatcctggggtctctgccgtctcagtggcgcaacagaagccagcaagcttcccacccttccttgcagcaccagctggcccccagggctgcgtctctcctgacggaggcttcccgtggacccctaggccgcagccccctggcagggctgggaggcaggccaagactcaggaccagcccccacagtgcaaggctggccggcccagctgctgggaacctgtcaggccctcgggctccagtcacctgagctggcacagggggccaccctgttaggttttcatcactgccatgacggagacctcttggaggaactggcccagcatctcctggctgtgaatggatggcctgtcaatcctggttgcgatggtcactgtgaaggccccctctgtgtccggcaggtaggtggagggcacaaccttgtaggtgcctgcaggcaggaggcagagccggctcacctcctgggcgtagcgatgtggcacgcagctcagcagcggctcctgcagcagcagtgggggtgcgtcctggctccttccaccctctgggacctggaagatatggaagccgatggggtggaactcggtgtcactgggccggcagtgctgatgcagagtgatgcggacgcagcgggggccagggccctaagggagactcgcccggtagagaagactcggagcaggaactcccctggcgcgtccttcaggaaggtgctggggacagccaggtagtagcccggtgagagctcacaacgcaggtggacctcccggtcgtatgcatggcacgcggtgccagccacggggggcatggacaggaccctaggcagattgacccgccgcttctctaccaatc

SEQ ID NO: 473041 - DNA, 1000 bp, Homo Sapiens; identical to SEQ ID NO: 342100

SEQ ID NO: 473042 - DNA, 1000 bp, Homo Sapiens; identical to SEQ ID NO: 342101

SEQ ID NO: 473043 - DNA, 1000 bp, Homo Sapiens; identical to SEQ ID NO: 342102

SEQ ID NO: 473044 - DNA, 954 bp, Homo Sapiens
tcaagatgattctctaaattctttgtgacctgagggctccccatctttgaacatgtacctcagccacagtagcactgacagagaggcctgtctcagcttcttgtttccaagaatcagaacacatgagtgacatgaaggataagccattcccatcacctgggaaagaataattagattttcctccaacctttcagaggtccaaactgatatgaaaaaagacagagagaaaatggcatagagtaggaagaaagtgatcacacttttaactcctctgtgggctttggtgctggcgtctccggatattttgacagtgtgctgcatcttcttgcgatgtttccacatggagaagatgaggagaagaaacattgccagggacaaagtaaagggtatgaaaatgaacacagtgctggttaatacaataagactggaaaatcgtgtaaagttacttgaatcagaactgcaagtcttgtttcttctgtatccattgatactggcatttatatggatgtttatcagtgcaatatttaaaaacaagaagaccgaagtcacaagaagcagcaccaaaaccacctttttaaccctccactttaggtagagaaaaatagagttagaaaaattggctatcttgagaaaataaaaagtaccgaggcctgtagctaaccagacactaaaatgattgatcactgtccagatattagtaagcattctgaacattttttcagtggcaaataaagctgggaaaaacacagacacacaccagcttccgaatattaaccaaaccaggctaattcgagagattgccaaagcagtgaggatccgatcaaccgaagagatctttcttcccttgacccagtcaatacagttcaccagtgctatgaaactatttcctaaatttccaattataaattccacaattaaaacgaatgtaaatatgctctttatgacaccacccat

SEQ ID NO: 473045 - DNA, 1000 bp, Homo Sapiens; identical to SEQ ID NO: 342103

SEQ ID NO: 473046 - DNA, 1000 bp, Homo Sapiens
ttttttttttttttttttatgtagcccaaggagtttagtctcctttgctcagacagacagatctttattagtgttttcaacttattttgctcacaacttcccagcaagaaatgtcttacattgcaaccagttctcacatttagatgtatgggtgaaaagtttcacaaaacagtatttgcctttactacatgatgcattctggcctactttattctgcttcattgctgtgtaatgctggtgaccacttgctaattgatttcccattttactaaatgggctgggacccacggtctgaaaaccctgccttaggctgcaagcatttctgtgatctctgcgagctactccatataggtaaacacacgcgaggtaaactaggaaacagcttctgcttttgcagattagaagtgaagttgacatcacgccaagtacgaaaaggctaaacagctgacaaaatttccacttgagcaaccctggggagcgcaaacaggaggaatcggggcaagggtgacttgaagaaagcactggcagatcacgcactttaaggcaactctacactgcacaatgtcaaataacctagcatggggcggcactaaatggctgcaggaaagccgagtcttcttccacatccggcggctcccctcggatgcgagcgctggcccagggtgtgtttacagaggtgagggcttcccgtggacccttctcgttgggagcgcttagcctcaggagcggattcagggcacaggcagaggacgtccacaaacaccacaggaagccgccacccaggggcgtggaaaggcccaatgcctcgtctgggattcacggccggcaaagcggcccctccggaacgggacagcacagcggctcacctctgcgcctctgggggtgcggggggagcctcgccctccacgctctctgggggaccgcccgccctagcccccgcctgggcttcgcgggtggacggttgggggccccgggcgccccccagcgcgtagcttttctc

SEQ ID NO: 473047 - DNA, 1000 bp, Homo Sapiens; identical to SEQ ID NO: 342104

SEQ ID NO: 473048 - DNA, 1000 bp, Homo Sapiens; identical to SEQ ID NO: 342105

SEQ ID NO: 473049 - DNA, 1000 bp, Homo Sapiens; identical to SEQ ID NO: 160135

SEQ ID NO: 473050 - DNA, 1000 bp, Homo Sapiens; identical to SEQ ID NO: 342106

SEQ ID NO: 473051 - DNA, 1000 bp, Homo Sapiens; identical to SEQ ID NO: 342108

SEQ ID NO: 473052 - DNA, 1000 bp, Homo Sapiens; identical to SEQ ID NO: 160136

SEQ ID NO: 473053 - DNA, 1000 bp, Homo Sapiens; identical to SEQ ID NO: 160137

SEQ ID NO: 473054 - DNA, 986 bp, Homo Sapiens
ttttttttttttttttttgcaagtggaactttgaacatttattacacgtttaataatatttcaaaattattgataattcttttggatgtgataagctttgtaattgtcttttaatgagctctcatcttggagagatacattctgaaatatttacagaagaaataatccgatgcctgagatcagcttcaaaagaactcaggatggggcagggacgggttgtaggtagtcggtagtcagggtactgggtacacggatgttctttgtactgttctttggtctgttgcgcaggttcgaaatgcttcctaattaaaaagcctaaaaagggacttggcaagctcccatccagacttcaaccccacaatatggagagcactcaggtccgaggcgttcctgctccccagctccctgcaaaaatagcgccaggcaaggtccgaggcgagggcgatgcttccatgagggtcccgccgactgcgtcgcgatcctcaatggctcagcgacttgcggcccttgagcattcggcgaaggatgacctgcacgccggccggcgtgctcaggcgccggacccagccgtgcttgttcttgcgtttgatgttgctcggctgatactcattcccgcgagccttgccccgggcctgctgcggggtggggaggccccaggcgtctgggaaccccagccaggcccggggctggagccacctgccacccagcaacgctgccgacctactcgtggggcccaacagggatccagccaagacagccatatccgcagtgggtcccgcagtaccggctgcgggcgattccggagcccagagccgctccagccctggaacaaaggattatgggaaatgtagtttctcctaacgtgcaaaaaagaggccgttggggaaaaccctgaagttgtagttctgcgcctgcgcaacagaggcgcgccagtctatatccgcggggcacagggatgctctgcatacacaccaacaggtagccgg

SEQ ID NO: 473055 - DNA, 1000 bp, Homo Sapiens; identical to SEQ ID NO: 160138

SEQ ID NO: 473056 - DNA, 1000 bp, Homo Sapiens; identical to SEQ ID NO: 342112

SEQ ID NO: 473057 - DNA, 1000 bp, Homo Sapiens; identical to SEQ ID NO: 160139

SEQ ID NO: 473058 - DNA, 1000 bp, Homo Sapiens
ctgcaggctgtcagtgaggcccaggcagaggtgacagcaccgttttattcatgacaatctgcaaaaaaacaggtggatgggtcagaaagtcactgcaagcctacattcaggggctccacccgcagccaaagcccgccctcggcgcgcatgatcaattccagcttcctgcggggctcagtgtggtctggcaggaaccggaagtgcagcagcatcaacgccaggaccactttcatctccgccatggcgaacgcctgcccgatgcagttcctgggccctgcggagaaaggaataaaagccagaggtgacctccccttgctgttctctgggtcaaagcggaaggggtcgtagacctcaggatccggccacacagttgggttgtgatggacccctataatatcgatgaggcaggtaatgcctttggggatgactcggccatctgggagaacaatgtcctgggtgcagcatcgggagatgaagggagctgggggatgtaacctcaggctctccttcacgcacatggtcaggaagggcagctgggccaggtcgtcccattcaatctctttaggatcgcggtccttcagaagctcttgcacctcctgtcggcagcgctcctggtattctgggtgcctcgcaaggttgtacaggacccaggagaggccactggccgtggtgtcatggcctccaaacatgaaggtgtcagcctctgctcttatatcctcatctgacaatgccttcccatcttcatccttgctcagcagaagcacatcaatgaaatccaaagtcttggacttggctttgtctttgaaaaaatcatcaataccctgagtggggagggtgcgacgccgctcccggatgacagcgtctgtgaagtcatgcaccaggcggcaggccctgtggaagcgccgcccgtcatgggagaggtaatacagaaagtccatgtgctggaggatatgctggcttcttttctctacaagggcactgagctccaagatggtggcaa

SEQ ID NO: 473059 - DNA, 762 bp, Homo Sapiens
tttttttttttttttttttttttttttttttttttttttttattttaacacatctttattctcacagtgctagtcaacaacattgttcacaatcacaatcctctgagtggcaccccaaaattgagaaaggcagagaaatgaataattcaataatgctgaaagtcatcaatgtaatcaaaattcccaagaacaggacagtaacagccttacactgactattttggtgagaataaccacaaatgtagttttgatctaggatgaaaccaaatgtgaggagaatgattccagctattgctcccagggcactaagaaaattcattattcggctcaatattatcagagtttctgtggtttttcttttcactgcaattaggaaggctccagaattaatgaacaaaacagagccccagaatggatatcctgaaagaaatataaagggaaaccttggatatggttttaacaaggtgaaaaggaagataactccaaaagaaaaggtcataattccaaacaggatctggatagtccctaagattttcatttttctagcaaataatttttgcaaggggctttgagttgaaaaggtcgtggctgaaagttctgtggactcatattctgaagcagtgatttctggaggaaataccagaaacaccggactgtgtgcggtgcttgaatccatgatggtgtcggtgataatttgaaaggagatgatttagttggtacttcagtctagaccatgttcttttcttgtgctgaggctgcctg

SEQ ID NO: 473060 - DNA, 1000 bp, Homo Sapiens; identical to SEQ ID NO: 342113

SEQ ID NO: 473061 - DNA, 1000 bp, Homo Sapiens
tttttttttttttttttttttttatcattttaaaaatgtattttattcaacttggaaaatgagtacaaatccctgggtgttttttgtcagggaggagtggggagtaggcaggaaagagaagagggtaggaggcaaggtaaggtatgagcatcacagtggctgcctcaagaccctgcccagggagggtggggtgggctgggggttgagcacggagctcaggtccggaggaacaccatggtgaggaggcccaagacgtaggcggccaccaacttttgtcccagggagacgtgcaggacttgaggcagctggctgccgagttcgtccgggagtgggagcagcaggaaggccacagacacaatccccgtcagcaagaagaggaggaaggagctggtggccagttgctggcgggggtgctcctggaagtgtctggccgtgggtggtggtgtcccagcaggaggccctgggcgaggcgctggatctggctgtccctgaagctcaagggggtacgctggggctctcagaatggaggtaatgtccttgcgtcccaccactcggccctcagctccttcctcagacagctcaatgcggaagcggtcctggacatcatagtggctgggaatgggtgccacatggcgaatcacaatgtcaatgcaagactggggcttcacatatccctctgcgtcaaacaccgtgtatttggcaggtgctgtgcacaggactcggaagcgaagcgcagttcctgtggggttatagagggtcagcagctgtcggggtccgctccgctggtccgccctgaatactagatccgggggaaagaccaggaccgggacaacgggtcccaagggaggaggggcgccccgggacccccgcccagggggccccggacccaccagctcctggtcctggggcgccccacggcgcatgcaggctctgggcggtcggacatccgagggcagagctcaggggacagggcctggagtcagagctggggggcgtgagg

SEQ ID NO: 473062 - DNA, 1000 bp, Homo Sapiens; identical to SEQ ID NO: 160140

SEQ ID NO: 473063 - DNA, 1000 bp, Homo Sapiens; identical to SEQ ID NO: 342116

SEQ ID NO: 473064 - DNA, 1000 bp, Homo Sapiens; identical to SEQ ID NO: 336939

SEQ ID NO: 473065 - DNA, 1000 bp, Homo Sapiens
ccccatgacggggtccactctgaccttcagaacttgaggctgaagccggggcccgcggcagaggccccctggttcgtggtggtaaggtggaagcccgtctccttcaggtcgtcgtcacccagctggctgtagcccaggcctccctcagggggcctcgggctggtgccccgcttcacacgctgctgctcgctcttggcgggccacgtggggaacatggaggggtcgatggggaggggggtctcgcggaaatactcatgcttgaggccgtcctcagcgctgatcctcctcccggggaagtaggtcaggaacttgttcatgaggtcgaagccctggtctgagagcagagccccgaagcgcttgcggaggttgttgtaggggtgctcgctgaaggtcatcttcttgactactgggagctcactgtagccgggccagattttctcactgggggtccccagctccttgaacactttgttgatctgatcgatttccgaattcccggggaacagaggcttctgagtcagcagctccccgaagatgcagcccactgaccacatgtccacggccgtggagtattccttggcaccaagcagcagctctggggcgcggtaccactgggtcaccacgaccggggtgtaggccttcagaggggatccgtactcccgcgccagcccaaaatcacccaccttgaggatgccggcgtggctcagcagcaggttggacgtcttgaggtcacggtgcaggatccagttgtcgtgcaggtgtttcaccccacgcagcagctggatcatcagggtcttcacctcccctggcaggaagggctgtttcatggtctccatcaggctcttgaggtcgtgctccacatagttcatcacgatgtagatcttgtccatgttgctgcccaccacaatctctctaacggtgacaatgttgggatgctgggccttgaggatggtgttgatctccctcagggacgtgatcgggaagccctccttctccttct

SEQ ID NO: 473066 - DNA, 1000 bp, Homo Sapiens
tcagtgttgcctagaaaagaagttcttgaaggcgctgttgtagttcttgttgaaagccgtatagatcagggggttaaagaaggagttggagtagccaagccacaggaagatgcttttccagatggcggggatgtcacaggagcagaggggactgatgagctcggtgagaaagaaggggatccagcagagcacgaacacgccaatgaggatgcccaccatgagggcggcccgctgctccttctgctcccgccacgtgtccccttctggctggaaggtgacggtggcgtggcggaccgtgaacaccatctggggctgtttggcagagtccttcacctccacagcttcggatatgggtgagacgctattggtcttcctggagcccacgcggaacttggcagccttgtagatcttccagtacacgaagagcaccacacagagcggcaggtagaaggcgcctacggtggagaacacggcgtaggaaggctcgcggcttacctggcactcctcgctgccctcagagtacgtctctccccagccaaaaagcagcggggccagagagatgacagcggagagtgcccaggtgagcgcgatcatgacgttggagacgcacttgcgggtgcggagcgtgtattccatgtggcgcgtgatggaccagtagcggtccagggctatggccgtcacgttccagatgctggccgtgcagcaaagcacgtcgcacgcgatccaaagctggcacagcctccgacctagctgccagcggcgcccggacagctcatgcaccaggctcagcggcatgaccagcgcggccaccaggacatccgagacggccatggatgccaccaggttgtggggcacgcggtggaaggtgcgtacacggaggatggtcgccagcaccagcaggttccaggcgaacgtcgccgccaccagaaagcccagcaaggtgagaataagcactccgaagaccgagagcaggggcgagctggggcgcaggtcgtctttg

SEQ ID NO: 473067 - DNA, 863 bp, Homo Sapiens
gtaagaaataaatgcacagacgcttgcaaagctccgggctcccctgaagctgcggaagcccccagatgggagcaggcggggagaaaagttggggaacaggcgagggcaagggggcaaagccgaaggaggttgcagcgctggcctggtccctgcccaggcatctactcgcccgcctttgcctctgagtcctccccgctgggctgcgtggaattgatgagcttgttttcctttttccacttcatgcggcggttctggaaccagatcttgatctggcgctcggtgaggcagagcgcgttggcgatctcgatgcggcggcgccgtgtcaggtagcggttgaagtggaactccttctccagctccagtgtctggtagcgcgtgtaggtctggcggcctcggcgcccatggctcccatacacagcacccgcgcaggagttcatccgctgcatccaagggtaaaccgggctcgtgtacttccggtcggcgccttcgtcatggagtgctttgccctgcccgctgctgctgtcgggtttgtactgctgctcgggagaaaagtgcaggtagtccccggggcccctctgcttgccactgcccgagggcgaggcgccactgaggtccttatcagaatagaaacacgaggccccgtactcgtaggacgcccggttgcaggccaggaccgagttggactgttggtagaaacaaggtgaggtgtacgtcttgtccgggagactcgacgccccgtacgaggccgggaagggcctcagcgcgtcatagccagcctggtagaggggcagctggcccaagaaggagtcctggccgctgggaaggctcccggggaaagtgggattcacaaaataggaactcat

SEQ ID NO: 473068 - DNA, 1000 bp, Homo Sapiens
ttttttttttttttcacaagaaaccaaacatttatttctattgtcactctgtacagcacacagatattcacacatacgaagggttctagactcaagcagccccagaggtaggaaggggcctggttttggaatgtcagaaagagaaaaggagagaggactcacatgacacaaaaaaatagtaataataatattatcaataataataataaacgatgcaacataataaactatgggagagggctctgcaacatcctcctcccagactgggaggggcacattttatttcctagtttcacattcattttcagtctaggagagaggcttctgctgtacaactctggactggcagagtagtgcccagctcccagaactcaactggcccctcaccctgccaagcatggcttggcttggcctttcagaggaaggccctcccgggtctctgagtctctctttttccttggactcaatttccctgctcactcctgagttgtcaaggccacccccttccctacttgctcccctcctctgttgcccacccccaaccccacggtggaagtgggtgagcagtcattctggccctcagtgaatgggcacgaaagatgagggagagtgtgtgtgtgttaccgtgaccaaaacactgcactatctggcagtcagagggtgctttcgctgggtatcgggagtgggggacaaagaaaggaaatccaggctgtcttccagcagcggcagtagcagaggcggaggcggccgagccgggcctcatttgttagcgggtgtcgaggtaatggtcgccaccgaggcccgtcttctcctcggcagaggaaacaagacagatgggcctggacctggcgtgattaaagatgaaacgtggatccatcttcgccaaagctgaaaacgaggagctgcagcctcctcctatttctctttctgtctttttctttcttccttcttcttgctttttctttttcttttttttaagaaagaaagcaagagatttgaa

SEQ ID NO: 473069 - DNA, 1000 bp, Homo Sapiens
tcgggttctcgcttgtaaactttattgtaactcttccgcccttttcaggcgcagacaacagaacaaagtatagaggaacaacaaaatatataattagccctccctcccccccataaagcaattcacggatacagaatacattctcttcacagtaaacctaagaacacttgtaacaattgcccacagcgcgcatgctaactaaagtaacctcttttgagaaacacttaagacaaaattgtcaaaccaaagggggtgggtggaggaggaaaagagagaagccagagagaaagccagcgagctggggggttgcagaggggagagaggattgggaggggaaatgaggacgcagcgagagagagcgagagcgagagcgagcgagcgagagagagagagagaagggagacagaaagaattacggcgtgaataggcagtttcatgttgttgggagaacttagcagaaatcggtaccttggtcattacaaagaagcacgttcaaaggaaaaaaaagacaattgcacaaggaggctttttacacggggaggggaggggcatggggggctcagccgggcctttgccgctcgccctcacagggcgagggagcctttgcttaaatccttttctttccccccggcccccaagagaagggaaggagatccacggtagctcacacacagaagctattacgagatactaccactagcggggactggcgcggcgggggacgctgcggtgggaggcccggctcctggccccgctagcggggccagagctctctcgggcaggggcgcgcggcggcggcgcggccgggacccgcggacgtgcgggcggccgcggccctggcagtcccagctgaagcctacttcttgtcgcccttctgcgcgtcgccctcgtccgccgcctctggggcccgctccagcttctgtttctccagctcctcctgctcgcatttgctgctggggaacttgtctttgttgttctcttttttccacttcatcctccg

SEQ ID NO: 473070 - DNA, 1000 bp, Homo Sapiens
tcacactttcttcctggctgggagctgtggaacaactagttccctatgcctggattccatcccatagttacaaccaaaggaactactaaagccacacctaatgaggaggtgaacaggggctgaggtctggagtgggtgtgaaagaggcagctggaagatgttctcttgtgtgaccagaggggaggagggcgtgtcttccaccagaggcattgtgcagtggctgctgagatggccagggcttgtttccatggctgtgagactggggaactgattctgtgggctgtggtgggtccctgctctgtgaagtgtccagccctcttcaggcaccgtgaccccactggctcctgtgaatgcagagcagattaagatttggctgtcataagaccctaagctgaagaagggcctcacaggcacagaaaaggctgaatggggaaatgtgtagatgtgtgatctgtccctcatgttgtagaaggagacgtctccagcttcatagtccaggaagatgcccacctggcaaaggggctcctccagagagagaatccacttaagggaggtcagggcccagtatttccttttatgcatctccaaggtccagaagccattctgaggaagtagtgggacctcccatttcctctcaacattgtctctacagatccccacagtccactcaatcacattttccacatctacctccaagtaatgtttccctgaggcgaagctctcctggcccaggacacaaagctgactgtcgaatctctctgggttgcccggaatgctctccctggaggggtccaatgtcacacttcttttgtcctctgacacgaagagatagggatgaccagtgtcttggtccaggacaacattggcagcatgtaagaatgttcttctccatcctgcaagggacagacagaggttgaatgtcatgagatgagaatcttttttttccttttggagattgttgatccagtagatgcatatggcaatgggtatcatcagaata

SEQ ID NO: 473071 - DNA, 1000 bp, Homo Sapiens
tttttttttttttttttttttttttttttttttttttttttttttttttttttttttttttttttttttttttttttttttttttatgaaaattagatagtttatttatagtttaatcacaagaacaactttcttgttcttcaagatgtaaatacatactagaataaactctgtagaatatacaaaaaatacatattttcccatgaaaaatttctttataataaatagaagggaacacgtgtgtggctgatccggataatgctccgtgtctgcttaggttttcagactgttgatttatttttaatctcttgaaagaatgggggagttccttctcccctaaaaggtcgaaataaataatacatgaggcaatcctccctcctgatttttcccttttcctccacatttttccttttgatagagagttcagcctaaatttccacgcttgcattcaatcattacaaagcctacaaattatacaatgacttctaacctgcccctctaacaaaacaagtttttttccccttataaatcataagagacagatggcaaaatggggaagaaaaaggaaagagaaggacaggacaataggcattgtgacgaatctgggaaacagaacaaagtgcacatcagagagggaagtttggtttgacaggtgaaattcccacagcctgcagacagcaatgggaataaagcagatgccagccattgcaaatctgtggataatattattaccagcaaaatcattcagatgctaagatacatttctttctactcgacattaacatctctatgtagaagcaaaggtgaagagatcacaggaaccagttgcattccccctgtgagattcacacgaactgcaccaagtccttcggcgttaaagagaaaggggaggagcgtcagtccgctctgcaaactctttagatatgccaccatcatctcttcccagggtctttttcgtctcaagaagcgcccccaaaacgccacccttggctttgacaat

SEQ ID NO: 473072 - DNA, 1000 bp, Homo Sapiens
tttttttttttttttttttttttttttttttgagggaaggaaacatattatttggaatcaaaggacaataatacgtcaagcaccaaatgctacaaagaaatcatgaaaataggccttaaacgagtcattcctagattaacctccccacatgtgaaaataagtcttggaagtagaaagggtgggtttggttctggtccctagagatgaaaacgtgcagtgactgcagttctgcacttctgggctggtgcgtcttttctgagtggctgttggtggctttgcacgtgaggtcacataactgcttatctcgtcaggaattttgcaagacccctggagagaaaaccagatggaccagtgggaaaggccgcccttgcaagttgctgcttcttttgttcttagtgaagatcagaaaggagcgtgaggctaggcgtggtggcccatgcctgtaatcccagcactgtgggaggctgaagcaggcacatcatttgaggtcaggggtttgagagcagcctggccaacatggtgaaaccctgtctctactaaaaatacaaaaattagttgggtgtggtggcgggcacctgtggtcccagctactggggaagctgaggcaagagaatcgcttgaaccagggaagcggaggctgcagtgagcagggatttcgccactgcactccagcctgggcaacagagcgagactccacctcaaaaaaacaaaaaacaaaaagcagcttgaaggttgtgctggaatcagatggaagggtgcctctttcgggcctgctactggtgccggaactcagagctccaagggtgtctgctcgtgtgcaggttcctacacgggagtccaggggaggatcgggctgtcttcatcacctcaggaactcaggtggctacttgtccccttcctcttcaggtttttaggtctctctccatctgctcgtggatccagtccaggaaggaggtgacacgggtgtacaccccaggcttgttcacctctgcgcagccga

SEQ ID NO: 473073 - DNA, 1000 bp, Homo Sapiens
tcaggatgggactggtctagtgtcctgccgatgtgtggtctgtggcctaagtggccgctgggaagagtctctctctcctcggcctccttggccggcatcgtctaggagttgctgggggcttgcagctgggcctgagcagttccgtgtggggcaaccaccaacgaccagaagctgcggctctcgggcaagagtcattgcgggtctggccgccgggccgccgcccacattgacgcgggtcctgatggtgctggggtcccactccaagtccccagagtgtgtccaggcagggactgcagcgagggcccccaccacgtggctccagcagccctgtcctcctgatcccatgcccagctcccccgccacaccctgcacagcagaggatgtaggagaggaaggggtgggctccagggcgaggacggcctccacagtgctgctggcggggccgagcgggagggcacgggcggggggcgcgggcagcgcagtgggggaggagctgccggagccggcgctggacgccaggctggacgccacgctggagctcacgctgggggccggcgggtggaccgctgcaaacacggccaggtggttctgttcaaagacataaacaccgtgagcgcgcaccccctgcttgctgtcttgctcgctgcccctagggccaccctcggccggcgagtctctccgcttggcatttcccggctggccgctgcccgtggaggaaggactcgtgaggtggaggtcgtgacagccccattcattcaccatccccaggctcttctcaacgtgtgcaaaggcacagaaggggccgcgcgggcagtacccggtttggcgcatgtcgttgcattttgtagatttgtagatagggaacacgcacacatgtggggccattcccgcagcatctgccctcccatcacaggcaaagtcatttccccgcttgatattttctggggcggggcccaggcgggagggtttatctccctcaggatttatggtgcggctgtgg

SEQ ID NO: 473074 - DNA, 1000 bp, Homo Sapiens; identical to SEQ ID NO: 342119

SEQ ID NO: 473075 - DNA, 1000 bp, Homo Sapiens; identical to SEQ ID NO: 160141

SEQ ID NO: 473076 - DNA, 1000 bp, Homo Sapiens; identical to SEQ ID NO: 342121

SEQ ID NO: 473077 - DNA, 1000 bp, Homo Sapiens; identical to SEQ ID NO: 342122

SEQ ID NO: 473078 - DNA, 1000 bp, Homo Sapiens; identical to SEQ ID NO: 342123

SEQ ID NO: 473079 - DNA, 1000 bp, Homo Sapiens; identical to SEQ ID NO: 160142

SEQ ID NO: 473080 - DNA, 1000 bp, Homo Sapiens; identical to SEQ ID NO: 160143

SEQ ID NO: 473081 - DNA, 1000 bp, Homo Sapiens; identical to SEQ ID NO: 342125

SEQ ID NO: 473082 - DNA, 1000 bp, Homo Sapiens; identical to SEQ ID NO: 342126

SEQ ID NO: 473083 - DNA, 1000 bp, Homo Sapiens; identical to SEQ ID NO: 342128

SEQ ID NO: 473084 - DNA, 1000 bp, Homo Sapiens
ttttttttttttttttttttggctttgcagggtgatgtttatttgccaggttcagtaggcacacagttaacccaccgaccttcacacaccagagcagacccacaggcatgcagggagaagggcaggaccaccacggagtgccgagcaagggcgaggaccaatgtggctgcctatccaggctgtggtagggtctgacaaagggcacctgtcaggagcctccctcaggaaactggggagtttaaccctacttcctcatcccagaaaaagcaactcaatgtggctctgaggcacctgggcctctgatagaagtgagctgtagaaagagggagttcctcttcatttcattgttgaactgagcagaaaatctgcccctgtaaagggcaaacctccaaatcagattatgagttattgccatgcagcaagccccctagggtggagaggacttgtgggctgagattgtaggaggtgggcatctaggaagagcaaggaggtatcagccctccctgtttggcccagggtaaggacccagtaaggctgggacactgggtgctgggcttgtactctgccctgccaggtctcattgccacgtcctaattgttcctcctttcccttagaggctcatgaggttcagggtacagggcagcccactgcaggactcggaaaggcaggaaataacacaaataacagggtcttaggaaggacaaaaatggaagcttctgccctcctactcattctctccactcctgaggacctccacagctagtgagcagtatccctagccatgtgccaagtctggacttaaacatactgccctacctttctgcatcctctataccagcctgtatctgctcctagagcagcccacacaccacaggcacacaccttcatgtgcaggagcctaagaccgctgacagggcctcgctggaggaccagctctcagggcaaggccgcccaagtttagggcctgggagagtgtgggacctgcagggcctgcctaggg

SEQ ID NO: 473085 - DNA, 1000 bp, Homo Sapiens; identical to SEQ ID NO: 160146

SEQ ID NO: 473086 - DNA, 1000 bp, Homo Sapiens
cactgcttaaatacctttatttttttttttaaattatttggacattgatagctctgcaaaatacttctcccatcccaaaccctcaaactccttccacatgtcctccataaagaaacaaaatatttatactttgtgcccattcaagtctaatttttaaaaacatttaagattcaaaatcaaatattatttttctttcccacaacttgttagtaattttaaaccacgatacaacacagttaatggcatttctttttaaaaattagcttatcagactattttatgagaaaaaaatcaattcaaggccttagtgagaatattatattctctgtttctgaaagcaaaagacattgaaaaacccctttgctcctctggagtttgtgatttccacataaccaacaaaaccagcacacagattgacttcctacttaacagtaggtattgttttgttactttgggacagcagctgaaacactatctaaacttgaaaagggtgggtgggtggaagtccagcacagaagagggtcgaggctgaggacagcagaatggaagctttctgagcagtggagtaagaacagccaaacccctaggatcctacctcatggcaggcttgtttgggatggaagacagaacatctgcaatctgcactaatttcttaaggatggatacaagtgtcaaccaaaaatattgcacatagtttcagaggcatgtaaaccactgagaaggttcaggaaagcgtaactacggatgaagatgattccccaaagttccttcaggaacggagagaaagaagttgatgttggtaattcaggagttactaagaggaggtggaaaaatccttaatcctttccctatcctcagtgggcagacttttaaatgaacaaatcttctcatagatgtgtctgaaggatctagtaaaggtatcacctcttcattcttcccagtacaatgggtgcacttcatcacctgggtaaaaaaggaaggaaggaagaaatcctgccat

SEQ ID NO: 473087 - DNA, 1000 bp, Homo Sapiens; identical to SEQ ID NO: 342136

SEQ ID NO: 473088 - DNA, 1000 bp, Homo Sapiens; identical to SEQ ID NO: 160147

SEQ ID NO: 473089 - DNA, 1000 bp, Homo Sapiens; identical to SEQ ID NO: 342139

SEQ ID NO: 473090 - DNA, 1000 bp, Homo Sapiens
tttttttttttttttcctaaattacagtattttatttaatatgccttttaaaaataaatgagccttagcttatcaggcacaagttttttttgttttgttttgttttatttattcacttacaggaaatataaacacaaattctaaaagtgtgaagttgcaaacgacaggcaagttcacatttcaattaatgtgaactgaacaagagtttaaggtgatttttaaataccttccacgttagaaaatccttctttcttaaataagttttcatataaagccaagtccttgcaacttaacgacggttttacagtcttaagtgattttagaaagtgctcttgtttcactgtagttgcgtctagtccattttcttgcagagccagcaaagcagcttctgtgcagaggtttctaagatcagctccagaaaaaaaacaggtttctgctgcgaggttttctaaggagacatcaggccctattggcatggtttttgtacagacttttaaaatagaaagcctgcccttgtgatctggaggtgggatatagatgatcttatctaatcttccaggtcgtaacaaagcagtatctaacacatcaggtctatttgttgctgcaataatcatgacacttcggttaaaaacttcttgaaactcctgttgacttgatttacttcctcttctctctattgtcttaagtccaacaccatctaattcattcaggagaacagaaagaactcgttcttgaacatcacatcctgtcttgctggctgagcgagctcccaagattgaatcaatttcatccaaaaacaaaattgctggagtgcttgctcttgcttgtcgaaatatctgagacaacactttttctgaatctccaacaaacggtgaaaacagatcagctccactcactgaaacgaaagagcagtgacagcttgtggccagggccctcaccagagtggttttagcacatccagggggcccatagaggagaactccctttggttgtgtcaggc

SEQ ID NO: 473091 - DNA, 1000 bp, Homo Sapiens; identical to SEQ ID NO: 160148

SEQ ID NO: 473092 - DNA, 1000 bp, Homo Sapiens; identical to SEQ ID NO: 342140

SEQ ID NO: 473093 - DNA, 1000 bp, Homo Sapiens; identical to SEQ ID NO: 342141

SEQ ID NO: 473094 - DNA, 1000 bp, Homo Sapiens; identical to SEQ ID NO: 342142

SEQ ID NO: 473095 - DNA, 1000 bp, Homo Sapiens; identical to SEQ ID NO: 160149

SEQ ID NO: 473096 - DNA, 1000 bp, Homo Sapiens; identical to SEQ ID NO: 160150

SEQ ID NO: 473097 - DNA, 1000 bp, Homo Sapiens; identical to SEQ ID NO: 160151

SEQ ID NO: 473098 - DNA, 1000 bp, Homo Sapiens
ttttttttttttttttgagacagggtcttgctggagacaggtcttattggccaggctggagtgcagtgggaagatctcagctcactgcaacctccacctcctggattcatgtgattctcctgcctcagcctcccgagtagctgggattaaaggcgtgcaccaccacgtctggctaatttttgtatttttggtagagatggggtttcaccatgttggccaagctggtcttgaactcctgacctcaggtgatctgcccgcctcggcctcccaaagtgctaggattataggcatgagccactgtgcctggtcaagatgcaattttaaagaaggaaaaatagaactaagaatatcatgccaaccagtgacattcttgactggagctgctgccaggattctgtgaacccctccaaaagctgtgactctatggggtcctggcagagagaaagagggaaccccgatttctacaaaagttcttcatcctcatccccatatctcaacccccacgtcagccctggagggtgagccaatgaccctgatttgcagatggggaagtcaaggccaggaaaggataggtctgagcgcaggaagcctcccagctcagagggtcctgggtccgggtcctctccccggtgccccttgggccaccccctaatccgccttcttggccttcttcttcctggagccctcgctcaactcctccttggacttggcgggcatggccgaatgctgagctcctggcccaccaccgctgtgggacccaccatggttgtcgtggtgatggtcacccccgcaggccgaaccaaacagcacggggcagatgtagccctccagggcatcaaagggggagctgtgtgagtgggtggctgtcagaaacaccttacaggacaccatgaacaaggtgaagatgaagatgaggctggctttggacactgggagccagcgggtctgctggagggtgaagaggatggctccatacaggctggccttggtggggaaagac

SEQ ID NO: 473099 - DNA, 1000 bp, Homo Sapiens
ttttttttttttttttttgcttgagagcatcatttatggcatggactgggaacgcaatgtgttcacacaaatgcacgacaattgtacatcagcatctttacaatattaaaggagccatatacaagtctacagccattgtacacaggatggtgatggctggggagccccgcccaccagtcctctgcagtttctccaccggagaacacttggggagctgtcacaaggccagggggggtccatctttgggcctgtcgtggggcaggcagcaggtctgcaaggactcctcagggccagtcctcactggaatcaggggtcaagagcgccaggtctgcctgtgtctgggtctcatcggcaggctagtgtaacaacgtgaattaaaactgtgcatattcgcatgagaaaactggagctggggatggctccctgagctggggacctagaagacgctgctgacagatgggccccttcatggtggggcccattcctgaggtaacgtgcagccctgaggctggtccgaacgggaggagacttctccagcagcccaggtgccagtccacacagacaggactggaagcccctgggcagcaggtcaggtgacccggggagtgcagcctgagcccccaacggcagcaaacgtgaaggtctcaggtggttacagaatcactcagccctcaggcccccaccactctcctcccagcagccctgcagcacacatccctgcatctgtcccgagagccccagccctgcaggcatctgggcctgaatgccaggcagctggtccaccctgcagccatgctgcacgtctgactgagaactgagcaccagataaagaagcattggtccttgtcagcctctctgacttttgcagttagggctgcatccattttaaatactgtagaaaaataagccatctctcggacgctaggagacccgccagagtctgccccgcgtggagagggataaacagctcctctgaagtagctgcagacggctcttccaa

SEQ ID NO: 473100 - DNA, 1000 bp, Homo Sapiens; identical to SEQ ID NO: 160152

SEQ ID NO: 473101 - DNA, 1000 bp, Homo Sapiens; identical to SEQ ID NO: 342147

SEQ ID NO: 473102 - DNA, 1000 bp, Homo Sapiens; identical to SEQ ID NO: 342148

SEQ ID NO: 473103 - DNA, 1000 bp, Homo Sapiens; identical to SEQ ID NO: 342149

SEQ ID NO: 473104 - DNA, 1000 bp, Homo Sapiens
gctcagtccttgtccctgtcctccaaatgtaagcaaggacagaaatcacagaactgtggagggtaaggggtgctgaaaggctggcttccttcccttacccctgaggcccagagctctagacacaggcaggcctccagccagtcccacagcccccaggccaggcctgtggacattctggccacaatcaactcaatggggttattcctttggcataagagaagccagttcctgatggaaagacaggatgttggaggcttgggggtcatcccaaagagttgggcactttggcctttggctcttcccgggggcttcgactcatgcgtggtccctacccccaccctccccacctgtctctgacaactgacttcctaaaactccacagttagggaattatttggcaacaaggaggctaaggctgttttgtggtggcgcagtctttaaaaagttaaaaagaaaataggagacctcggaaagaggcgttcatccaggacagggcacaaacgtcccactacttgtcagcgccagggttggcggccactatctcctcgtactttgggggtgggtcactgtaagacacgctggcctcctcactgctgctctcttggggcgcagtcacctcctcgtaggaggggggagggggggtgctggacagtctggagagagagagctcagggaggtagagggtgctctctagccggactgtggtcctgcccccccgactgggccccagcaccacctgggggctgctcgctgcctctcggtgcccagaaggctccccttggctatgcacagtaccccggtacaccatgacccgggggagggtgtgcccggcgcgactggctaggtaccggttctgagcataggaggggtggtgacgggtcgctttctgcagctggcacctccagatgatgaacaaggcgatgacaatcagcagtgccacccccagaaggggtaccaccacatacatggcatctgagctctgcgaggggtctcggacaga

SEQ ID NO: 473105 - DNA, 1000 bp, Homo Sapiens; identical to SEQ ID NO: 160154

SEQ ID NO: 473106 - DNA, 1000 bp, Homo Sapiens; identical to SEQ ID NO: 342151

SEQ ID NO: 473107 - DNA, 1000 bp, Homo Sapiens; identical to SEQ ID NO: 342152

SEQ ID NO: 473108 - DNA, 1000 bp, Homo Sapiens; identical to SEQ ID NO: 342153

SEQ ID NO: 473109 - DNA, 1000 bp, Homo Sapiens; identical to SEQ ID NO: 342154

SEQ ID NO: 473110 - DNA, 1000 bp, Homo Sapiens
ttttttttttttttttttttaaatgcagaaacatttattgaaagacatttcgaagccatcgtgtttgtatttcatgttcatgacaataaaacttgtaaacttcagtaacagttaaaccttctttaattatggattagccattaacatttttgaaacgtggaccatttaacctcggcctaccccctccaactgtcctggtgatgagttcattagctaagttaaaattaatttgaactttgatctaaaccaaaacaaatcaggaaaataaagctgtaaaggaactttatcaagcattccaaaaccaactagaaattacttgaagttttcgagtgagcattgcctgtgccagtattcttcattataggattataaactcgtttttttcccaaagcacatgtctacgccaggcagaggagtaattattcagccaatttcatggatgtaaacgatggatataaataattgatagcacctagaggcttccagtttgggtggaaggctaaaagtagaggggaactcactcacttgagaaatgatatttaagtgaataaatagttctcttctatgaaactattactatttagttctctggaaaacttaagtgtattaatgattagaacatcaaatcctaagtaaagaaatgacattttaaatataaaaagccaaactttaaataaatcatagagacctcagacataatataggaaagaattcttttgtccttgtttacactgtgtacatagtacaaatataattttaaagctacatcctataacatttaagaaataacagtagtttcaaaatgcttaagatgaggagaaaaatgccttagaagactaggtttctaaaagtcagaaataaaagtacaagttatttttcttgtatccagcaactttataaagcaacttgagtcctgaagaaaagactgttgttcttttaagaaatgggtcttctcgaattataaactttaacaccattttgcatcgaagaacgagaatat

SEQ ID NO: 473111 - DNA, 1000 bp, Homo Sapiens; identical to SEQ ID NO: 342155

SEQ ID NO: 473112 - DNA, 1000 bp, Homo Sapiens
tttttttttttttttttttttttttttttttttttttttttttggaaaacgatccaccaacctttttatgggaagaaggtcttctctaacactttaacttaagggaagaagtgatggagaggaagaaggaaagtacactggccaatactctgaaactgactgacttgggtatctgtggtccaaagaggatcccgaaagacagtgactctgtctcaatgattattcccatcccaattaaaagtcataatgacagcatttacattcacacagggtctctttccaagaagtttgtgagtcacctacatgtcttcaattctcaaggcaacagtgggggcaacaaggaggttgacagccaggtcctgtgagagctgtttgtcaaagcccactctcagtgagtcagtccctggaagttgggttcagtgcacggaggcagggccactgactggcttagcaacatgtccatcatgctgattttagcatcttgcttctcaatgtcctcatacggagtccaggacaagtcatgctgtagtttgtaggcaccaaggaagtcatgtggacaacttgtcccccattcctttggagaaatgatggaaaaatactgctgaccactctcccgtttatagagatagtaaatgttgccaggttttttcactatattacaagctacatggtgcaggttggcatctctgtgagcatcttccagtaccttcctggcttgttcttgcaaatgttggatttgctcagctatgactgtcagcttgttggtggcatttgctcggatgaattcatcagccttctgcacctgctctgcgagcgccacgaggtctaaggggtccccggcccggtgggtgtggtaggggctcaccagggccaggccgccgggggtcggggtgagctccaccagggctcctccctggcctgcagctggcggcgctccttgcctttcaaggaccccctcggtccgccccggcgcggcggcgtcctccatgacagcgcctta

SEQ ID NO: 473113 - DNA, 1000 bp, Homo Sapiens; identical to SEQ ID NO: 160157

SEQ ID NO: 473114 - DNA, 1000 bp, Homo Sapiens; identical to SEQ ID NO: 160158

SEQ ID NO: 473115 - DNA, 1000 bp, Homo Sapiens; identical to SEQ ID NO: 160159

SEQ ID NO: 473116 - DNA, 1000 bp, Homo Sapiens; identical to SEQ ID NO: 342159

SEQ ID NO: 473117 - DNA, 1000 bp, Homo Sapiens
ttttttttttttttttttcctttttagaaatgaggtttattttcaaggctactcagtcctaaaagcctgcatatttactttttttccttcctccaggtttacctccaagtcaggatttcaaaaaccaccaacattcaggctcattcttattggtataaacaaacaaacaaaaaaaccagacaacaaaaaactcaacaagcaaatcacacagttgtgggattcagcgccaaccccgggcgtttcattttggcaacaaaaccaggattccctttcaaagaagcttctggaaaatgctgtatttcctagatgaaggcccctggtttttcaacctcaaaatcacctactcaaaaagcagactcagaaacccaaggttttagaacatggtcccaatgtaccacatcataaaatcactctcattcctgcaactgtacaatgaatggctcccaaagtcattttatttaacaaaggggtcaaggcagaggaaagtttcccttaatatccccacaactgctccacatgtcttctgtggaaacacttcaccaggaactagctcaacactcttgctaacaatttagtgtctatacaggaaggctggtgtctctgttacaggtggcccgttccttaaagcctttagggttaatcgcagctgcactgagtggccaagcagaccctgttgggatgtgaaagcagtttgttaacagggcccctggccgggcccagaggctgtcagactcagcaagtaacactgaatgtccaaaaatacggctgtgttaaactaacaagccaatccttctgctcagatctctggatagaaatgatttttcttttatctatggggaatgcaatttcatcacagccccttacataaacgctcctgaaaccctttcagtagacagcatttcaattcagagaccaaagtgaaactatctttgaaaacagggacgtggctgggaaaccatgcacacctcggcgaacacttttccacccaccacgagcttgg

SEQ ID NO: 473118 - DNA, 1000 bp, Homo Sapiens; identical to SEQ ID NO: 342161

SEQ ID NO: 473119 - DNA, 1000 bp, Homo Sapiens
ttttttttttttttttttttttttttttttttttttatttttttttttgcaggaccacaaaatggaactttattcagtcacagacactgaccctccaatagccccagaagcaagagcctagggcccagcgatccatacccagtccttggagttgggcagggtaggacgctggccaagggccagtgctgtctcttgcttacagcctgaggactacgggagcagcagctgtggcctggccgctcccaatgctgggggcttggcttggtgccccatccccttcctgactgagctctatgaaggactcttaaaaaaataaaataaaatgcaagcaaagtgctttgaaagaagggaggacaccctattcctgctaaggggtagaggaagaaggtgaaggcggctaggtgcccataagagaaggctggcacaatcttcattcccgccagtgtgatttcagtctcaaaagatgagtatttggctgagaaatggaaggatactccaggctccctacggagttgtgctggggccatgctgagctgcccttgcaggcagccctgggtgctgggggcagacatgcaggacactgggaagagtcagaaccacaggtgggagggaatctcagagcccaggctccccactgagcttggccagcagctttgaactccttcagaggaccctaaaagtgaaggaagatgacatcctcatttctacctgagttgtgctcgcacgggagggacatctgtactcctgtggatgagaaggggaggccgcatacttgcctcctgtgtcctatggaggagatttccatcacatcctttccacccctccctccccggcccttgggcccagctctggccaggaaaagtggggaggccataaaggagaaagaccatgcctttcattttcttcctatgtccttatcgtccatacatcccaaatactaggaagctgaagaagacggtgactcccaccagggagacagtggcaggtgctgtgaagaatt

SEQ ID NO: 473120 - DNA, 1000 bp, Homo Sapiens; identical to SEQ ID NO: 342162

SEQ ID NO: 473121 - DNA, 632 bp, Homo Sapiens; identical to SEQ ID NO: 160161

SEQ ID NO: 473122 - DNA, 1000 bp, Homo Sapiens; identical to SEQ ID NO: 160162

SEQ ID NO: 473123 - DNA, 1000 bp, Homo Sapiens; identical to SEQ ID NO: 342167

SEQ ID NO: 473124 - DNA, 1000 bp, Homo Sapiens; identical to SEQ ID NO: 160163

SEQ ID NO: 473125 - DNA, 1000 bp, Homo Sapiens
ctagccaatcaacactttatttttcaagtcaacacctgcacagatgttagtgtccacttcctaaccctagtagggggtcccactacacttggatcacccagaggagcagtaaggaagctcctaatctcaagagagagcacatgctcaccaactccagtgctggcgccatgtactgcgggatccctgctctcctgcatcatgaaaggccgggctgaatggggcaaggatgcagtgaaggttacacagactacagtgacctaagagtgtaactactggcctgacccactgccccaggtttactctttacttcccagaccaggagcctccctaaagcttggccagtgcccacgggataggaggagctggcaaaggatggggttgagctgctaaggacaggacacagcagggaaataaagcagaaaggaacacaagacaagagaaaaattataaagtgcctcaactaaacaaccaagtgggacatgagggcagagcagcacaggtccctgaggataggaggaaaaagaaagggccagaccaccagggcttggggcatagtggaatgagaatagagatgaggcagggaggcaagcgcaggctgtgggaaggacttccctagccctgttcacatccactaacccaaatggaaaattatttacaaatttaaaaccaatcctaggcacaggtactgcaccatgcccaggacagcaggcaggcaggcaggcagagggtggaatagctaccatccgacagccagcttccccacacactgccccaccccagagtggtaggcaaaggaggaaacagcaacactcctagccaagaagccctactgtgcctgcagctccttcctcaacggctggctcatggctctgccacggcctgagcttcttggtctgactgtaccagagaatggatgtcgggccccaggggtggagcatcagggggttttggcggtgtctctggctccaagcccagctctgcattcagctgctccagctcc

SEQ ID NO: 473126 - DNA, 1000 bp, Homo Sapiens; identical to SEQ ID NO: 160164

SEQ ID NO: 473127 - DNA, 1000 bp, Homo Sapiens; identical to SEQ ID NO: 342173

SEQ ID NO: 473128 - DNA, 794 bp, Homo Sapiens; identical to SEQ ID NO: 160166

SEQ ID NO: 473129 - DNA, 1000 bp, Homo Sapiens; identical to SEQ ID NO: 160167

SEQ ID NO: 473130 - DNA, 1000 bp, Homo Sapiens; identical to SEQ ID NO: 342178

SEQ ID NO: 473131 - DNA, 1000 bp, Homo Sapiens; identical to SEQ ID NO: 342179

SEQ ID NO: 473132 - DNA, 1000 bp, Homo Sapiens; identical to SEQ ID NO: 342181

SEQ ID NO: 473133 - DNA, 1000 bp, Homo Sapiens; identical to SEQ ID NO: 342182

SEQ ID NO: 473134 - DNA, 1000 bp, Homo Sapiens
ttttttttttttttttttttttttttttttttgagatggagtttcactcttgtcatccaggctggagtgcaatggcacgatctcggctcactgcaacctccgcctcccaggctcaagcgaattctcctacctcagcctccccagcagctaggatcacaggcatgcaccaccaaacccaacacatctctgcattctcagcagagatgaggcttcaccacgctggccaggccggtctcaaacccccgacctcaggcgatccacccacctcagcctcccaaagtgctgggaccacaggcatgagccaccgtgaccagcctattattattttcaagacagggtctcactccgttgcccagcctggagtgcagtggcgcgatcatagctcaccgcagcctcaatctcccgggctgaagcgatccttccgtctcagcctccccaacagctgggagtatagcggtgcaacaccacacccagctttgctatttatttaaatgtcattctccaacacatatggggaatgacatatgcttcccattattacatagcaaaacatactccatatccagaaaaaatatttatatgacatatggcctagtattctaaatcaaggcaggatcttccaacaagagcaggagagagaagaaaacatttacattctataacatgattataagaattgagatagatgaaatgaaaaacaacatctttgaacaattacagttgacagaacagctttcccttattctacttgctttaaataactcatatctgtaaacttgaacaccaactctggctgatttaacagtcttaatcccttgattttccatactgaacatcacccaatatatagtgaagatcaaaggcgacttcttccaccaagctctgtgtccagctgtgtttctgaggtcatacgtgtcccctcacggacaccagatcagatacttcggtagtcagagccgcgggctacaaaggcggcagcttcccattccacagtgaagaa

SEQ ID NO: 473135 - DNA, 1000 bp, Homo Sapiens; identical to SEQ ID NO: 160168

SEQ ID NO: 473136 - DNA, 921 bp, Homo Sapiens; identical to SEQ ID NO: 342184

SEQ ID NO: 473137 - DNA, 1000 bp, Homo Sapiens
ttttttttttttttttttttttttttttttttttttttttttgtataaattattttatttattattgtaattagatcttcacaaagttgtcttttcactgtgttttgtcaacgtgaaattaaattgtagttataagcaaaagttggttgcctagggaacaattgtatattcagtttaacagaaataaaagaatatttgtcttaagatgcaagatttgtttttacatagccttttgccatacaattataaaaatttcatttcaaaagtgaaatttttttgtgctgttttagctttaagggttggaatgtttaggtgcaacatcagctccttaaagaaaaagcaaagtgatctaggatatgtctcccttgcaagagggaattaacatttacaattaacatgaaaatcatgtatcagacttctgcaggagattcttcagcataccttatccaaaaattactcactgtcctaatgtatcattttgaagagtcctggtaagtacttctccttggcagcctcaccttcccacatcatggaagtacaggtttgcacatatacacaacatgatgatagaaaatatgatatagtaaattagctttctaaatttcggttctaagtctccttgtcgataccagtagataagtatgcaggcagtaatactactcaaagagatgcagacagcaaagaatatattcaacggttttggaggtagttgagggaaaacaaaagcacttatcagcgttactagaatcaataaggatgttaagctgccaacaactaaattgatgattcgatccttggcggacgtctccccaaacagaggtctgttgtccaggccactggtgccgtaggtcctggtagcaaagtcctccattttggggtttcttcactttccccaagccacttaaaagcaagacagcatgacctcccgaggtctcaggtccacgactgcaagcctcctcctcacggctcccgcatagccgaacccgagtggtcggggaag

SEQ ID NO: 473138 - DNA, 906 bp, Homo Sapiens
ttttttttttttttttttttcattttggaaaatatttatgaataaatagttttatatgacggctggcagcagcggcctctcctgtaccccctcaggagtcagtgagtaaggtgagggtcctgctggcgggggcgccgggccagctgggggttgaattgggagttgtaccgccgccgccggtcatccgtctcgtcttcttccggctgaccctcctgtagtgcccggccttggacccgggccagcagggcctctgcccgagacctctcagctgcttccctccgcagacgttcagctcgaagctggtccagggatggaggctccttgggtcgctgcttctcagacccctccttttcctttctgctgcgactgccttcatcaccgccgtgctgtctcttcttccccagatgcttctgcatctcccgcagagggtccagacggctcttgatcttctcatctggggctgggccgggcggggggccccctcgccctgggggtagctggtaccaagggggttgagtctgtgcctccgctgcactctggcccaggtatgtcaggatgcccagagctttctcttgcctctctttctcctgtcgcttttcttcctcgtactctttattgcctctgatcactcctttcccttcctccagcagctcccgaaacaggtccacagggccagaacctggggctcccgcctctgctgcttcaagctcaggcagtgagttctgatgtctggctttcttccgtaggaattctgtacgggcctcttgctgagccagcagcaccctccgctcacgctccttctcctcctcccgggcctgggcctcgtcacgccgcacgcgggcgacattgtccttgttccggacgtgccagctcttcttgggcaagatattcatggcgtcgtagctg

SEQ ID NO: 473139 - DNA, 1000 bp, Homo Sapiens; identical to SEQ ID NO: 160169

SEQ ID NO: 473140 - DNA, 1000 bp, Homo Sapiens
tttttttttttttttttttgagcacaaaggtccactttacttacatgaaggaacataaaggcatgagaaacagtcatctcaataaatgcaagacatgagcataaaagaggttctcggcctttccagcgttgttattacagagagaaacctacaattattttgttaaacaaaattcaaggctccaggactcatctctggagctgatatgtcttaaatactattatagtaggaaagggagaggagaaaattccccacccactcccccgatttggcccgtgtagcttccctttgagggtgtgtgacttgccatctgcaaaagtcatggccaaaacaggaactaacaggccaaactaccatcaatctagtcttctacagcaccctaacagagtgccagggtcctctgtcccctccgcacctgagggcaaagttccaggaagtttactgccggtgttaggaggtgagctcaagttcagtgtctctgcctctggctccacagaaaccagcccctatcacgtggcttctggaaaatgtgccctcctcaggattggtccagggagtagtcacaggtagagaaagtaaagggagcagcaattgaaactcgcccttgaccctgtgtccagtaaggaggtgaagtctgtctggctcactctctccattccctgccatgcccacctccctgctggccctgccattgcttcaaggagggctgttcctcctgggtgagatttttcactcttgaactagagtgcctttgtatgtggtcagggggagggtggaggaccctgggatctcccaggccttacaaaagtggcggcacataaatacaaacctaaaaaacagccatttcctgccagcaggtatcaactggccccacagcttcagctatggccaaagaggccagcgtggcaaggtcctgtctcagatctggctgatggcagggagccaagaggtgctagcaccctcctcagcccttcactttgatgaccgtccttcctcgtga

SEQ ID NO: 473141 - DNA, 1000 bp, Homo Sapiens
ttttttttttttttttttttggaaatgaacgtaaatttattgaaactggttttggggcaggggatgggtggacagctgggggttttccaaagagaactgagggaggagccagcgcccggccaggtgggagcgggtgcctggccacagaccctatctcaggcccagcttcttcttttccttctgcttcttgcggaccacgtccagattccggtccttccacatgctcttgcgaagcttgatggggcgcgagcccacatacttcccattcatctcacgcatggcgcgcacgtagtcgctggggtccttgaagctgacgaagccgtagcccttggtcttgcctgtgcgcttgtcacggatcaccttggccttaaggaaggatgggaagcggctgaaggcgcgtgccaagatgtcatcgttcacctcattgcccagatccccacagaagatccggaagtcatctgcatcccactccagcaggctggggtcctcccagctgctccctgccgctgtgcgaatgcaccgtttcaatttctctggcttccccttcttcttgtcttcacccaggggctctgggacctcaagagccatgaggcctgggggtggctctggccgagggggccggggccgaggacgcagggacaggagttcaggaatgcgcagcgggggcaggaggccgcggacgacctccaacgggaggggcaggggctcaggctcgggcaatggcatggccagggccagcggcaggctgggcccaatgactgcagggccagctggggcacctcctgcccccacggccacagccgcgctagcctcctccagcccagccgccgccgccaccactgcctcttccttctctttcaggcccaaccccaggcctaggcccagctctcggggtgctgctggctcttccagagggggcctcagtgcagccatggagcccagcgggggccctggagcccgagccattggtggcagcatcatgggtggtccagggggccca

SEQ ID NO: 473142 - DNA, 1000 bp, Homo Sapiens; identical to SEQ ID NO: 160170

SEQ ID NO: 473143 - DNA, 1000 bp, Homo Sapiens
gcctctacagaatcatttattatgggtcttcccagaagaaataaaatggaaatggggagaaagaaaacaaagggagctctcttctcctccaggaaagaaacaaattctgaaccatccatacttggctcaggaccctaaaatttgcaaatccggacaggatgggccctgctcagaggtggccagcttcctggagcccaggcccgcttgaagtcactggggctgtgggagacacagtttccctccctgaagccaagggtggcaaatgaccttgaccctggccaggtgaggccaggacctcacggcctcctttgtgttgtccatggaagaccaacttccgggcaactgaagggaggtttgtagggtccactaggaccccctggagcatcttggaggaggtctgcggacatgggggctgggtggcaaaggaaacacagacctcaaagtggcctacaactccctccagggtgggtcccctcgagggatattcccaggccccttggaagggtaaggcaggggggctttgcctcccagctttgtcttccggtagttaaggcgcttgaaagcttccaggtcccggtgggtgcccatgatcagccggctcggctgggccttggccactgcaacagggtctccattggcatgtgagctggggcccggccagcaagggcccggcttgttccccgaaggaaagagctgctcaggtggggcttcgaagtcagaggcgtccagggcatcctgtatctggctgtccagcaggaagtcgagttccacagctaaagagtctgcccaggtgccctggtctgcagaatgaggcaggtggtctcgctgccctgccagctctgaggtggtgtctggaatgccctgctgagccccgggctcctggagagggtcgtctgctatttctctgtgttccagcacaacagaggcttgcggggacacacggaacccctcgaggtctcgttcgaggttctggccacctaactcggcttcctcttgagca

SEQ ID NO: 473144 - DNA, 1000 bp, Homo Sapiens; identical to SEQ ID NO: 342185

SEQ ID NO: 473145 - DNA, 1000 bp, Homo Sapiens; identical to SEQ ID NO: 342186

SEQ ID NO: 473146 - DNA, 1000 bp, Homo Sapiens; identical to SEQ ID NO: 342187

SEQ ID NO: 473147 - DNA, 1000 bp, Homo Sapiens
aagtgtgtatgaataacagcaagggaagagcattcttacataggaggtatgcatcttcccctgagccttgagaacctgtctcaacacgggggcggggagggggcagctgttggttctttctaaccctctccaggtcagggaacaaatttgcccctaaacttccacaggaggcactctaccctctgggccagagctgggcacagtggcaaagtcagattagaatttctagagttctaacagcgattcccaaccatttcctcaacttttcttctgtttcccacatcccaaggcagggaaatccctgctgcctctcctcatcttctaactcagctgtaaggcggtttaggagccgctggcagaatcaatggcatcgaccaagggagggggggtggcaagggattttcctgtgcttaactactgatcacggctaagtggaaatcctataaacacgagcggaaatcaatggaggctgcttagcggccaggggagaggggcggcccacagattgcatctgacggatgagcgagaggaagcagccagggagggctcaaggaagagtagcttagaggagggggaagaaacaggcagcgctggagagagaggagtcactgtcagaagggacactgaggggagaggcacagtgggcccaggagtggactccgttagacccagagttcccttccccttctaggaagtgacacccctagcccaggcagtggtcaggatcttcagtctcctgtggcctctctctggagctgttcacttctagcaggcgctgatagtcttgaggccggaaacgctgtagatacacaatcagcttggctggtgctgtctcctgtgcaggcacaccaagcatgctgctgagcctgtggatcttctctagggcagttggtacttcagcctcctcatgcaccagggcctctacctcacccacagcgtagccaaagtcggctgtatccaagtccaccctgagctgtggctcctcttcatcagctcccaa

SEQ ID NO: 473148 - DNA, 1000 bp, Homo Sapiens; identical to SEQ ID NO: 160171

SEQ ID NO: 473149 - DNA, 1000 bp, Homo Sapiens; identical to SEQ ID NO: 342189

SEQ ID NO: 473150 - DNA, 1000 bp, Homo Sapiens; identical to SEQ ID NO: 342190

SEQ ID NO: 473151 - DNA, 1000 bp, Homo Sapiens; identical to SEQ ID NO: 342191

SEQ ID NO: 473152 - DNA, 1000 bp, Homo Sapiens; identical to SEQ ID NO: 160172

SEQ ID NO: 473153 - DNA, 1000 bp, Homo Sapiens; identical to SEQ ID NO: 160173

SEQ ID NO: 473154 - DNA, 1000 bp, Homo Sapiens; identical to SEQ ID NO: 342193

SEQ ID NO: 473155 - DNA, 1000 bp, Homo Sapiens
ttttttttttttttttttttttttttttttttttttttttttaaaaaagcctgaaactttattgtaaaaaaaaaaaaaaagaaaatgaaaaacactctaaaaccctgagctggctgggggtgtcgtcagagatcagaaggacagggagaaggctcggtaacccaggttggtgaagacatccacccggcagctgttgcctgcagctgtcaggaccttgcactcaggcgcggcaggctgctggttgaggctgaggctgagcagccctggggaggagccaggcacctgggccttcagctccccgctcagctgccactggttgacgcagcggccctggccagctgacagaatcaggtcctggtagaaggtgacgtgcttctgtggcgcccggatggggaagatggtggtgggtgtggaggatcggaggtgccagagggtgagggctgggccccctccacagaccatccagtcggaatcagttgccaaacatccaatccagcgcccattgtggggcctcgagcactcctcgtgcttatagacctcgatcgtctggacctccttggctgtgcgcaggtcccaaagtcgaacagctccatcctcgccacctgacagcacctctgggctcctttcccgcagtgccaggcagtggatgtagtctgtgtggccccggaggaccctcgtgaaagtcccagtttcaaggtccatagtgtgcaactgacagtctcccccagccaggatgagggaattctccttggggaccagcagcaaagcgttgatctcaggcacttccaggctggtcctgtatggaggctgacgacgccacagctccttacagcccttcttgagcatctccgcccaaagccaggccttcacctccccatccccagcactaagcagatgtcgatcggtggaaaccatgctatagacgggcccatcatgggcttggaaagtcaccaccggcttcttactttcctctttggcttctgagctcaaagcagaggac

SEQ ID NO: 473156 - DNA, 1000 bp, Homo Sapiens; identical to SEQ ID NO: 342194

SEQ ID NO: 473157 - DNA, 1000 bp, Homo Sapiens
gcggccgcgcccccaccggacccgcgacagaaactgcccccttcctgggccactttctgacctggacacagacgatgtcctccgagggagggagcccacccccgttacacctcagagccacgaagccggcgcccgctccctgccgcagcttccccggatccctgcgctgccctcgggaaagcagcgactcaaccagacccagccccccgcgcggcaggggccctcctggccaccgcaccctactttttctagccggcgcccccaaagcagtggcttctcataggaaaggatgggaggggggcgcagctgaggtgactcttgatgacaagtcactgcagctggcctgctgtgaagttttgtgtgtgtgtgtgtgtgtgtgtgtgtgtgtgcgtgtccagaatgcctggtggcctgcgggggtctttaccaaggggatgctggcttgacccaggcctcctttccctaagagcagcaggagctgagtgaggcacagggatgcccccatccccttctggccagcgagctgctcctatgatgtcaccctctgtccaccgtgacaaagacagacacatcctgcagaagaatctgggtcgcagcaggtgccctgcctccagcaggaagcaaaaccaaggcggtggaggcaggagagcacggagacagacgccccgaagctctctccctgttcctccccaaacgctaggcgatgggaaagacggggacaatgcagagtaaatgtgtgccgtgacacccagtatgcgacacaagccaagaattctaagtggattcacgagccacgccacccagccttgggtcttccctcttcagccgtcagagccaggatcagtctctggctttgcaccaagggctgctgtcccctcacacggtgtctgcgctctcgctgggcaggggtggctgccccacgtccccattctggacaagccaacgccctcccacccagtgctgagagctgcatgcgagtcccatgagcaccctctgtgca

SEQ ID NO: 473158 - DNA, 1000 bp, Homo Sapiens; identical to SEQ ID NO: 342195

SEQ ID NO: 473159 - DNA, 787 bp, Homo Sapiens; identical to SEQ ID NO: 160174

SEQ ID NO: 473160 - DNA, 1000 bp, Homo Sapiens; identical to SEQ ID NO: 342197

SEQ ID NO: 473161 - DNA, 1000 bp, Homo Sapiens
tttttttttttttttcatcagcatctttcttttatttattgtactggaggagcaggaaattacacaagcctattaaaggctaagcaaattccaagtaaattgcataaatgggatttttttaaaggacacaaaataactctaaaacaatctatccatttcagaacatcatcagatacctggggactgcgcatgaagagatgtgctcagcagcatcttatacaaattatccagactcaagccttttcctctcctatccagcctcatctcctggacccacaaaccaaaagagagtgcctgggaatgagagagcaaaagagagacagacagacagggagggctttgatggaaaccaagacatcaggaggtctctgcctctgattcagggttatttgaatcaagggaactcatttggcctcaagcacttaatcattttattcctctttctggttttattttgagacattaagaggaaagaagcattatggggattgaagagggctttttctctttctagctgctgcttctggagtcccttacccaatgcccagtgcgtatgttgggccagatggcttggactcttggcagccaattcagctgctcaagaacatggttgtgcttaacttcatcagcttgactctgcttcagttcaccatggagtagaagcatgatacccatcagtttaattagtttaatgagggctgagggaactggtccacattttgagtttgttgcacagaacaaattggtttgcctttctccctccttgatcatttaagcattcaagaggctgctctcaatcatttccgaaagaggttttcactcccttctgtaaggagttaggcactgtccagggtaccaacatgactgggagttcaggaagtcagttcttcaagaggtgcttttctgaacaatgaggactcagagtacactgactaaacattaaacccactagaagactggaccctctactgtaagggttcctgatccaatataaggcaat

SEQ ID NO: 473162 - DNA, 1000 bp, Homo Sapiens
ttttttttttttttttttttttttttttttttttttttttttgacatttagaatgctttaatattcccagttaacaccatttgtatcagtaactgcaatgttgtaagttttagcatctcacataactagtcagtaaggattttttttttaagtgtaggagtgagaatacaaggacaggagctatgagaatgttaagttttatacttctgttaaaaactcaaaaatcaaaactattttcttctctgcatcaaaaccacagacttgaaggatgttttggctttaatcccatgactcatcatctactggattgggagcttgtgaagaagaaaacccagctgtgttcaaagtgctcttgccctttctggtatcaactgatgcaaacacgtttcctcttgtactaccactgaagccaggaatgtatgtactaaaggcaatttcttccaaccatgcaggaacatcctgttgagcatctgtcaatacttttactagaggctgtgctaaatggttatccgattcaagatcaaaaaaggaaattgctctgccagtattcccacaacgaccagtacgcccaattcgatgaacatattcatcaatggtagaaggaagatcaaaattgataacatgttgcacattttcaatatccagccctctggcagctactgaagtagcaacaagaactgggcactttccaaagcgaaaatctccaagagcttgctcccgctctctctgttcccgatcaccatgaatacttgtagttgatattttttcttgacaaagaaaagttgcaataaaatctgcttttttcttagtttcaacaaagaccatagttctttcatcccctatgtttcgcagaatttcaacgagcttttctctttttgagaactggccaacttggagaacggtctgctgaacatctctacatgctccacccacttgtccaacagcaacaaacagataatttgactttaaaaactctgcagccaacctttgaatttcctct

SEQ ID NO: 473163 - DNA, 1000 bp, Homo Sapiens; identical to SEQ ID NO: 160177

SEQ ID NO: 473164 - DNA, 1000 bp, Homo Sapiens
tttttttttttttttttgagacggagtttcgctcttgttgcccaggctggagtgcagtggcaatctcggctcactgcaacctccgcctcctggattcaagcgattctcctgcctcagcctcctgagtagctgggattacagtcattcgccaccatgtccggctaatttcttatatttttagtagagtgggggtttctcatatacattctagtccctaattctgactgcccattttcttaaagtaactgtaaatttaggctgagtcttaagttctaatacagatggtaattcaatttctggcatattcaaggtgctagtctctgtatatcagagttgcagcctaatgcatcagggctagttgtccaaatgcttggagatggcaggtggcaaccacagataaggcaggcctatgtcaaactcaagagtgaatgtttttgctaaagtatttatatttttaaaatgttagtagtaaaccatgttgagcaaacgaaacatatttgtgagcataagtcaacccatggacctcagggctgcaattctttcatggaaatcttctcatgtaatcttcataaaatctctgcccctcaatttgctatgagcttgttctggtccttatctttccaagaaccttagaagttggagtgacctaacaacaaatccacatgggcagaggtccagggactgagctctgaaggatcctgaaagaaaacaatgctgggagcactgctctgaggagtacaaaagtgtaaaagagaaatgaacttaatcacaaaactgaagattgcactgaagaatacttaaaagtcctttttaaaccactcaggtggagagaatgcaattatctggcaccaactatgttctaagaacataattctccccaagattttgaagaacatatttaattcgtacatctacaatgcaaattcatctttcattggcctctataatacccagctttcccaaatgctcttccacagcacaaaaagtaacatcagtttgc

SEQ ID NO: 473165 - DNA, 1000 bp, Homo Sapiens; identical to SEQ ID NO: 342199

SEQ ID NO: 473166 - DNA, 1000 bp, Homo Sapiens; identical to SEQ ID NO: 342200

SEQ ID NO: 473167 - DNA, 1000 bp, Homo Sapiens
cttttgaatagactttaattgagagcaaagtgaaaaatgcaggttacaattttaagtgttatcatcaatatcttgtaagatcaacacccagtgatgcatctagtacttatacagtcctaattttagttgtcaaagagcaaatcattatcagacatatatttacacagtaatttcaagcaacggtaaataataaattccctcccttaaaaaacaaaacacaacacaacacacacacacacacacacacacacacacacacgaccatctttaaacaatggatttcctcacccagtaagtctcatttttttcacatatacttgtagacccaaaggtccttaagttacttaaaaacagtcttatcagtggagatcctggaccatcccctattttcttttaaagtcactttcatttttacaacttgaagccatataccagcatggtttttatacactaaggacactcccagtgatgaaaatgaattcccctccatttgtgcaaggaggtatgtacatctataaagacacatatgattaccactcaaaagagtcaaaaacatacacaaaaaaatctcagatcttcatagtttcttaagagcagtgtgccagtgttcacattgaattaactgaatggtaaaattcttttagatttctatacagaggtactggttagttctgattttttcttcagctgcttgaaatgcatgagctttaaaagttgcctggcagaactacatcctgctttccaggttagcagcctggctgacctcgggaatgttagacaagattcacccccgatgccttgctctctgatttatttcttgctgttgctgttagtaaatggaaaccatgacaaagtttacattagcagacacatacacatgccctggcctataaatattccatgatagaaaatggtacaataattccatccccagcgaaaacgagcataaaaaaagaagggaagggtcagggggacatgatcagctatggctcttcttaca

SEQ ID NO: 473168 - DNA, 1000 bp, Homo Sapiens; identical to SEQ ID NO: 342201

SEQ ID NO: 473169 - DNA, 1000 bp, Homo Sapiens; identical to SEQ ID NO: 342202

SEQ ID NO: 473170 - DNA, 1000 bp, Homo Sapiens; identical to SEQ ID NO: 342203

SEQ ID NO: 473171 - DNA, 1000 bp, Homo Sapiens
ttttttttttttttttttacattcaataaacatttattagcacctgcagaaaaggcacagagggggatataagactttatgaatctgaccaactgtggaggattcattacagtcaaaaagaatggtcagagaagcagcccccaaatcacaaccatccacccagtagacatcaccaagtgctggtttagggcaagtagccagtctaaacatccatttaattctagtgggagagaacaaacagtttcaggtcttacctcttctagacaactctcccgtagcctcctatcaaatatgttttgattacaaaccccttctagaacttagaagataatttgtctaacccagtctacattttctaacacctgataatgtgtagtggtaaataaagcccagcccacaatttctatagttgagactccagggggagtggcttcagatcagtgacaaatgagcaccaactggcatgtatggcatgggtcactgtgataggatgtttttccctacatggcttctctgatgttgaacaaggtatgaaattcgggtgaagccttttccacacgcattacactgatagggtttctcaccagtgtggattttttgatgttcaatgaggcctgtattctgagtgaaacttctttcacactcattacatttataagacatgggagtttcaacattttccaactggctttccatcctacttttccaggcctctccctgctcaggttcctgaacatttttatccccagtatggatcctctgatgtctcaggagatgtgaacttcgcctaaaggctttgccacacatactgcactgatacggcttctccccagtgtggattctgtgatgttcaaggaggctgcagctctggctgaaggtcttcccacagtcatcacactcatagggcttctccccagtgtgggttctctgatgcttgataaggtctgagctatgactgaaggccttaccacattcttcacactcatatggcttctcacca

SEQ ID NO: 473172 - DNA, 1000 bp, Homo Sapiens
acattaatctatcctaggagtgttctagggtgttttaatgatctgttaagcatgggaaccactgcattccacctcagtttgaacaggcagcaagtaagcaaaagaggcagtgctgtccaatacaggttgagaatggtagagagaaaaagagagaatgaatgtgtgtttgtattgttatgattctttttcttctacaaaacacagtttataaacatatgagcatgtgaatggaaccttgtccactatggctaacatctcaggctctcaataatagaatgtggtagcctaagatttttctttcggggtaccaggtagttctgctcaaacggacttcagagaagggacatgccattcatctttgtcccatctaactttggccaggtagaaacaaaaagaagctctctacaggtacccttcctcttgcacaccaagaagtgtcgggaagctggtgcaaaggaaagaaaaaaggagcctcaactacgtactttagtgcaactcatttcactctaaagaccccctatctcttctactctcccttcaaatctccagagcgggaaatcagggagcttgcacagtttcttatatcccctgacaactccttcccagggctaaggaaccagccaggacaccatggtccctatggattactctctacatccttaaatagaagcggtagcagcccagggtggagggtggaggaaggtgtgcatgcaaggatcttgtgcttttgagttgagaggcttgaattggagggatgagtgaggtatctgtgtgttcaggtctggtccagccactctgccttcttgggggctttgcaagtatggacgtccacagtatttctgcattccttgcaccgtacagcacagcaccagtggaatttgcactcacactgggtaacacgggtgactcgagttgtgtcgtaccctcggccacagcacatgatttcacaaccgtctgttccttttgatgtcttgctgcagacacggcctgcagtgcctag

SEQ ID NO: 473173 - DNA, 1000 bp, Homo Sapiens; identical to SEQ ID NO: 342204

SEQ ID NO: 473174 - DNA, 1000 bp, Homo Sapiens; identical to SEQ ID NO: 342205

SEQ ID NO: 473175 - DNA, 1000 bp, Homo Sapiens; identical to SEQ ID NO: 342206

SEQ ID NO: 473176 - DNA, 1000 bp, Homo Sapiens; identical to SEQ ID NO: 342208

SEQ ID NO: 473177 - DNA, 1000 bp, Homo Sapiens
ttttttttttttttttttttttttttttttttttttcgcccaagcttggaaaaataggactttcttgttttgccccggtgtccccgacaccctccccatcagagttttaaaaaccatgagcgatttggtgagtttgaggccaggtcccacagggtgtccgggtcctgctgtccgtggggccagaggacccttagaggggggggcgcctggctagggtcccacaggttcgtggccgggcccccagggctcgcagtccagctggaccacggtgtgggccctgagcgccgcgggctccggggcgggcggggcgggcgtgggcgtggggcccagggcgccgttggtctgggagcaaacgctgctaacaggcgcgggaatcttggccttgccggggggctggccgccgtgcaccttgtagcgcattagcagcacgaagatgaagaccagtaccgaggctacgatgacgccgcccagcgcgatgatcatcgtgccgcccaggaagggagcgtgcggcgccccgcatggccgcagcgcaggttcggtggagaagcgggcgcagcccacaggccgcgtggccgtgagccccgtggcgctgtcctcatacacggcgagcacgcacagatcgtaggtccggcctgacgccaggtccgtcagcaggaacgagcggctctccgccgggatcatcctgtagacgaggatgtcatcagccgagctgttgtactggatctggtacatgcggatgcccgggataggccgctgatccggccactggacaagagcagctgtggccccgtgctcagtcacctggacgccacggtcggtagggggcccagtgtcggccaccttggcagaagcagaggcagcggagggtggggtgagagcatcaggatccccgtcccgcggggggtcacagctggtgctgttggctagctgaggaggtggtgggggacccacagtcagctccacagcagctgtggcctcgccagctgcattggccgcaatg

SEQ ID NO: 473178 - DNA, 1000 bp, Homo Sapiens; identical to SEQ ID NO: 342209

SEQ ID NO: 473179 - DNA, 1000 bp, Homo Sapiens; identical to SEQ ID NO: 160178

SEQ ID NO: 473180 - DNA, 1000 bp, Homo Sapiens; identical to SEQ ID NO: 342211

SEQ ID NO: 473181 - DNA, 1000 bp, Homo Sapiens
tttttttttttttttttggctttttgatgctgtgacttttattctaatacacacattgatttgattaaaccaagttcagggataaggcaaatatacattcttgttcccgaaaacatcccaggcagtttcagcgtctttcagcacagatgaggtagggttggggctgcaatgtcatgcctaacctgggcttcagatctggaactagttcatgtggaaaatgcaaatgaaacctctgaagcaatgctgtaaaaaacaagaacatttccatccgagccaagtgttctccaagacaatgtcttcttcctagggaaaaaggaaccaaagcttccttcttggcaaaatatccactgctgtccagaaatcgctcaggatggaacacttctgggtctctccagtacttttcatcaaagtgtacagaataaagatttgtaattactgttgtgcctttaggaatggaataaccacgtacaactgcatcttcagaggttgcatggaaaatccctaatggaactatattacagaatcttaaaacttcatgcaaaactgcctcagtataaggcattttgcatttgtcgtcccaagaaggcttcccattagggcccataattaaatcaatctctttctgaacttgtccttgaatattaggataaagggccatgaaaagaatcgcccaccgtagcacattggttgtagtttcagttccagcaatgatgagttcacccactgagaaaattaggttttctttggagaaagtagatgatgggtcatttttaccttgatccatctcatctaaataagcatcaacaaaatgctgaggtagctgaggctttctgttgactgaagctttttcaatgagtctggagagaaaatcatagactacagctgcatttctaaacagctgttgatgttttccaaaaggcaggatgccaatccatggaaaggcattatacaagaagactgaggcactggcagctagttccacattttcactaaataactc

SEQ ID NO: 473182 - DNA, 1000 bp, Homo Sapiens; identical to SEQ ID NO: 160179

SEQ ID NO: 473183 - DNA, 1000 bp, Homo Sapiens
tttttttttttttttttttttttttaagagatgatagctctgcatcttttatttcagactcagaaaattcagtccaggtctctgaataggtgttcaatagaaaacacacactcacacactctctctatatagatgttcaatagaaaacacacacactctctctataggtgttcaatagaaaacacacacacacactctacaggtgttcaatagaaaaaacacacacacacactcacactctctcttcctctttcccgcaacgtgctgtttgggagcttgaggtttctctcttcttcccaagtttctcaatgtctgggctggggaaggagggcccaggctccagcaggtacggacactgcaccctagaggcaggagcagtgggaatcagtatttccgctgccgagggaagagactactcccggaggatcggagtggggggctggcggggctggggtcctccgagtccaggctgaagaggtccctcccggtacgaaggatctgctcctccagcttcttgtgtctcttcatgtccgacagcaccttgtccaggcgggcctcccgtttctggctccgggctgagcttcctggggtgcgtctccggtcaatcagggagtcctttggtgtcactggctcatcatcaaaatcaaattccgtgggcatgtgtggtttttcctcttcctcttctttggcctccggctcctcatcggatctctcctcttcgctctgggcctccggcgtgggaggccggcggggcaggatctcggcttgcagctccagagtaccgtgggcagccagcagttcatagagccgctggatttcggagggcgggggcatccagggctgcccatccgcaggcagctccacctcctcgtcgctgcagggcacgcaccagtcctcggagtcctcctcggcaggctcttctcccccagcgctggggacttctccctgcgcctcctcgcccccggacccctcacgctcggtctcctctcggcctccttcc

SEQ ID NO: 473184 - DNA, 1000 bp, Homo Sapiens; identical to SEQ ID NO: 342213

SEQ ID NO: 473185 - DNA, 735 bp, Homo Sapiens; identical to SEQ ID NO: 342214

SEQ ID NO: 473186 - DNA, 1000 bp, Homo Sapiens; identical to SEQ ID NO: 342215

SEQ ID NO: 473187 - DNA, 1000 bp, Homo Sapiens
tttttttttttttttttttttttttttagttttttcaataccttctttattatgtctataaaattatatgtagcattggaaatgttattgaatatgacaccaacaacgtgctattgtattttttaaattttgacttcttttaaagaaggtgataacaatctgtggaaaatgcttttactgtatcatgccaatatactgcaaggagtatttcaaaataatataaaagtaattcacagacttagattaagtgaagatcaaatgaccccaaaatttttcttccttagtttttcacagcaactgctaaagtccataagctgatttttccaagaaaattattctaataattttgagtgttcaatccgtgcaatggtccagtcaggctttactccttgtgtgaactccctctgaaactcatagcttgcactaagaagttgtttagtttccacattctgattccccaacttaacctggaatacactggctcctcttaaagtttcactggggatgttggcactggttagataccaaaagcacatcaggatgttaacaaacttccttcctttctcatcatagtaaatggagatgcctcctgttgatgtaaatacaatttcatctatgttagcagcaagggcatttttatggttgtcaggtagtgaagtaaccttttctttcaatgcatgtagcacctctttggccacaagttcttccaacagatcaaatttacactgtgacagcaacttggatacatgagcaaaagcctgcttcgctccctcggagaactctgtgatgctgaactctttgtcgaaataggcccagataaggaaggccttaattcgagtcctaacccagttgatggggttggagaatcccaggacgatcatcttggttttctggtgctgctggggcttctcctccgtgctgtagctgcgctgagggcaggcagggaaagaagcgaaggctgcggggagtcccgggctgctgagcactggccaccgggagc

SEQ ID NO: 473188 - DNA, 1000 bp, Homo Sapiens
agagaagaaaacaccatctttaatcaacccgcctgcacagaaaccaggagagcactcccctccttgcaaggtcccagtgaaaagagaacctggtccccttgcaaaaaccatcttataaaaacaaaaggcttcaaagcaccagtggctacacccgttgagtagaaaggggcttgggggagagttggggtgagagaggtgagggctggaggcagggctggcccagtgaagggcagtagcttagcctgagggagctgcccccctctcaagctgtacccaccagctgggagctccatgcctgtgggggccagaggaactcctgggcctggctgcttgcatttgggatggtggggtggggttgccagccttgctcaggatattttggccttagagagtagggaatgatagattggagggtagtgggagaggagcggaatggtcaccacagacaggctcaggtgtgcaaaccatctgcaccatctgggtgccccccagttcctccatgtctcctgccctcctttctaacccagggccatgcctctttcacagatgaaatgctgagacctgatcctctctctatggacgcaccaggcagtgcgtgggatgcagcgtcctcaggagtgtctgtggagggaggtggggaaagtgttctcacctctacttgcccccaaggaagggtgagggtgctggcaatcccgactccccgactactcacacccccatctgccccttcagaactccttctgggcttgttagaggaggcttctggccattggattggttgtaaatgctggtgatctgtaaacactggagtctgggcagcgctgaccagcattgctcctctctgaaaccacaagccttccaactggtgaggtggatggagccgtcaggggtgagtggagttgtggaggtgatggggatacagtagaaccagcctcagggacctggaagggggtggagtgactgagttggggccccactttcctggaggagagagcttgaa

SEQ ID NO: 473189 - DNA, 1000 bp, Homo Sapiens
tttttttttttttttttttttcaagtcactcaggtttaatgattccatcatttggacacataaacttctgttccatttaagtctgctcactgtagataatccaggtcacccagcctcccattaagatttaatcaaagttttctgcaccccaaaccctcacaaaacagacctctatgatgaaatcacagaaagatacatattagtccagttagtggccaaacattggtctttagagtccaaagacctctataaccagtaacagtagttgggagaaaagaaggaataaagaaactgagttttctgagaaccccctttccagactgcctgaataagttgccttttcttaaaagagcaggattaatctacttatgccaagacccactgggcagaaagcaccccaacccaggtttagctgatctttaccacttccctgtgagagctacagcaatcttttggaattttctgcagcaaattttccccttttgctgtccctacaaaggcagaaaagctaggggccaatctctgagctaattccttgaatccaggcaggatgagcattcaccatttggacccctctctgtaagaagctaggactttatttcttaatgaaagttcaacactgaggaaaagatagcaaagtcgttgactcacaatctcaggccaacctcaggcagataggttaaggcaaggataggcaagaaaggtctattttaaccctatccaggcaaaaagcaggttactttggaaatccctaagatcaagctggtgctcagggccctctctaggatggtcataagcggtgtgattgcataggtcatccccaggcactaattagactaagcttcccagttccttccagaataaactcactattccttagcccttgggactagtggatgatatgtcactatttcaaacttcctggtccctttccagcctggttttatgtccccagagaattggggtagcaatggaccagactcagactgtgatgagaggg

SEQ ID NO: 473190 - DNA, 1000 bp, Homo Sapiens
ccaatgccaaaaactggtgatttatagaaatcaccctggtttatttttttcaacaaaggaaaaaaaaaacatggttcaataattcagcatttgggactctggcaagtactgtctgcattgttcaaaataagtgttcctggctgtgagctctgcaacacatactgatggcccaggaaccttcttccatggttctaataaaacaaaggacccacacatggaggttacgtgagtcaacaaaagatgctctatcacaatgtgcgtaaaaagcaagtctttgaaaaatatccagatctctaaaggaatacaaacactcctatttggttttgtttttgttcatcttcagtattatattttagttgttgaggaaaattttttttactgtaaggaaggagttatatgactttataagtgggaaccaacaggctgccggctaatacatacgctttccctccaagtcaagtagctttttccccccgaaagcctctttcatgattttcattatggttcagaaaagtaaagaaaatgatttcaagtattcaattcctataaaaattggtatcaaaagtaatagaggacctaatttctttataattccatgttttaaaaaataacttaagaagcaagaggtccggccctttacttgtataaatacagcagcagaactagagtttcttaagacaacgtggagaagagtctgtgtttagcacctcaatcatcgatcttaacgttggaaacgtttctgaaactgatggaagagtcttataagaaggtgaaatacttttcaagttcatccagcttttggcgactttgctaaaggcctctgaaccaggggctgtcatagcttcaaagtcgactaacttccctttgggaatttttcctgctacttcttttccacttgccatcagtgctcccacgatgaccgagtaagcaattacactggatcctcgagagagtggcattaaattataaaagtaataaactaaggataagattaagttgc

SEQ ID NO: 473191 - DNA, 1000 bp, Homo Sapiens; identical to SEQ ID NO: 160180

SEQ ID NO: 473192 - DNA, 1000 bp, Homo Sapiens; identical to SEQ ID NO: 342216

SEQ ID NO: 473193 - DNA, 1000 bp, Homo Sapiens; identical to SEQ ID NO: 342217

SEQ ID NO: 473194 - DNA, 1000 bp, Homo Sapiens
aggtattggcttccttaatgccaactcattaaatacaaatgttttattacgcaaaccacatgtaggtcccaggctcaggggcttaccctacagcccccactggtccctggctccaagcctgctccttgcccttgcccaccctggaaagccaggatctcctatggagtgtgtaggtgtccacgagtgtaccggtgtgcgggcctcctgggctgcaggcactcaggcatggtggcagcattgagggaaagacaggtgttggggagcggggtccccacctgcccaggctcaggagtcacaggggtctgcacagtcctttctgctgtggaacacgtgatagatgctggtcggggggaacatagcaacagcgccgagcagagagcccacctggatggccacgccggctgccagcaatgccggccggcccccgccatgcagcagggagctggctgccaccttcacgtaggagaacacgccaagacacagcacccacgacagcaccacgaggaccacccccgccgaggtgcccaccaggggcgggcaggggctcaggactgccagcgccatcaggtagcccccacagaacacgcccagcagagagaggccgcccagccctgccaaggacctgcacagcacacccatggccaggaagcaggccaggggattggcagcactgcccagcaccacagccaggtggtaggccagacgcccgtagggtaagcaggaaaagctctgcacggcaggcagcacgccattggtcagcgcgttggtggcggccaacaggcccagcaggcaggcactgcgggctgatagaagctgataggccttagggtctggaccaggggtggtgcctgctgcctggcttggtggctcttgcagtggtgaggactcttccacctcttcctctgctcctggggctcccacctggaggcctgatcctaactcccctgtgggtacagatggtggtggcggcaacagcagcagaagaccctggaaggcagca

SEQ ID NO: 473195 - DNA, 1000 bp, Homo Sapiens; identical to SEQ ID NO: 342219

SEQ ID NO: 473196 - DNA, 1000 bp, Homo Sapiens; identical to SEQ ID NO: 342220

SEQ ID NO: 473197 - DNA, 1000 bp, Homo Sapiens; identical to SEQ ID NO: 342221

SEQ ID NO: 473198 - DNA, 1000 bp, Homo Sapiens; identical to SEQ ID NO: 342223

SEQ ID NO: 473199 - DNA, 1000 bp, Homo Sapiens; identical to SEQ ID NO: 342224

SEQ ID NO: 473200 - DNA, 1000 bp, Homo Sapiens; identical to SEQ ID NO: 160183

SEQ ID NO: 473201 - DNA, 1000 bp, Homo Sapiens; identical to SEQ ID NO: 342227

SEQ ID NO: 473202 - DNA, 1000 bp, Homo Sapiens; identical to SEQ ID NO: 342229

SEQ ID NO: 473203 - DNA, 1000 bp, Homo Sapiens; identical to SEQ ID NO: 342230

SEQ ID NO: 473204 - DNA, 1000 bp, Homo Sapiens; identical to SEQ ID NO: 342231

SEQ ID NO: 473205 - DNA, 1000 bp, Homo Sapiens; identical to SEQ ID NO: 342232

SEQ ID NO: 473206 - DNA, 1000 bp, Homo Sapiens; identical to SEQ ID NO: 342233

SEQ ID NO: 473207 - DNA, 1000 bp, Homo Sapiens; identical to SEQ ID NO: 342234

SEQ ID NO: 473208 - DNA, 1000 bp, Homo Sapiens; identical to SEQ ID NO: 160184

SEQ ID NO: 473209 - DNA, 1000 bp, Homo Sapiens; identical to SEQ ID NO: 342236

SEQ ID NO: 473210 - DNA, 1000 bp, Homo Sapiens; identical to SEQ ID NO: 342237

SEQ ID NO: 473211 - DNA, 1000 bp, Homo Sapiens; identical to SEQ ID NO: 342238

SEQ ID NO: 473212 - DNA, 1000 bp, Homo Sapiens; identical to SEQ ID NO: 342239

SEQ ID NO: 473213 - DNA, 1000 bp, Homo Sapiens; identical to SEQ ID NO: 160185

SEQ ID NO: 473214 - DNA, 1000 bp, Homo Sapiens; identical to SEQ ID NO: 160186

SEQ ID NO: 473215 - DNA, 1000 bp, Homo Sapiens
aacattgtcacacatcagtttattgagaaaatcatgatgctatatgttaattctcttcaagtgattacttttcattatgtcagatgagactccaaaaggccatagccatgaagttagacactttcccatattttgttcaggaacacaaaaaccaaatgcaaagaaatgtttaagagaacatgaaattggcctcttccttcccccaaccaaaggtagtcattaacagtcaggaaggacaaactgaaacatgtaaaaagcaaatatttttgctagattttattttcaaagtttcaaacctttccaattttttttttattttttaccccaaaaaaggtatcaatacttttcattccactcttgtcaactttagccaaagccttctgagctgcagtcattttgctatttttcttttcagtcttcaaatctttagtattaaacttagtgtaatcttcttttgcttctacaggctcatctgataactttattttctttgatggaggatttggcaatgaggctgaaggttctggaagctttaagtatttagataagtcatcacttaattctttagggatgtagtcagatatcagaccatgggcataacgaatataatcctcttccttgtcagtggaagcttggtcaccagagaaaaatgcagttgactgtacccgggaactgacattcacattattggtttttaatgctgccacagtttgattaacctttttttccagccactttaatgtcttctctttgctgtacttgtaatatttcttgttgtctatttctggattacctttttcctctgtcacatgatgaagtaacttctcaagtccaggaagtttcagcaacaagatgcaatttggaaacacgttatccaccacaacttgatcaaggggctgaaacttcccctccttatcagcctttatgaggtagtggagaagcagaaatagaggatccacaggtgtggcaaaatggagaagacctcctgattgaactgatt

SEQ ID NO: 473216 - DNA, 1000 bp, Homo Sapiens; identical to SEQ ID NO: 342242

SEQ ID NO: 473217 - DNA, 1000 bp, Homo Sapiens; identical to SEQ ID NO: 342243

SEQ ID NO: 473218 - DNA, 1000 bp, Homo Sapiens; identical to SEQ ID NO: 342244

SEQ ID NO: 473219 - DNA, 1000 bp, Homo Sapiens; identical to SEQ ID NO: 342245

SEQ ID NO: 473220 - DNA, 1000 bp, Homo Sapiens; identical to SEQ ID NO: 342246

SEQ ID NO: 473221 - DNA, 519 bp, Homo Sapiens
tttttttttttttctttatttcacttattatttattttatcttccaatttcctcttgccagactcccatccaaagagtcatagcagccttcttccaccttctacatgaaatacatccccacctgaacaaaggcacgcgacaggaggaggggaataggacttcgcaaactggacacggcatcgttcagatctggactaggttccgttgttactggtttcacagttacaggcttcggatggtctgcacgtgctgtttcaagactaatggtagtctctattgcttctgttatgtccttatccaacctgttcagcctgtcctctgactcaaatatggagtaatcaatggtgaaatctgcactaaagtcatcataactgggggtgactgtataataatagaccacctgataatattcatcctctcccagtctttcttcatcctcatattcttgtcccaggataagtggcacagcaaagatggctacaaagaggacatccattctggattctgcactattgctgt

SEQ ID NO: 473222 - DNA, 1000 bp, Homo Sapiens; identical to SEQ ID NO: 160188

SEQ ID NO: 473223 - DNA, 1000 bp, Homo Sapiens; identical to SEQ ID NO: 342248

SEQ ID NO: 473224 - DNA, 1000 bp, Homo Sapiens; identical to SEQ ID NO: 342249

SEQ ID NO: 473225 - DNA, 1000 bp, Homo Sapiens; identical to SEQ ID NO: 342250

SEQ ID NO: 473226 - DNA, 1000 bp, Homo Sapiens
aaaatcagtggataaatgtttttatttaataacattgtttaataaaaaactacatatttaacagaaaagttgttaaagttacaaggtaaaggcacattgaaggagaatgctttttaaatccaattttcagggaattcactttacatgtaaataaagcagaaaatgcaggaaaattattttgaagtttttcatcacttaacaatttctgggaaacaaagttcatcctattttcccatagaggacccctgttaaaatataagattatattcccctatactaggattcagcattcaaataaatcactagtccaacttcaatgtcgtagaacccaaaaaaaatataactatcctaaaaatatataatttaaaatataatttatagttatactaaatgggaataaacatatggcacacattaattacaaaggatacttcatgtactagaaagtgcacctgtaagaaaattaataaatgacctaaaactaaagcatttaggataacaaacatcattttacttgctatcttttagaatgctgctagggaaatcgatggcacttaaaaaaaaagttgtccaaatatttcaactttttttggatacgttttcctgaaataagtggaggcattcagtcacctcaatgctacaggtgtttcttcaaataaaacattttcaaaagtaagagctgacctaatatatgtctccttcatcttttcttaccttctcaaacttgtaggggcttagcatcagatgaaaggtcactctgcctagcacttactggacttgctgttatcagaatgctttttcactcatgagaaaactagaaggagctacctggtcactggcacaaactcacaaagagcttgtaaaaactgcttttgtctgctaagttggtcaaaaggaatgaggataaactggcagaacgctattcaaagtctatttggaatgctatccttaaaggtactttctctataaagaaatacaatttagctagatgaaataaatc

SEQ ID NO: 473227 - DNA, 1000 bp, Homo Sapiens; identical to SEQ ID NO: 342251

SEQ ID NO: 473228 - DNA, 1000 bp, Homo Sapiens; identical to SEQ ID NO: 342252

SEQ ID NO: 473229 - DNA, 1000 bp, Homo Sapiens; identical to SEQ ID NO: 160189

SEQ ID NO: 473230 - DNA, 1000 bp, Homo Sapiens; identical to SEQ ID NO: 160190

SEQ ID NO: 473231 - DNA, 1000 bp, Homo Sapiens; identical to SEQ ID NO: 342254

SEQ ID NO: 473232 - DNA, 1000 bp, Homo Sapiens
ttttttttttttttttttttttttttttttttttttttgggcgtgcagggccaactttaatacgggccgccctgtctgggggtcgaggtggccgctccctttgtccttgtggctttccacgggcaggggcggtcccagcgagatcgtctcataaccaaaccagccctgtgcacgagaagtcacgccatgccccacagcctccggtcctggctgctggtggctcggggacccgcagggcaggagggtcccgggtctcgcagttccatgagccccagccgcggggacccccatggacaaacttccggggctgcacctgccggagcagcgtctcccaagcatcggaggtcctttctcagcagggctgagccctagtggacagagccgtgagtggcaaggcgggagtcagggctctcggagtcgtcaattcagcaagaaagcccctggcccgccaccttcaaactggaggtgggtgtctagggtgcggaggcagaggcacggagaggttcagcacatgctggtctcctggggatccccccaccagcagggaagctgaggtgcgccgggaagccaggccaagggagggaccccttaacggaagcctgcaccagctaatgggagcagcgaggagcaagaggaagcgcggggaccccaaggtctggaggtgtcttcctcacagacgagcgcgagccacgcggggctgggactgcaggggaacagcaccagaggcgttgggcctgggcctcggccaccgggggagcccacaaccggcagaagctgggctcggtcgagagttaatccggactgagagcaggccagtggcgcctgagtgcgttcaggctcaaggtctccaggagacgctctggagtcctcctgcaatgcgcctgcgtggctgcagctctgctcagcaccgtgcgcactgggctccagggaacccggtcaggggctggccgtgacccaaactctctgtgggccacagtccctggggcatccccgtgagtcc

SEQ ID NO: 473233 - DNA, 1000 bp, Homo Sapiens; identical to SEQ ID NO: 160191

SEQ ID NO: 473234 - DNA, 1000 bp, Homo Sapiens; identical to SEQ ID NO: 342256

SEQ ID NO: 473235 - DNA, 1000 bp, Homo Sapiens; identical to SEQ ID NO: 342257

SEQ ID NO: 473236 - DNA, 1000 bp, Homo Sapiens; identical to SEQ ID NO: 342258

SEQ ID NO: 473237 - DNA, 1000 bp, Homo Sapiens; identical to SEQ ID NO: 342259

SEQ ID NO: 473238 - DNA, 1000 bp, Homo Sapiens
tttttttttttttttttatagacagaagttcagaggcttgcatttatttaacttaggaaaggaatcgagcaaaacagacacgaacacgattctgcctgaaaccatcactaaccggctatagattctgactcactcaaggaatattgtggatattttaagaaaattttcctggttttctgctttaccaaagtgtaagatatggctggggtgcccctctcagcagatgcagaataaattaatcccaaagcaaagcggagcgcagggcagcctcgcgccacctaacctgtgtctcagcttccagcttccaccctgaagtgcgtgtggtcgtggagccgcgttgcgctaaccaggaaagctggaggcagaacgaggttggcccacgacacgtacagacatatgaccgacataacagtaaacgcacacgtgtctcgcacgcatggcgcagaggtcacccagactcatcccgtgcctctgcacgagcaggggaagtgacttggtggtggagtcccttggtttctaggctgttccacgatagcaggtgtgcatcgatggaacgctgagaagggcgactcagcatggtgactccacgtagtcattgtccagcccacggcgaaagcgcgctgtcagggagcggctgatgacaatcacccggggggccatgcagtcctccctcttgtggagaatgttccagatgagcatggctgccgccagcgtggccagaaggcaggcgccaatgttcaggtagcaggaccaggacaggttggtgtatggccaattctgtagaaagtcacgagcccgatgaccaggacaaaactcgccagttggaatgcagcggccatggcctcctcccagcacggggcgtcgggtgacagcaggggcaggcccaccagccccaggaggaaggtgagctggcctgcggtgagcgcggccgtggccaccaggttgcaggcgcgcatcatgtcgaactgcagtttgacggtgcctcgggactcctggaagc

SEQ ID NO: 473239 - DNA, 1000 bp, Homo Sapiens; identical to SEQ ID NO: 342261

SEQ ID NO: 473240 - DNA, 1000 bp, Homo Sapiens; identical to SEQ ID NO: 342262

SEQ ID NO: 473241 - DNA, 1000 bp, Homo Sapiens; identical to SEQ ID NO: 342263

SEQ ID NO: 473242 - DNA, 1000 bp, Homo Sapiens; identical to SEQ ID NO: 342264

SEQ ID NO: 473243 - DNA, 1000 bp, Homo Sapiens; identical to SEQ ID NO: 160193

SEQ ID NO: 473244 - DNA, 1000 bp, Homo Sapiens
ttttttttttttttttttttttgttcgtgttctagtaaaattttatttgcaaaagtaagcagccggttggtccctggttgaggctgaggaagacattacttcctgctggaaatacttgggacttacatttgacacaggctaaaagtatgggatgagagaggaacaaaagcttacaaacaaagagcagccagtttggccaaagaggaatgtgcatgaaagaaggtggcaacagactgacatgtaattcggtaaggataaatacatttacaaatgtgcaaactgaccttttgctggttcatctttattttagtcatactacttaaaaatatatatttaaaaaatattattttaaaagtcatcttccacttgaatcataaacttcttccttgtatcaaaagttgtgccactatcctggttacttgtggattcaccaagcagtccagcaagtcatccgtagaaatgaatgtttgaggagtcgtagtagtatttgaggcaatctgttcctcaattgcattttcactgttgctcattatttgttgtctcttggcacaatgcaattttccaaagtgttctccatccttgtccacaaagtctttcccatcacttccaaatatgcctcctctttctgaaggcggttcttcggacctctgtgctacagggaccagatcagggccaaagggacttgctgcctccggtttgtctgttcctgtggtcaagttctggctacctgtttggcccacctccatgtggttgcacacatttaattcttcctttttcatgtgctctccatctgttctcagtgcttggatttctactacctcagatgttctgcagcgatcaaaaaatgcagaaacagctgcatttaagtagcaacagttgactgcatgggacgtttcctcaacctcagtggggtttaaccaggctctggtattttgtggattctctgcagttttcagggcacacacaagcatacgggtgattgcctcttctacccgggcta

SEQ ID NO: 473245 - DNA, 1000 bp, Homo Sapiens; identical to SEQ ID NO: 160194

SEQ ID NO: 473246 - DNA, 1000 bp, Homo Sapiens; identical to SEQ ID NO: 342266

SEQ ID NO: 473247 - DNA, 1000 bp, Homo Sapiens; identical to SEQ ID NO: 342267

SEQ ID NO: 473248 - DNA, 1000 bp, Homo Sapiens
acattttcctttttttttatggcatagttctagaattgaaagtgaaaaattctgtttcagcatgttctctgcacctccaaattttcttggctattaccagtagttccttatacgcaaacatatgagaaatctctgaagagcaaattcagtttcgaaaaacagctaatgatatcgaagaaaagtaggcactggtggatactttctagaagacagtattaatacagcaatactttaggaataatgatgaatctgtttaaaggcaaaacatcactaacctaatcagatcacttagagaaataagtgattttctctgtcttatcctgagatcatatagccatttaacctatcttcaaacaaacaaaaatttttaaacactttctatcctttaagaaaatcttctttgcttggctaaatgacaatgttcaagaaatgcctgccacagaagcataaaaaatccttggcaacattccagaagaaattcaccctgcataatgtgttccagcaaacgctcaatagctttctggtgaacctgctggctcagtgtacacttgaacaggatcttcgactggctccttcatcctggtctcctctctctctccaaaggttaaccatgatcatgaattcaatgtgttttcttccagagcccactagtaagaggagttgtaacaagaaccagttctgcatactccaagcccagggctctttctgttgcattctaatgctccagcataatgtgcatattttccggtgcctgtgatactagcaacatcagactcattaacatggccgatatcctgtgagctgaaagaaggcactgatagcatcatggaatgcagcccttaaacacacctgagaatagttaggaaaatttttttcttctcatggattacaatttcccttctaccaaaaagaatttgaggccacttgcaacaacatgtaatgctgtttttaaacagttaaaagaacaggtgatgaggggaaacggagatgaaatcgctgc

SEQ ID NO: 473249 - DNA, 1000 bp, Homo Sapiens; identical to SEQ ID NO: 160195

SEQ ID NO: 473250 - DNA, 1000 bp, Homo Sapiens; identical to SEQ ID NO: 342269

SEQ ID NO: 473251 - DNA, 1000 bp, Homo Sapiens; identical to SEQ ID NO: 342270

SEQ ID NO: 473252 - DNA, 1000 bp, Homo Sapiens; identical to SEQ ID NO: 160196

SEQ ID NO: 473253 - DNA, 1000 bp, Homo Sapiens
tttttttttttttttccagtccccaaagaaaaccacattttatttctccatcatccactttcaacatacatccatatgtgcacatatttttacatggctggaataatagtaaatcttctatttgatgcccctttttgccatattataaacattttcaacatggcaataaaacctttataatggttcacagtggctgaattagaagcatcctaaatgaacaaccatggaggtagtggtggggtgataacataaacataacaactcagtatttttgcttcaacaactaaagcaacaaaccacatctgttagaagcagccctttccatcttagcacaagcttgtttcagtctttttttttgaaatggagtctcgctctgtcacccaggctggagtgcagtggtgcgatcttagctcactgcaacctccacctcccaggttcaagcaattctcctgcctcagcttcccaagtagctgggattacaggcacacactactatgcccagataatttcctgtatttttggtagagatggggtttcaccatgctggccaggctggtcttgaactcctaaccttgtgatctggccgcctcggcctcccaaagtgctaggattacaggcgtgagccaccacatctggcctgcttgtttcagtcttaagaggaacgacttcattgttcattcacaggtaatttattcacctagtttgccctcctgcaacgagtcctcagcattattgcaggagtataatgcagacatacattcaaacaggaaaatctcacacattctgtggtgtgtgcagtacagcactgtgtggactctctcattgtacacctttgttgttacagaaaacacagtaagagcccctgccaaagcctctctttctgattacacttaaaaaaggttgattcaggccaggcagtgtctcatgcctgtaatcccaacactttgggaggctgaggtgggcggatcatgaggtcaggagttcaagaccagcctggcca

SEQ ID NO: 473254 - DNA, 1000 bp, Homo Sapiens; identical to SEQ ID NO: 342273

SEQ ID NO: 473255 - DNA, 1000 bp, Homo Sapiens; identical to SEQ ID NO: 342274

SEQ ID NO: 473256 - DNA, 1000 bp, Homo Sapiens; identical to SEQ ID NO: 160197

SEQ ID NO: 473257 - DNA, 1000 bp, Homo Sapiens; identical to SEQ ID NO: 342277

SEQ ID NO: 473258 - DNA, 1000 bp, Homo Sapiens; identical to SEQ ID NO: 160198

SEQ ID NO: 473259 - DNA, 1000 bp, Homo Sapiens; identical to SEQ ID NO: 246556

SEQ ID NO: 473260 - DNA, 1000 bp, Homo Sapiens; identical to SEQ ID NO: 160199

SEQ ID NO: 473261 - DNA, 1000 bp, Homo Sapiens; identical to SEQ ID NO: 342283

SEQ ID NO: 473262 - DNA, 1000 bp, Homo Sapiens; identical to SEQ ID NO: 160200

SEQ ID NO: 473263 - DNA, 1000 bp, Homo Sapiens; identical to SEQ ID NO: 342285

SEQ ID NO: 473264 - DNA, 1000 bp, Homo Sapiens; identical to SEQ ID NO: 342286

SEQ ID NO: 473265 - DNA, 1000 bp, Homo Sapiens; identical to SEQ ID NO: 160201

SEQ ID NO: 473266 - DNA, 1000 bp, Homo Sapiens
tttttttttttttttttttttttttttttttttttttttttttttttttttttttttttttttttttttttttttttttaagtttcaaattatttattcattcaacaaacatgtcagagagaaatgaacagtctagtagcaaatatttcatagagaaatggacgtatcattccaactcaccacgccccaaacttcctgtggctcactccatcttttgcccctctagggagcttcggtgatgtggatctgccttggggcaggaaaggggaaggggaggtcaggcctagtggctcacgcctgtaatggcagcactttgggaggcagagtcatgtggatcacctgaggtgaggagttcaagaccagcctaaccaacatgttgaatccctgtctctaaaaatataaaaattagccgggtatggtggcacgtatctgtaatcctagctactctggaggctgaggcaggagaatcgcttgaacctgggaggcagaggttgcagtgagccgagatcatgccactgcactccagcctgggggacagagcaagactccgtttcaaaaaaaaaaaaaagttggggggaaagaacaaaatgagtggagggtggaggagggaagcactgctgggagcccagcgaagagggggcttgcatcgggacaaagactcatcccttctgggagatgcagaaatggcatcttgctgccccccactcatcacatgtgcccttcaaacatggctgctcttccacctaaatctgtagtctgatgtttatggggagagtggccttgaagtcttgaggggcagtgagacggtaggggggaactgcttggcatccagcttgtccttgtactggagctcaggggtagctaggcgctcacattcctcttggtcttgggggctcaatccactccgaagtatatagcccaaaaccttagctgacccaaactggaaggggcggaaccggcgatcagtgatgtatttggggtcagaagcctcaccccctac

SEQ ID NO: 473267 - DNA, 1000 bp, Homo Sapiens; identical to SEQ ID NO: 342287

SEQ ID NO: 473268 - DNA, 1000 bp, Homo Sapiens; identical to SEQ ID NO: 342288

SEQ ID NO: 473269 - DNA, 1000 bp, Homo Sapiens; identical to SEQ ID NO: 342289

SEQ ID NO: 473270 - DNA, 1000 bp, Homo Sapiens; identical to SEQ ID NO: 342290

SEQ ID NO: 473271 - DNA, 1000 bp, Homo Sapiens; identical to SEQ ID NO: 342291

SEQ ID NO: 473272 - DNA, 1000 bp, Homo Sapiens
ttttttttttttttttttttttttttttttttttttttcattctttggcactttaataacttttctaaggttcatacaaatttaacaataacaaacaggatactgaccccgacccgcccatgaaaaagaactcagatgaaagatccaaattccaaaaaaaatctaatatctgtctcaagcagaacgacatggtcagtgttacccagtacactgaagcctgaaggtgatgaagttggtgctctgaaatgatcacggatcaagggttttttttccacctccaacttctccttttccttttgtacctagatgagatggttcttcctagaagaccttccgaggtttgtgacactgaagcagtgataaaggtaaatgtgagcacactgatgcttatcaaggtaagaacgtgagtttaaggaaaaaaaaaaaaaaaaaaggtagcagtggcagcggagaatcactactgccttgtttccagcaatcaacaagaaactaatttagggctagaggcatcttagtgagcagcagccccttatcatacaacgtggttgccaaggacagctggtcctccacactgtcacagggcaggtcccccactctcacaaactctggataagaaccaagcaacagttccatggcatcagcttgctgggggtatatttccaagcacttgggttcttccagatgatacacacgggagttttccactgtgtaatagagaaacaaatggcccccctcacccaccagccgagctatcccatcctgaagcatatggacttctgtttctgttgtcaactgggcccccacgtttacaggttctccagcctcccagcgaattggaagcccgtaaacacttagtgccctctccctatcagtcaaaacagggggcagagaatcgtgaatgaagtctttggctcgctggtcggccacagcatcaacaggagcaaagtgtcccaggcgggcaaccaagacccgcaccttctccatgaaagcggttcttcgc

SEQ ID NO: 473273 - DNA, 1000 bp, Homo Sapiens; identical to SEQ ID NO: 160202

SEQ ID NO: 473274 - DNA, 1000 bp, Homo Sapiens; identical to SEQ ID NO: 160203

SEQ ID NO: 473275 - DNA, 1000 bp, Homo Sapiens; identical to SEQ ID NO: 342297

SEQ ID NO: 473276 - DNA, 1000 bp, Homo Sapiens; identical to SEQ ID NO: 160205

SEQ ID NO: 473277 - DNA, 1000 bp, Homo Sapiens
tttttcttttcttttttaaaagataaggtcttactctgtcgctcaggctggagtagttggtgtactccagcctggaactccgaggctcaagcaatcctcccgcctcagcctcccaaagtgctaggattacaggtgtgcatgagccaccatgcccagccctatctattaaaccttgattgaatataacagaccaagtacaactgcaccaaatggatgggctgtaaccatccacactggctccaaggaagcagaccgctggaccccagctctgcacatggctcaggcaaggcccgtggcgagcccttgtatccattatgcttgagatcctgcaggtcggccttcttccttccttctcggtacattgtaatggccccagtttccttatttttatcctgattctaataaccaggtccctgaagaactttctgaggaatctctgttttaatggcacacaaactgttctctgctgttttactccctctggacagcaagtatgagtatcacacagaagactagaacaaattctagctcatgcagctttaaaagagaaacttaagactactatatgacattcacgaattacacaaaaaacactgttgctaataagggcaccattcatggccatgaaactccatcatgtctcttgtggtcaggcttgagacaaagctttctggtaggaaagtttcttcccttattaaaaacgcgagcatcacttcatttttcgacagaacttaggtcttcggtatggtttctctttatgtgcctcctcaggttctcttgctccaattttctctgatgctccaggaagtttaaaattgtaatccgttgtgacataaggtactgtcccttcgatcccacgctggcacttaaggacacaatgtggaatggcaatagctccaacgagcagacaattcacggtccttagctcttccgggggcacaggggtgaggatgtggtacagccgcttctccatgtcaatgcctctacagatgccaaagcc

SEQ ID NO: 473278 - DNA, 1000 bp, Homo Sapiens; identical to SEQ ID NO: 342298

SEQ ID NO: 473279 - DNA, 1000 bp, Homo Sapiens; identical to SEQ ID NO: 342300

SEQ ID NO: 473280 - DNA, 1000 bp, Homo Sapiens
tttttttttttttttaaaaattgcagtgggtactttattaagaatttattttaccatctagccattcaaaacatctttacatcaacaaacacagcagtttgactattgaaatcataagcgatttatcttgaaaaggttatatttgtaggtggatgcaagtatattggagaaatatttctatcaaaatcactggttttgttaggagtattttgatttttctatttttacgctgggaaaaaaattaaaacaagtatgtcagtgttcattttatgggatagttggcttcactgtgtttgtcatgtttgtccgaattacagctgtttatcttgcaactttaagattaattaaatgcaaatgtaactctgtgaatcatgggaatacctgccagacctcttattaataccttcacttaaaaccccctgtgcctgagagtcattaatttgctaaaagaaaagtgctaaagcagccctttgcccacaaacaattctgcgatggctgcccaattaatcccaaagcattctgatcctcctttcaggcctcgtggccctttgaggacacaagaaggctccgatgataacctggcaacctaggtagaaacccagccaagtgtgagcgtttgaagctgcagtttggctgccatcgtgtcggcgaaaagaaagaattcaggcaccatgtcatccagtacaaaggataaaaacggattcaaccggaaattcaatgtggcaccacatatgggatacatgagtgcggttatacaacaggccacatattttttttgaacagtctcctacatgtgatgccgaggacatgtgtaaccatcataacgtctctaggaatctgtatttaatttgagttggggtggtggcagggattggagatctgaagccgccacaggtttgtggcagatggctctgtgtcagctatgacaagcagccaggctcagcttcctctgcagattttcttttctctctgatcaggtaaatatgggcacactctggaa

SEQ ID NO: 473281 - DNA, 1000 bp, Homo Sapiens; identical to SEQ ID NO: 342301

SEQ ID NO: 473282 - DNA, 1000 bp, Homo Sapiens; identical to SEQ ID NO: 342303

SEQ ID NO: 473283 - DNA, 1000 bp, Homo Sapiens; identical to SEQ ID NO: 342304

SEQ ID NO: 473284 - DNA, 1000 bp, Homo Sapiens; identical to SEQ ID NO: 160208

SEQ ID NO: 473285 - DNA, 1000 bp, Homo Sapiens
gtgactgatcataggaatttatttttaaataggtttcattagttcaagttagaatgacaataaatgtgaagacatgtttgtctgggatgtggttttttttttgttttgttttttgcttttattcagcaaagcgtactttttttcccaaaacataaaatcattcagcaaaaaaacaaccaaagaacaataacaaaaaaacagtgcacatgccacaaagcaaaccaaacatagctcagttttcctactgataacatattttgtcttttaattttggcatgtggaagtcacagaaattcacagacttaatatgcacacccaaatattctaagtgcttatttagggagtatctttatttggaataaagaatttcgagttataaaactgatggcttatagaatgcagcttactaaattggtcttcgttcttacaaactggagtaatcttgtcctttgagagttgaaaatacatattcatctacatttctgcagcgagtggcccacagttaattttcatcactggtggggttggcagaatgttcactctcttctgctgctgtgctgtgtcttcgttgacttggaattgcaggaagcactcggtttgtccgcagaggttctccagatagaaatttttgatctggtaggggagctaggttgttccgagtgaaaggaagatccctgattttgtgtctgtttggggaaagatgctgaaaattttgtcctgatgatggattatgtagatggcgaaggtgtggtggcacggagacctcttggtgaccaggccggacactgagcaatctgtccagcagcttatcagaagaagacacagtccaaactttgtaggaaaatacctgattagaatcactcttccaggggttatctagtaacatctggcagccagttctgttatttaataaatcctgctcacttcgacttttctgagatcgctgggccatatgatgaggagcagagctcaggcctgcatgggaagtggccctatggga

SEQ ID NO: 473286 - DNA, 1000 bp, Homo Sapiens; identical to SEQ ID NO: 160210

SEQ ID NO: 473287 - DNA, 1000 bp, Homo Sapiens; identical to SEQ ID NO: 160211

SEQ ID NO: 473288 - DNA, 1000 bp, Homo Sapiens; identical to SEQ ID NO: 342308

SEQ ID NO: 473289 - DNA, 1000 bp, Homo Sapiens
ttttttttttttttttttgagtaccaataagtctttatttattcattgtatttttccagggaaaggagaagggaagggaagagtcagcttgtgttaaaaaatgattagaaaatgggaaaggaagtacccagtacagcaaaatcaaccatcaaataaacacaccccagtgatggggtcaccaaagcccaaaggggctcagtctcctgcagttcaggaatgagggaaaaggatcaggaaaaaaacagacaggtacaggctttcctaccctcccgccccataaattcaagattttacacaaagctttggtttctagcagtaaacatggagttacattcgttcgtctcctattaaacaatcttgtggccactttgacataaagtttctagcacctgcataaaagttcctgagtgacttggatatacattcatattccctttcttggcctcctgaccccactttctacatggaaggcccccaattgcatctctttactttaggattagaaattaaaattaaggaggtttgatccatccaaaatacagtagtgtgtttttgttttgttttgttttgtttgagacagagtcttgctctgtaaccaggctggagtgcagtggtgcgatctcagctcactgcactccagcctgggcgacacagcgagactccattttaaaaaaaaaaaaaaagaaagaaagaaatggtaatggtcttgacttaggaggttgggaacaagggatggagggttttcctagcttcagtatttttgcatacatcatttaagagttgtggagacactccaagcatgaaatgtgtatgtgtgtgggtgtgtaagttttcttttgggggtgaacagaaaagagggcagggtagaagacaagtttttaggacagaagatctggtctaataggtaataggggaaggggaatacaaaagaaaggatggttcaagatccccactttaagaagagggccccccaaactaatgtttcagatctttttgcctg

SEQ ID NO: 473290 - DNA, 1000 bp, Homo Sapiens; identical to SEQ ID NO: 342309

SEQ ID NO: 473291 - DNA, 1000 bp, Homo Sapiens
tttgttgactagtggctgcacagatttatatacagacatacccgcccccacaacaatactcaaatacatcacattaatagacaaatatacagatgtgggcaaaaatacctgcccgcacattcacagaacacactaaacagtcacaaagacacccaggagtcccttttccatccccataggagtcagtcctagtcctcccccatctagatctgccctctacttgaacccagtctcgggactgggggagtaggggtctgcagcccggacagggagagggtcgctggcccacaggcctcaggcagcgccttcagctatgtctgcaatttcctctccccctttcctcctcctctctaaggctcccgccaaggcggcctccccctcattctagctccagcaagggaggggaggtccatgatgggggggccccgtggagacagggcagaaggaagccccccgccacacacactgatcacacaccacattgcatgcacaagcccaggtgggaaatgcgtgtgtgagcacaggcaggtttagccttggggtgggggacgggatggggtgggatctgccacaagccgccacaagctgcttggtgcacaagagcgcaggagctcgcaggcacagaggccccacgctggggtctgcgagactgctggccgggccctggctcaaagctggagtccaacaatcattaaccctgcgtgactagaccagagctcggccaggggacacattcaagcctgggccctggaaggaggggtggacagtcccctcccttccagtccagcatgggtctggggaagagaagcagctttgcctggaaggggcctcctaggagggggagcggtggtttctagctcaggctttaggatcagagagcagcagattcaaatcctgacggttttggtaaagtcaattcaatctctccaagactccgtttatttgatcctctgcctgctcgtcatcagcatctcgtgggcgccccgcccgcggccccggg

SEQ ID NO: 473292 - DNA, 1000 bp, Homo Sapiens; identical to SEQ ID NO: 342311

SEQ ID NO: 473293 - DNA, 1000 bp, Homo Sapiens; identical to SEQ ID NO: 342312

SEQ ID NO: 473294 - DNA, 1000 bp, Homo Sapiens; identical to SEQ ID NO: 342313

SEQ ID NO: 473295 - DNA, 1000 bp, Homo Sapiens; identical to SEQ ID NO: 160212

SEQ ID NO: 473296 - DNA, 1000 bp, Homo Sapiens; identical to SEQ ID NO: 342315

SEQ ID NO: 473297 - DNA, 1000 bp, Homo Sapiens
tttttttttttttttctttttttttaaaggaatgaattaaagataacactgttttattcaacaagcacttctgaatacttggagtaaatacagcactgttttgggtattacagagaactgataaaggtagaaaacactgtccttgtccatgataagatgcatcatattatttacattgacaagtttttaaaatatgaacatttgtaaatgaaataaattagaaataaaaattaaaaataaaacagaaataaacattagaaataaaaattgtcaaattatttgttactgtggaactctggctatgcaccagatacaagaaaaaccagtaaatacatgacatatccttacaagctcttggggtcaggagaaaatcaaagtattaattgcatatcctttctagtattaaccttttactacagaaatgaaagagttaacaatgcacagttatatttcaggtaacatatattcaaaggtatatcaaaggcgaaaatctatccaagttttccaaatgaagtggcagtaaaccaatgaccacataaaagtaaaaattaattttatgctttttgaaaaaaaatttgagccttttactcactgctaatttaattttatgctttttgaaaaaaataatttgagccttttactcagctttacaaagtatgagtagggaaaattaatgcaaataatgtattcaatattaaaaacaattagaataagcccacccaaatcagagattaaatgattctatgaactaaacatgtaacgatgaaggagggctggagtgaaaaagatacaggagagtaaaaaggagctataaagaaaaaccctcccctaaacacataggctaacacagagctgagacacagaggcataaaatagggaaaaaacagacacacttagccaaatcttggcttcccctctagatttgttccataaagtaatttaatatttgtatctggtctggtgaccttagtgtgcttcttctaaagacttttaaagttac

SEQ ID NO: 473298 - DNA, 1000 bp, Homo Sapiens; identical to SEQ ID NO: 342317

SEQ ID NO: 473299 - DNA, 1000 bp, Homo Sapiens; identical to SEQ ID NO: 342318

SEQ ID NO: 473300 - DNA, 1000 bp, Homo Sapiens; identical to SEQ ID NO: 342320

SEQ ID NO: 473301 - DNA, 1000 bp, Homo Sapiens; identical to SEQ ID NO: 160214

SEQ ID NO: 473302 - DNA, 1000 bp, Homo Sapiens
ttttttttttttttttttttttgttttgttttttgttttttgaaaaattattgcagtacaattactcctatttggaatttagtaaggagcaaacagcacaggagtgtgggcggtccgaatgggtccgggagctggccgcaggagtgccggaggaagcgcagaagtctggaacagtgttgctgctggagcagttcgaagactgaagggggaactcactgccactgctgctgcggctgctgcagctgctagagggtttggtagaattcgtggagccaatggctttgaaggttcttttgaaaatactaattttacccccagtggatgtgctgtcttctgtagtttgttgtaaggactgtatttaggtttcgggggcttcccagcagctctgtctttgtgccttctactgctaatgtgctgtttaagttgcgtttccgagttgacgtgcacatcacagatttcacagtgaaatgttttattttggaggcctgtgtttcctttattaacaggtcctttgcctttcactcctgccctaggaaaggctttgatagtgccacttccattccgggcttctaacatggttttgtgcttagtaccactgttgtgcgcctccagctgcgaggcagagttgacagcaaccttgcatagcgaacagtaaagaagccgttttgccttttcttcctcggtctcagtagaaggacatgagctattgccagtggctgtcgttgggcttttttccactttagaggtgatctcagttgtcataacactgcttttgcggatttccacagttgtcgtcgttgatattgctggtgtccctgcagtaccgtctgttttgtcagagctggtattgatggtattggtagtgatggaggtgaaggtagtctttgcgctgtccttggcagttacagatttctgcttatttttcatggcttccagtgctttgagcttcttggcatgtttcgtgcctttgtagtgggccgcagcctggctatcagaatta

SEQ ID NO: 473303 - DNA, 1000 bp, Homo Sapiens; identical to SEQ ID NO: 342322

SEQ ID NO: 473304 - DNA, 1000 bp, Homo Sapiens
gagcattccaaatttattccctttaagtaaacctatagccactacatatgtccctgacaattagaacagaaaacaaaaaaaggacaaatagaaatactttccattctgtctatatagtagtagttttgggggtatagatagtaaacactagtcaagaatactcgtctaaatatgttggtaaaatgtagtcatcatttggcatgtgttttgctttggtatataatgaagttgagctatcccatctttcttctctatggaatatagtcacacaaacaaaaaagatgaatctcactagaggtgggtctttatcagaaatatgccccaatctagttaggtaatagaaagaaaatcattttctcctcctaggcctaagattcttcatgtaaaaattataagactgaataaagatcacttctaagtttctataattcatgtagatatatcaatttatacatcatgatgtagacagacagcaaggctatactttctggctccatgatgctaggcttggccacatgacttgcttaaagcacgtatgatacatgcatcttttaagagaaaaccgaagtgtatttcatctctttctctctctgctaaaacaatcacaatgtcccaaaagagatcccttccttcgcctttgatcatggtaagaagatgacacaaagcagtgtcacagccaatcaacagctgacatcccccaccaggaaatacatctttgttgttgtcactacagcataaactaatgaaagctaattaaatataagaatttgctaataattgaggatccgtacacaattaaacttaaaaccaaaaaactctaatagaaaactcataatttaaaatgtgacataaggggaaataagttaaaaagcaacttttaaaaattacaaaaatagtatttgtagtaaaataaatggacttaaacatgtaatagaattttccctgtgatttctgacttgaatctttgaatgactattccaagtaagattcaacattttta

SEQ ID NO: 473305 - DNA, 1000 bp, Homo Sapiens; identical to SEQ ID NO: 160215

SEQ ID NO: 473306 - DNA, 1000 bp, Homo Sapiens; identical to SEQ ID NO: 342326

SEQ ID NO: 473307 - DNA, 1000 bp, Homo Sapiens; identical to SEQ ID NO: 160217

SEQ ID NO: 473308 - DNA, 1000 bp, Homo Sapiens; identical to SEQ ID NO: 342328

SEQ ID NO: 473309 - DNA, 1000 bp, Homo Sapiens
cgcgactgagacgaaacgacactcacctttacttaatggaaggcttcgcttacatcctgaacttaaaggaactacagaaagggacagaaactgctttctttttaaacaatgcgctgaaaggttactagtgataggaggcttagtgaagcgcgtgatgtgaacggccacgctgcaaggctggagagaaaagaggagggagtgaagttgcaccctgatcgcgaatcctcggccttttatcaggggcgccgccactcggggtccgaccattcgcctccaacgaggggacagcgaatctgctgtcgtgtgcagtccacagcaaccacaggtggggcaacaggaggagcgcttgggcacgaccacgtgacccagcacgagccaccgcccgccccaaaatgaaatcaaatcctaatctcccaatcccggcatgccggtcactccagcctttccaggagacttgcggccgtgcagcccctacacctttatctggactcctgtcgtacttggcccagctccactggattcagcccttggataaccaccctaccagcccctaaagatgactccatccccgtcggtatagttaattaaagaaaaacaggagtcgaattttcctggggtaactggttctttagcaggaggggagcactggggagtatcttcagggtggctggactttgcagcctctttaataacttccccctgtgcaggttgtatcctttatcaccccaccccgatgccccggtcttcaggaaatggcagcaggcccatatttctgtagggttcagagttctgtgaggtagagcattccttccaatgggatcttagaattcctagagttgcagaattttactgactagacccaggaggtctcaggagtccagacttgcttaaagcttggctcaaaattccaagggagctcataactccatggggcccagagttcctggctcgggaacattgggaggcctgggatacagtgccttagcctcaagcagaaaag

SEQ ID NO: 473310 - DNA, 1000 bp, Homo Sapiens; identical to SEQ ID NO: 342331

SEQ ID NO: 473311 - DNA, 1000 bp, Homo Sapiens; identical to SEQ ID NO: 342332

SEQ ID NO: 473312 - DNA, 1000 bp, Homo Sapiens; identical to SEQ ID NO: 160218

SEQ ID NO: 473313 - DNA, 1000 bp, Homo Sapiens; identical to SEQ ID NO: 335537

SEQ ID NO: 473314 - DNA, 1000 bp, Homo Sapiens; identical to SEQ ID NO: 160219

SEQ ID NO: 473315 - DNA, 1000 bp, Homo Sapiens; identical to SEQ ID NO: 342334

SEQ ID NO: 473316 - DNA, 1000 bp, Homo Sapiens; identical to SEQ ID NO: 342335

SEQ ID NO: 473317 - DNA, 1000 bp, Homo Sapiens; identical to SEQ ID NO: 160220

SEQ ID NO: 473318 - DNA, 1000 bp, Homo Sapiens
ttttttttttttttttttccatgtggtcggtttctttattgagaccacagacggtagcgcaggtccctgctgtccacatgccccttgtagggacaggaggcccttcccgagtccaagtccgaatgccgggtccgggccgagcccacggccccgagtacaagtccgggttccgggtccgggccaagcccatggccccgagtccaaatccggatgccaggtccgggccgagcccacggccctactggctactactgggaggggctgcttttgctttttggtgaccagatcttggacaagcggaacttggacttcttcctctggaggcccagcttctcaatcatgtcccgcagcatctgatcctcctcttgttcccggagccggtcctcgtccagcgagtccacgatgtcactgcggtcgttcacggtgctcacgtactgctccagcagctcctgctcccgccgccgctcctgcagtgacttcagagcctcgggcttggccatgagccggcgcagctcgccctcgatgtccagctgctgctcctccagacgctgggccttggacttgtacatcagctctgactcctgtctcagcagaagctgcttctcgtgaatgagccagaaccagtccaccatgaggctatcctcagcgtcatctccctcggccgcccgcagtcgcttctccagctccacgccgcggagctccagggcgtccagccgcctctcgatgtcctgcagctgcctctgtatctcctccggggagaggtagtcggggtgcagcctgactggggaggtcaccgtctcgccaggcagagcagggacattggccggggacaagggtctccctggtctgccctgaaggtgaggtttcttctcctcctccttccagctctgcactcgggcttcctggccagggggctccggccgaagccagttgtcacaaacgtcgaggctggcagggacggccagtctcctgcggcggggtggggagggggacctggctg

SEQ ID NO: 473319 - DNA, 1000 bp, Homo Sapiens; identical to SEQ ID NO: 160221

SEQ ID NO: 473320 - DNA, 1000 bp, Homo Sapiens; identical to SEQ ID NO: 342339

SEQ ID NO: 473321 - DNA, 1000 bp, Homo Sapiens; identical to SEQ ID NO: 160222

SEQ ID NO: 473322 - DNA, 1000 bp, Homo Sapiens
tttttttttttttttttttttttttttttttttttttttttttaaagttacagatagtatttaattggttactgtgatatcatagaaataccaagaatcataaaagtaaaaaaagctgctaagttgtacataatgtttccggaatactaagaagttgctgctggtctacagagccctgggaggtgacggtgaggatggtcccaagaggcgcagctagggtcactggccccggtcctggtgcctcttgcctttgcctttcttcttcttgtcctctggccgtggctccagggcgcagacacaggcggacccgccagcgatggccttgggcaggtcgacgcccctgctccacttgtcggcctcgcggtcgtacacctgcacggtcttggagaaggcagtgttctcccagctgtagccgcccaggatgtagatgcggccctcccacactgccacgcccgactcgctgttggcgtgcagcagcggcgccacgcgggtccactggttgcactgcgggctgtaggcctccacgcccagcacgtcgaagcgctccatggactcgatgttgtcatcgctgcccccgatggagtagatgctgtcacccaggctgcacatgctgtgccagccgcgcgccgtggtcatgggccgccgctcctcccacacgtctgtccggtggtcgtagcatagcaggttcttgcggtaggggccaatttggtagtcgtggccccccgagatgtacacgaagtctttgtagatggtgcccgcgtggccgtacgtgaaccttggcaagccggccacataggaccaggagtcagtcttgggactgtacgtctctactgaagagagcgctccgttctcattccggccgccgatggccaccagcatgtcttcgatggaggcaaggtagaaatccacacggcgctggttcatggaggccaccttgatccactgtttacagcgggggtcatacctataaagaagattggaggccgcatcccctccgttg

SEQ ID NO: 473323 - DNA, 1000 bp, Homo Sapiens; identical to SEQ ID NO: 342341

SEQ ID NO: 473324 - DNA, 1000 bp, Homo Sapiens; identical to SEQ ID NO: 342342

SEQ ID NO: 473325 - DNA, 1000 bp, Homo Sapiens; identical to SEQ ID NO: 342343

SEQ ID NO: 473326 - DNA, 1000 bp, Homo Sapiens; identical to SEQ ID NO: 342344

SEQ ID NO: 473327 - DNA, 1000 bp, Homo Sapiens; identical to SEQ ID NO: 342347

SEQ ID NO: 473328 - DNA, 1000 bp, Homo Sapiens; identical to SEQ ID NO: 160224

SEQ ID NO: 473329 - DNA, 1000 bp, Homo Sapiens; identical to SEQ ID NO: 342350

SEQ ID NO: 473330 - DNA, 1000 bp, Homo Sapiens; identical to SEQ ID NO: 160225

SEQ ID NO: 473331 - DNA, 1000 bp, Homo Sapiens; identical to SEQ ID NO: 342352

SEQ ID NO: 473332 - DNA, 1000 bp, Homo Sapiens; identical to SEQ ID NO: 160226

SEQ ID NO: 473333 - DNA, 1000 bp, Homo Sapiens; identical to SEQ ID NO: 160227

SEQ ID NO: 473334 - DNA, 1000 bp, Homo Sapiens
gctttaaaaaattttgctattgttataattttgatgcaatggatcaaaatcaagataccaaaagaatatgctcagcaagtttcagaggtcaatatttccatttaaaattatattgaaaattaaactagttgaatcataattattttatttagcaataaaatagctacttctttgaaaaattacttaaacctataaacctcttttaaaaattgataaatgttttatgatcttactttacttttttttccttaagattctgagtcttgaaagtttatttcaaagaaaagacaatgcctgtgccacatatttgacttgggtgagtgactagaaactccaagagcgggataaaccaaatttggctagctgaactgtataattttaaaatatttccttttatctcttattctggctttacctgacatgatggcagcatgtgagcaaggacaattccaacatggccctgaaaaagtcagtaagacaaacaagttagctttggtccccacagcttttcctcattctgaaaccacaatcttgccaaataaaaacatgaccttgaatgtaatatagaaaagtctcataatcttagaaagactaaaaaggatgaaaggagagataaaataccccaccgctgcagaaatccacaattctgtcaccaggtttggcctgatttgttaccacatagacaaggttgttcaactgttgctgcttcctcaaagctcgatcactggacattttaccttcctttgggctgactgctgcagggagaacattccaatcaagagtccaagtagggcaagggtggggagaaaacatcacttcaatgcccttttccattaacttggccatggttggtcttggtcctcctataaataaaggatcgctttgctcttctacacctgggacttcacataagtttggatgctgttcagttgaggttgtcaacaactttggtaaatggagaaattggatcccacacttagaagctgctgtttttactcct

SEQ ID NO: 473335 - DNA, 1000 bp, Homo Sapiens; identical to SEQ ID NO: 342354

SEQ ID NO: 473336 - DNA, 1000 bp, Homo Sapiens; identical to SEQ ID NO: 342355

SEQ ID NO: 473337 - DNA, 1000 bp, Homo Sapiens
aatttataaaggaaagaggtttaattgactcactgttccacatggctggggaggcctcaggaaacttacaatcatggcagacagtgaagaggaaccaaggcatcttcacaaggtggcaggaaggagaatgaacacaggaggaactatcaaacttataaaatcatcagatctcgtgagaactatcacaagaacagcatgggggaaccgcccccaagatccaattacctccacctgatctctcccttgatgtggggattatagggattacaattcaagatgatattttaggtgggggcacagctaaaccatatcctacaaggaatgactgaaactaaagatactaatttcctttcccttggttggccaggctgtcgtcttcattactgactaatagagaccaagcaggttggtttaatcccattgccctctagtgctttccaatgttggccaaaatgttgcctccattttaaacattcctcctggggaagaatgtctttctatcatacgataagggagaagagaagaggaagcaagagaaaagtttaaagtgttgtacagaagtttccaaccacaggaggagcaaaacaccaaagaagttgtagaatacagggtgtggtgaagagttggagcccaggccgtgctgtctgagaaggcatgccaagccaaggttcaggcttcctaggaccatgtcctgcccggagaagcattccagtccttctcatcatggagaaatggccaagccccatgtggttacagggaagccacgtacaccacaccatctttgcagaaggtttccagggaagagacagaccaactgaatgacctccagcccatccttggccagagccccaggccgaggagagctgggcgagtccatgatgtctgatcagattggggctggggttcaggtcttaaacatcaggaagcccccaaatgcagtgcccgacaggcttctctttgttattgatccctgggttaactcaaaccatactcgctcacc

SEQ ID NO: 473338 - DNA, 1000 bp, Homo Sapiens; identical to SEQ ID NO: 160228

SEQ ID NO: 473339 - DNA, 1000 bp, Homo Sapiens
gccttaggttttctagtttagaagacattttgtgtacccttctaggcctctgagcaagaagtttcttcattaggctctccgtgttactttatactttttacttacgttcacagtggtcctaaaaccaagatgcagccctaagcacctcataggagaagctgtattttttttttttttttttgagatggagtcttgctctggcacccaggctggagtgcagtggtgcgatctcagctcactgcagcgtccgaggaggagctgtagtttaaaggaagatactcaatactctaggaagcagatcatcaaaattttaaaaagcggctgggtgcggtggctcatgcctgtaatcccagcactttaaggaggctgaggcgggcggatcaccttaggtcaggagttcaagaccagcctggccaatgtggtgaaaccctgtctggactaaaaatacaaaaattagccaggcgtggtggcaggcacccgtaatcccaggtactcaggaggctgaggcaggagaatcgattgaactcgggaggcggaggttgcaatgaaccgagatcatgccattgcactccagcctgggtgacaagcaaaactccatctcaaaaaaaaaaatgtttaaaaggaagatatagaaatatggaatgcttatacagtattatttcatagtttttttaaatgtcatgtttctaatgtttagataatcttgaaagaaattctcctcacttcccctttatcctccatctttcatcaaaggaaaaaaaatcaaagcagtacaagtactcctttttttttcccccaattaatccaagttccttagaaatgttgctgtttgggtgagaattctactgattatcccgacttcacagccagcaatgacactttcagcagaaagttttcttggcataaactctttagttctcagactgcttactcataagttcttcttgagaacttgtcagcgacgcaatctgttttgtcttgaagagcacaagactcagac

SEQ ID NO: 473340 - DNA, 1000 bp, Homo Sapiens; identical to SEQ ID NO: 342359

SEQ ID NO: 473341 - DNA, 1000 bp, Homo Sapiens; identical to SEQ ID NO: 342360

SEQ ID NO: 473342 - DNA, 1000 bp, Homo Sapiens; identical to SEQ ID NO: 342362

SEQ ID NO: 473343 - DNA, 1000 bp, Homo Sapiens; identical to SEQ ID NO: 342363

SEQ ID NO: 473344 - DNA, 1000 bp, Homo Sapiens; identical to SEQ ID NO: 342364

SEQ ID NO: 473345 - DNA, 1000 bp, Homo Sapiens; identical to SEQ ID NO: 342365

SEQ ID NO: 473346 - DNA, 1000 bp, Homo Sapiens; identical to SEQ ID NO: 342366

SEQ ID NO: 473347 - DNA, 1000 bp, Homo Sapiens; identical to SEQ ID NO: 342367

SEQ ID NO: 473348 - DNA, 1000 bp, Homo Sapiens; identical to SEQ ID NO: 160229

SEQ ID NO: 473349 - DNA, 1000 bp, Homo Sapiens; identical to SEQ ID NO: 160230

SEQ ID NO: 473350 - DNA, 1000 bp, Homo Sapiens; identical to SEQ ID NO: 342370

SEQ ID NO: 473351 - DNA, 1000 bp, Homo Sapiens; identical to SEQ ID NO: 342371

SEQ ID NO: 473352 - DNA, 1000 bp, Homo Sapiens; identical to SEQ ID NO: 342372

SEQ ID NO: 473353 - DNA, 1000 bp, Homo Sapiens
cttattcagtctccgtagagactgtcaaaaattgccagcgctgattatatttcaagtcatcacggtggggtattgggaaaatttccaattagcaataatcgcgtctcggataaatctcattggctacggtactgccactgtgcaaagctagcttgacgtaggactttgatggtcatgtataacacctcacaggggcagaacctcctccatccccgactccaaagactcatgtaatcagtacgcaagaaagttcagagatgagacctctggttgtattccacctttgggacatgggggatgtctttagttcaaagtcacaaataaatgcaggttctacaattcagaggcttcatatccctgctggagtattacatgtttattcaggatggaccacttttcttagcaacagtttctaaacctttgccaggtctgggaagtctggcaggagagatttctaagaaccaatcattcctgcacacacttcttgaagataatatacattattccctagttatctcttcctaggtttttgtaggctcatttcaatattacaacaatctttattggaaaaccccaagtattttgtcttgaaaaatcagcaatccaggtattaaaaatagcatggaatgcccaattttactttgataattacatggtagtcagtttccgctcctggctaaagccttggattttcttctgggcagttcctaaaggcacaggtggcatggaagaaatcattccattttcgtctcctccccttatttgattggtgtctggttaccaaaagagtcatcaggcccttggattaccttcttgaactgatcttctagatcgcaagtcaagactgccatcatgttcccccaaatgcaaaaagccttgttgctccacctctctcctttccagaacaagtgagctggggtttgctttcttctccatatcctgcagcttgatcaatttttctatcaggaacattttatctttgccctcattaatgatctgc

SEQ ID NO: 473354 - DNA, 1000 bp, Homo Sapiens
gttgttcttattataattattttattattgtttgatcatcttctctcgagacttgacatcaggacagaaacgccagtatatatacaggatatttgaataaggaggcatttaaccatcgaaagtaaataaaccagaaattggataggcgtggtagctcatgcctgtaatcccagcactttgggaggttgaggtgggcagatcactagagtccaggagttcaagaccagcctgggcaacatggcaaagccttgtctccacacacaaaaaaatacaaaaattagctaggtgtggtggtgtgtgcctttagtcccagttatgcagaaggatgaggcgggaggattgataaactaccccacgtggtagtttaacctgttgcctatactttggaaacaaagagaaaaatgcatccaagtttggcaaaggaaagcagcaatcatctatctgtcttgtgcccaccatcaagagagttcttgagaccaaagtttccaaatggagacttagctctggcaactgcagaaaagtttacgaagaatctgaaggaccagactgatggctagacttcatccagagacaacaatggggtgggacccagtgaaggaagtgaattgggttatgagttccacagcataagtaatcccaaaagcagggactgtgagtgctttttattccatgcaaaagagagaagtgggtctctgaggagtatctggggctggctggctagagacgctagggaaaggtagacaaggcttcctgagtgtgtggtgctttcttgctgacttgccctatatacctaaagtccatggtagaaacctgaacctacagaacctccaccaaaagagaggagagcacgggattctcagagactggcttccacttgaacagggaaggccaattccctgtgggcctgtcaacatcaacttcagttctctcgcccttacaggaggcctctgactgtatcactattttagaaatattgctgccatgtaagcttctttcaagg

SEQ ID NO: 473355 - DNA, 1000 bp, Homo Sapiens
ttttttttttttttttttttttagagagaaagaattttaatcatcagcctaaaaaaattacaaaacctcattgaacataaggtacgcaacattaaattctgggtaatacatgcattgttatttctatgtgggaatacctcattgtgagcaaacctgacatacagcagtaggactgaccgtcactagaaagctttgacacaacacttttttttattatagcacactgccaaaatgtgtttaacatagattttgatttttaaaaattgatttgcacataattttagagagaatatctattggttaaaatgaggtatatctgtgctgccatgaagtgtgccatgagaacacacttcagtttctgataaagcatttttacacatcataataaaatttcattttatgaaaaaatagttgaattcatgaggtatgcatcttgaccacatgcccacagtgtaagtacaaagtgtaaggtcagtgcatgagtgcacaacacagtataccacaagtaaatgcagttcccagtcatacatctcccccattataaaatgtgtctaatctcaaaacccccgatgaagtgcttgtgtggcacagcccaggctcacctacgggtatgtgtatatgtgcaaggatgggtatgccgccatggcagcacagcctctctttgtggcaggatatctgctcctaggccagtttggcttcatacctggagctggctcttggctggagtttatggttctctttggagagcatgatactgtaaagcctggcttcttattctgcattctccctttattcttaggcagaatcagggtggccattgatgggtccaggggggtgtctttgtctcttctatttaaatttgtctcatttaaccttgggttttcatttttcattggtaaaaaactggaattctctgagtttttgaaaaaggttggctgcttttgcagagtagaagcaaatcctgccttttctgaggtatcttctgttaactttaacttct

SEQ ID NO: 473356 - DNA, 1000 bp, Homo Sapiens
ttttttttttttttttttcaaagaaataccttcattgctagctttatgttccagaacatacagtgagaagcgattacacctcaggaaaattcccagtgcccttggagagagctgacataggctttgccccataaagtcctgcttatctggctgggcaaagaaaagggtaggaggctgggcatggtggctcacgcctttaatcccagcactttttaaggccaaggtgggcagatcacctggggtcaggaatttgagaccagcctggccaacatggtgaaaccctgtctctactaaaaatacaggaattagctgggcgtggtggcgcgttcctgtaatcccagctactcaagaggctgagttaagagaatcgcttgaggccaggcacggtggctcaagcctgtaatcccagcactttgggaggctgaggcgggtggatcacgaggtcaggagatcgagaccatcctgactaacacggtgaaaccccgtctctactaaaaaatacaaaaaattaggcgggcgtggtgggccaagatcgcgccactgcactccagcctgggggacagagtgagactctgtctcaaaaaaaaaaaaaaaaaaaggaatcgcttgaacctgggaggcagaggttgcagtgagctgaaattgcgccactgcactccagcctcagtgacagagcaagactcaaaaaaaaaaaaggcagctgggcgcggtggctcatgcctgtaatcccagcactgcgggaggtggagatgggcggatcacgaggtcagatctgtcagaagatcgagaccatcctggctaacacggtgaaaccctgtctctactaaaaatcaaaaaaaattagccaggcatggtgataggcgcctgtagtcccagctactcgggaggctgaggcaggagaatggcgtgaatcggggaggctgagcttgcagtgagccgagatcgcgccactgcactccagtctgggtgacagagtgagactctgtctcaaaaaaataaa

SEQ ID NO: 473357 - DNA, 1000 bp, Homo Sapiens
ttttttttttttttttttttttttttttttttttttttttttttttttttttttttttttttttttttttttttttttttttttttttttttttttttttaggtattcaaaaaatgtttattgaatgaacatatataaatgaatgaatgagtgcgttttgtaaaggaatctgggagtcaaaatctggccagaagaacccaagtcctgctccagtgaccagatcaaccagtccaattttcccactgtgctcaatgttcctctttggtttgtaacaagaaccactgtcctctttgacatagtgcagaaacaaatgagaagcagatgagcaggaaagccctagagcctagcattcatgttcaacctgattttctggcttccagtattttggctcattaaacaggaaaacaaaattaactgtttataattttcaaaacactttgcattttcactcattccagatacaaacaactttaaagacaaaatcacaaggagggtatgtgaacaaggcctagttaccaaaagaggtcacatgaaaattaaaaagcattcaagagtaaatagcagtccatattgtccagggggatgagctatgcaacctaagtaaaaattaaaaccaaattacagacactaattagtgttgtataacataccgattcatttgcatacaatgcaattatcctgataggtgctggattcaacacatccagctgggttagtgcatctccacggaacaaaagcattcggtttttttccctgtgtgttggctgtgttctcttatgactgtgacggcaaataaacaatcattcccagcacctttagactttgaacatttgaaataaaatcaatacagattgtgcatggggagcattcagcccccctcagatgaacaactaacaggctgattctgggtcagtactccatttctagaacattttatctgatcttgtgttttagaaaaccacatttattttatgctatataaagaattcttcttcatctt

SEQ ID NO: 473358 - DNA, 1000 bp, Homo Sapiens; identical to SEQ ID NO: 342374

SEQ ID NO: 473359 - DNA, 1000 bp, Homo Sapiens; identical to SEQ ID NO: 342375

SEQ ID NO: 473360 - DNA, 1000 bp, Homo Sapiens; identical to SEQ ID NO: 160232

SEQ ID NO: 473361 - DNA, 1000 bp, Homo Sapiens
tttttttttttgtccagtacaggtttattttaaccatgtgcagtcgacaggccctgccaagtgaaagtgcctggttttccaggaatctgctgctgctcctggttcagctgctctgccatgaaacgtttcagcgtttctgaagtgccagggcggagccagggctcagttgctacagagtttgatccgtcatcccctatgtgtttcatgatgtcatcagggtcaaccagtgaactctcatcatctgtattaataggtttattgtgaaattcattcagtcttcgcattcgttcctcatttctcactctaagctcatcaacatttacactggatatagattttagagagagaccatctggtgctacattaggacgactgctatcaatgtctagtcctttccatttgttcctcctgcgctcccgtgcagagggcaactgtgatggtggagggaggacgtcatcttcaatggcaggatatgtctcaccgtaagccccaataaaagcactatcagattccaataatgagtttttcaagaaatcactagtgtcatctctgggcattctttgctctcgtactttagcacttgggatggcatctaagtcaactttggcaccttcctgcatttttattctgttcagcctcttctgctgctctcttagcagggcttgctgctgaatctctaaggtgtgatgatctcttggaggatccaggtacataaatttcagatcaactcgtgtttctgaatctctatctttcagctcattaaaatcatgaacattctgaaaagtggcagcgtctaagcccttaggggactgtcttctgacaggagcttgcaaccgatgtctagccatatcaaatatatccatgggattcctttcctttttcctgataggaatttcatcatcactgtccatgtgtagcaatcgctcttgtagacgcttctcttcactacgaagctgttttctcatttctgataattccataattacattttttttctcct

SEQ ID NO: 473362 - DNA, 1000 bp, Homo Sapiens; identical to SEQ ID NO: 342378

SEQ ID NO: 473363 - DNA, 1000 bp, Homo Sapiens; identical to SEQ ID NO: 342379

SEQ ID NO: 473364 - DNA, 1000 bp, Homo Sapiens
ttttttttttttttttttttttttttttttttttatctttgagcaatttattcgttatgaacacatgtaatctgttggaacaaagttctaggacaatccaggtcatccttcaatatttgcagaaaacatcacaaagaaaacttgatacttatacttagttggaaactttatgccacagctattaaatacagagatcatataaaggaatagaggaagctgttgaatactaaactaactcaaatcatcattatccttacgaagtgcacactgaattaatgtaaaaagcatttagtaaacaaaaagtattttcaatatacaattaagactgaaaagtattgaggcctcataagctgaacctgacacaataaatttaaaagggaaactaatttggaaatcagaaaaccatctaaggaatttgggaattaggcttctgctgccctctctgctactgacggtcaaggcctcctcattgtattctgtcctccatatctctgctgattcccattttgtctatttccatttaccccactactgcttgctcaggtcactctccttcactgtcggtgtttgttcaaattcctcagacccatccacttcccatctaaacttccctccccttttctcgctcgttggctctacctccctcctctctgttttctcctcactctcctgccccacctcgacatccacagcgaggcaatgaagaagcccctgccaaggaagagcccgcttctcagtgggacaccgggaaggtagacacccaacagtcaccgctagtgggaggcgattgtgcagaagcacgagggttgttacaggatcgggcaggtcccctaccccagtctcggactcagggtcctgtctgaggcggccaccccgaagcgtggggtttgcggagacgtagggcctggcggagggaaggacggggaagcatctcagggaggactggcgtctgccgaatcccagggctgccctgaggggccaagaggggcgagggtgggga

SEQ ID NO: 473365 - DNA, 1000 bp, Homo Sapiens; identical to SEQ ID NO: 342381

SEQ ID NO: 473366 - DNA, 1000 bp, Homo Sapiens; identical to SEQ ID NO: 342382

SEQ ID NO: 473367 - DNA, 1000 bp, Homo Sapiens; identical to SEQ ID NO: 342384

SEQ ID NO: 473368 - DNA, 1000 bp, Homo Sapiens; identical to SEQ ID NO: 342386

SEQ ID NO: 473369 - DNA, 1000 bp, Homo Sapiens; identical to SEQ ID NO: 342387

SEQ ID NO: 473370 - DNA, 1000 bp, Homo Sapiens
ttttttttttttttttttttttttttttttacacaggtctttattcccttttgaatgagacagtttttaaaagttgatttataaatacaaaaatacattctccaaagatagtatttccaaactgttatatacccatctactcccaacatggatataagttttttaaaaaaatagttgtatataacatacatatctgccccagtgttacttcacaggcctatgccctacgggaactccactctcccagccccactttttctcttggttctcccacattcttattctcccacatccctacccacgtttgagctggaaaggatgtccctaccctaggcatgaggtatattttattctgggcaccacacatttgccccatagataacaatacacgtgatgatgtcactagtactacctttctagtatttacatacttaaaagtagtaactagaacagttatcactggaactaagaattttccccacagaggtgaacagaccaagaactaaaatttcaggaaacctgtttaatttcttttgtatctttgaaaagttagttttatatctaagatttcttcacataggttataattcatctgtatgttcaagcttttatgtaaaaatatatagtgccttcagttttaacatagtttcacatgttctcagaactgctaaattcagtgctaccagtaaggcttaataagtagttcattgaccctgtaagataggagcactcagctctgtcacaatttgttgttaaacacatcactcaatgtaagtataaaaatatttattgataaaaaataaacttataattcagcaacttgaagttccaggagcatttctgttgttcctatgtcagtaagcccttgatttttcacattaaggagggaaagctaagcatgttacttgaagtaattttttcccagtcaccatcatgttgatcctgtgcacaacgatatatgcgaggaactcttaagcttagtctttgattctgacagagg

SEQ ID NO: 473371 - DNA, 1000 bp, Homo Sapiens; identical to SEQ ID NO: 342388

SEQ ID NO: 473372 - DNA, 1000 bp, Homo Sapiens
tttttttttttttttttttttgcaattttaaatgctaatttttatttactgctaactgtgcaaaagacaccaattcaatacagtgcagtaaaacacttacatacatccagtattaaacaatagcatatgggataaatctaaagcagagaaccatgtgccttcaaaactgatatcacagaatgcaactggcttcagataattctcaagaaacgtgaagagctctttaatttaatattaagtgagttatccagaagcaaaggctcttggttttactttctagaaaaaagtggaagttactccaattctgcatggtttaatatgatgtgtgatttttgaaccaatgaaatactttatattcattttatcaattggtaccatcagctaatataaagctgacaaatggctgacaggaaaacagctgaatacaatgaagtatgctcaatatggggctagttgtacatccatctcaatttccttagtcacagcccaaaataataccccttaattttaaagtactattttaaatcaaaagataaaataattttaaagacaaatacaatagtaaacactaatcacctaaatcatttaaccactaacataaaatactttttaaaaacaaaaacagcaagaaaatggcagtgcaagaatacttcatactgctggatcttacataccctgaggtacataatgagaagctgggggagatggagcaatacagccaattggcccaggatttatagcaccatgaatttgagaagaaccaccatatgctgtaccaactggatgccaggggggaacacaggaataatctggcacaaccggaaggcaggagtcaaaacctggcaaaggtggctgcccatagggatctgacattactggataatagactgctccatgagggacagatgaagaatcagcattcggaaaagtatcatttgctgatgcttccgcctgtatgccatcttctctcctcacctcactgtagcattgaggaacggtt

SEQ ID NO: 473373 - DNA, 1000 bp, Homo Sapiens; identical to SEQ ID NO: 160233

SEQ ID NO: 473374 - DNA, 1000 bp, Homo Sapiens
tttttttttttatgtttaaaattaatgactttattgacacaaactttgcaatgaaaagtggtatcctaataggatagtaaggattagtttctgtctcatacatacatgaaaaagtagccagatgcatttttagtcacatggtttaacttctggttgctgtctccgtgaaatccagattgttctggggagggccagatcatgtgccctgcatttccttctcccctgtaagtgagaaagtgtttctatataaaacagagacactttcttaaggtgataaattccaaacaacatgcagcagtgaactgatgcagaaacaaagctgtaaagagaagccacaaagcacatccccagggagaaagagcccttgaacttgcaggatcactgccaacctttggcagctgggggctcctgctgagtaatgccagtggggacatatgaatcacaggtttttcttttatcttattattgttaaaaacattttttagaacataaagttcctaaaagccctttctcaaagaatcacaaaatgatgaaggtttagaaaaactatagttgcgtgtatggtaaagtcttgtacattgattagaacacctagtttaagacacaaacctaccctgaatataaaagtttccattgcagagtgatttgcaacacacactataccttaagggtctaattcagtctcctagttatgaagtcactgttagattcaggatagatagtcacgactaaccagaccccaaatccctcaacatctgcatagtacctggcacaggatggacatttaatgttttgtgaataaatatacaatctgccaatggaaggaaggaaggaaaaatgacactacccacttgtgtttgaagaataacagagttagcagataaggaggttgcgtatctgacttttgacctgcatgtcagttctctggactatgttacataaacataacaccaataggctgcctatttctgctaaacatggaatttattgatatagtttg

SEQ ID NO: 473375 - DNA, 1000 bp, Homo Sapiens; identical to SEQ ID NO: 342390

SEQ ID NO: 473376 - DNA, 1000 bp, Homo Sapiens; identical to SEQ ID NO: 342392

SEQ ID NO: 473377 - DNA, 1000 bp, Homo Sapiens; identical to SEQ ID NO: 342393

SEQ ID NO: 473378 - DNA, 1000 bp, Homo Sapiens; identical to SEQ ID NO: 160235

SEQ ID NO: 473379 - DNA, 1000 bp, Homo Sapiens; identical to SEQ ID NO: 342396

SEQ ID NO: 473380 - DNA, 1000 bp, Homo Sapiens
ttttttttttttttttgcttgaaaaaagcttcctttttttcattccatttctcaacagcagttaaattatctttctttttctcggcaacagtttcctcctctttctgtttctttgctctttcatattctctctcctttctatttttctctttaagatattccatctttttctctttccatttttcaaaagcttgtagtgcttctccttttcttgcagcattttcttcttcagttttcttcttgtttttttcttcaagcctctttttggcagctattttctttgcttccttttctttcatagccttccaggcctcaaatgatgctaatgcttcttctcttttagcagcttttttctgttcattttggatccttaagttttcactttcaattctttttattctgtgcatttcatgtaaatatacatttttcttttctaaccactcctggcagatgcactggatgctctattatttgttgactttttattctttatatttctatcttcaattgttttctttgaagatgctgttgcactggtagatattaagatactctgagatttagatagtagtggatcaactgttctgtcatcatccataatcagttccgcttttgccttttcttcttcaaggtcatcagcagtcacttgactttccttggatttctcaactgcagtagtcacatggtctgctgaaaatgaattctctttattttcatctgatttcaaggaattatggttttcagtgatttcttcatttggatcttttccagatgcgtttccctcagatcctggtgaaaaagaatctccaagaatttgtttaagtgatgatgatgctagacttgttaagcatgaatcctcaggatcaaggttttcagagaatgcttttttctcagcttctaattgtatgccattcggcgttggaagggaagaaggtgcagaatgtaactccaattcttcactgagggcagtttctttatcttctagtccatccttctcctc

SEQ ID NO: 473381 - DNA, 1000 bp, Homo Sapiens; identical to SEQ ID NO: 342397

SEQ ID NO: 473382 - DNA, 1000 bp, Homo Sapiens; identical to SEQ ID NO: 342400

SEQ ID NO: 473383 - DNA, 1000 bp, Homo Sapiens; identical to SEQ ID NO: 160236

SEQ ID NO: 473384 - DNA, 1000 bp, Homo Sapiens; identical to SEQ ID NO: 342402

SEQ ID NO: 473385 - DNA, 1000 bp, Homo Sapiens; identical to SEQ ID NO: 342403

SEQ ID NO: 473386 - DNA, 1000 bp, Homo Sapiens; identical to SEQ ID NO: 160237

SEQ ID NO: 473387 - DNA, 1000 bp, Homo Sapiens; identical to SEQ ID NO: 342405

SEQ ID NO: 473388 - DNA, 1000 bp, Homo Sapiens; identical to SEQ ID NO: 342406

SEQ ID NO: 473389 - DNA, 1000 bp, Homo Sapiens; identical to SEQ ID NO: 160238

SEQ ID NO: 473390 - DNA, 1000 bp, Homo Sapiens
ttttttttttttttttaacatggacaaaatgttgtttattgaatccattttggaaacagacaacatgaaaggtttctgtgagctcacttgaagagtcatgattgcttcctgtcatcaaatgtcaaccataagaaaatcctagcataaataatgaaaatgaatctaggagagaaaaagtggttaaggacacctcagctctcactccaatagctctctgatagctaacatgaccataaacatcaataaaattttttataggtacagtctatttactgcacaaatatcaaatgtgtacatcgatggtaaaaagttgtaaactggctaacagtcatcagcacttaagtacactgggtctatactgacacttccattctcattttaagagcttatatatttaattgatgactgctctcctcatcagggacatttaagatatggaaaaggcatttatatacacacgcatgcatgcacatatgcttaaccttacaaactgaaaaagtaagcccaagcatgattaattaattactttgcctggatcaataaatactagtctcaaatgttaagtgtactaataaggacagaagctatcagttacataaattatcatgttgctacctactgatgctccatttgctaatgcatgttagtcagtctgtagactttatccaacacatacatagagattatttttttgtttgtttgaaattctcagcagatcagcagatctcttttggacatttctctcccatcactcttaggatgaaaatgaaataactcttaaaataaaatttctaaattcccagccatcaagagcacaattctaatcaatcatatttcaaatcttcactcagaagggaaatgccatcaagagttaaataatgagaaggtctcatcaccgtggcagcttagactgatcttcaccttctcccagcaccctcttgccatattggaagccaaggtggctcatctctttgagatttcataaataccaacaggaagg

SEQ ID NO: 473391 - DNA, 1000 bp, Homo Sapiens; identical to SEQ ID NO: 342408

SEQ ID NO: 473392 - DNA, 1000 bp, Homo Sapiens
tttttttttttttttttttacatttgcaaaacaacatttattcttttaaaaaatctatatacattgccatacaaagataccacattgaagcagttctcaggaaccttccagtgagccttctcttataattgcccgagcaagatttcgtgccagagaaagtctcagcatttccaccttggtggtctctatgtcatcatcctggagctgctcggtatcagattctccatgcacaggtcttcttgacgtcaagtcctccagacaccgcatcaactcataagtctgttctgctgagaaaatcacctgtttctgttccaaaaggggcaaggcatctgtcagcagagtcatccagaaagaccgaggggcaatccgagacgtcatcaaggacagaaggagagaagctgcgtcggcaaaacgcttctccccgtacatacggtggaactcgcgatactttcccaggaatgtcagtcggtcactgagcatcatggctggccccaggttgtcaatgagatccaaatcagaaaagcagcctcgctcacagtaatccctgaggaacctgtctgacacgagcgtggcaaaggcggcatccttagcacggatgctccaagagagggcagaacccaggcgattgttgcggacggctttcatggctaagatcttacaaatgctgcgaacttgttcagtcatctgccgctgctcacagatccgcagcaccttcagggctttctgctcggtgttcagaggtatccgctcaatgtgcagctccagggagactcggcccagctcggggcagtaatcaaagtaatcgacccccagctgccacaggctgggatgagcaaacagtcccgaggcgtactccagcaggaggaactctctcatgttggaaccgaaatagaggttgtgtgactggaggagcttgcagtggtccagcaggtctgtcaggtgggccacaaaccaccagttgctcagggcgatgctgcactctttgattacttgatggatg

SEQ ID NO: 473393 - DNA, 1000 bp, Homo Sapiens; identical to SEQ ID NO: 160239

SEQ ID NO: 473394 - DNA, 1000 bp, Homo Sapiens; identical to SEQ ID NO: 342409

SEQ ID NO: 473395 - DNA, 1000 bp, Homo Sapiens
ttttttttttttttttttttactgaaagtgtaatataatgaacaaaccattaggatacactctgtcatcaataagatctaagcattattcacattccttgtctacttaatctacaccacagcctgtgagatgggaattcctgacggttcttcacctgagaggtggtatttcaagatcacttagccagatggagtgagagcaaactaaatgtaatgtcagccttcttccctcccagctcagggcagccatgacacctgactcccatgtggacaggccagtcccccttcatctggaagccaccttggccggctgctgcgggactttggatctgggagagagaccttaatatccctaaagaagaatgtgggatgtgattcatcctacatttcacccctggggaggaagggcgtggttgcctgtgaggaggactcactgttgcttgtctctgggattgcagaggccctttgccaagaggcctctttctctgattcctgggtgactgggcagatgactatgggagttccattttgctcattataggacggatactcaatgtagggcctcaataagccttcaaaccgacatgtcagggtataaataagggactggtcatttatgttgaagaaggagatggtcccacactcatagtccaggaagacccctatttttgtaggtggggtcctggggaagacgctgataaaacggggatttaatgtgaaatacaaatgttctccattcagtctgaggacccagtacccatgatcgggagacaaagtcacgtactccttcctcctgtccacatcatcccggcacactcccacgcgccaccttttattgtgtcctccgtccacctcccagtaatgtttccctgcttggaaactctgagaagccaccacactcttccttgtaaatctcttctcagagtgaggcacctcctggggagcttttctatgggttacagttttcagatcagaaacgcagagcttcgggtgagccgtct

SEQ ID NO: 473396 - DNA, 1000 bp, Homo Sapiens; identical to SEQ ID NO: 342411

SEQ ID NO: 473397 - DNA, 1000 bp, Homo Sapiens; identical to SEQ ID NO: 160241

SEQ ID NO: 473398 - DNA, 1000 bp, Homo Sapiens; identical to SEQ ID NO: 342413

SEQ ID NO: 473399 - DNA, 1000 bp, Homo Sapiens; identical to SEQ ID NO: 342417

SEQ ID NO: 473400 - DNA, 1000 bp, Homo Sapiens; identical to SEQ ID NO: 342418

SEQ ID NO: 473401 - DNA, 1000 bp, Homo Sapiens; identical to SEQ ID NO: 160245

SEQ ID NO: 473402 - DNA, 1000 bp, Homo Sapiens; identical to SEQ ID NO: 342420

SEQ ID NO: 473403 - DNA, 1000 bp, Homo Sapiens
gagaagactcgtgcttataatttaagaaactgaaactacatttttgcattttagtaaaatctgagattgtacagtttttaatctcatttccacagacacccagcaggcagcctcttttctcttagaaaaatcaaacatgcaagccgtgaagtcaggaatagctgaaccccttggataagcacacgctttgggcttctttaaagcgagcctctcatcaagagcatttcctttgctggcatgaggggagggctgtgcctgccagggctagcacctgggagggacgctgacaggcagtcggagctggaaccactgtcccacctgcacgtctggtggctctgagacccgagtgccaccacctgcagcttaaatgctcgtctcactagagccacttgtgggctggagaggaagaaagatccaaagggaaatccacaaatttccttactgaagactgtcctgagcttgtacctctaagctttaaaaagagacgaagacccctcaaacgtgtgaaggcaccaggcgtgacccatgtggccatgctggctggaatttacggaggaagttaggagagagctttgcaaagaaaatgaactgcctcttcaaaaggtggtgagttccccgtcactgtacatgtgagcagggtagacggaagggttggtgtagaggacattttaaggtatttcagggaatgagacaaatgccaccttcccaaaaacagttccagttctcagccagtgtgtatgatagtgccctgctcatcatccttatgttagcgggaaaatcattagtgacaaaatgtggattcaatctttagaacctagcacaaggtaaatgtgagtcattcaatcccaagaactgttttgttaaaacatgaggctcatcttggccataaggaggtctgtgaagtggaagcccgtgactgacggtctgtttcttctggaaatttcctcctggatactcagcatcaccatgagtcatgcaggtgacggcccaagattccaac

SEQ ID NO: 473404 - DNA, 1000 bp, Homo Sapiens
tttttttttttttttttttttttttttttttttttttttgccgtgagtgcccctgccgggagctgctctgagctttattatctgtgagtctgcacactattcatgaggagggcagggcagggctgaggtcctccacaggcggcctgccttgttcctgcaggccagggtggacacaggcgtgtgtctgcatgggcccaatgtttgcccaccagcccaccctcctgtcccagggggagcacctctcccctctggccaccactctgctgggcgttcagggccggtcacaaggggctgggcccttcctccgctcacgactcagcagggtcaccagcttggccttgaaacctgcctgagggtcagggcggcctgtgccctccacctgatccagctccagcagccgccggtactgggcctccagggtactgtcgttggccgggccgggccagctcaagtcctggccgttgtggtagatgggactggttgtggggctgcggctgccggggccctcgtgcggctcaggttccccaccgtgcagcgtggggctggcctccagcacacacaggttctcatagaggtgctcattgcctgggggcccactggcacgcttgcacactgaagcgtagagcccggacgccagatcgttgggctccgggcctagcagtagcggcaggctctggggtccgggctcggccaggtgcattttcctggacgtgggtggctcaggtcctggtggcatctcccgaagctctccgggggtgtccagggagggcagagaggtggcccgtggcagggggcagggctggggcctggtcagctctggcagccgctcccgctggcgggcgatggccccggccacagccctgcacaggtcaggggcacagggggtgctgaaggcaaagaggccctcacccgagtggcagcgacggccggcctcaaaggagaacacgcccttgtcggagccgagcttgcgcaggaagtggtagggccagctgtagagggc

SEQ ID NO: 473405 - DNA, 1000 bp, Homo Sapiens
ttttttttttttttttttttttttttttttttaaataaattccattttcattttaattggcttgaggagtcagaattaagtttttcattaaaattaatcaaatccataggaaggaaaaacacagatttaactataaatccatatgtctgaaatatttctgtaagtatatatggacacagcatagccatatagccatcatcatcccatcaggactttgtcttccttttttttttttttttttttttggtggtgtggagtgggtgggtagggggcactgagtcttgctcactctatttcccaggctggagtgcagtggcgatctcaacttacagcaacctctgcctccctgggctcaagtgatcctcccgcctcaagcctcctgagtagctgggtttataggtgtgtgccacgagcctggctaatttttgtatttatagtagagatggggtttcaccatgctggccaggctggtctagaactcctggcctcaaagcaatccacctgcctcagcctcccaaagtgctgggattataggcatgagccactgcacccagcccaagactttatctttcataatcaagtcttgtgatgcaggcgcacaatttctcaccatcttaaagaaatgatctgtctaaggaatagcttccaattaaccatcttattcagattgaaccacttatttaatttaacgaggtatatacacctcttcaattctacgtttaggatcactgaggtcaacaatatgtagtcaaatagctaaagaactaaggccctgtggaagaagaatgggagcaatgttaaacgtttacaactgcagaaatttttaccccaggaaacacacacacacacacacacacacacacacatatgcactttaaatcaacatacaatatccctgcagcaaacactgagttgcctaaatcatagaatcatttttgtgcatccaacagcaatatgctgaagagattttcagggagtcgtgcatcatccatctgccaag

SEQ ID NO: 473406 - DNA, 1000 bp, Homo Sapiens; identical to SEQ ID NO: 160246

SEQ ID NO: 473407 - DNA, 1000 bp, Homo Sapiens; identical to SEQ ID NO: 342422

SEQ ID NO: 473408 - DNA, 1000 bp, Homo Sapiens; identical to SEQ ID NO: 160247

SEQ ID NO: 473409 - DNA, 1000 bp, Homo Sapiens
aaaataaattcttttattgagatgagagacggacacacactgggagggttttgttttttgttgttgatttttttgtgactgagtcccagtactcagggaggctcagactggaggcggcggagcaggcaggcggcggcaaggctggccccctggcgctggggccgcgcatacttgaggaagactgcggcgcgacccggcgcgggacctcggagcgcagcgcgggccatgcacggctcgagggtgcccagttcctcggggctgcagcagggagatggagaaactgaggcagggcaagtggttggagatgacccatccttggaactggagactggaggctgagaagaagcgtcgatgtggttccccacggacgggtcgggggctctcttgagatcgggcacgcgtcccgtcttcaactggagtgactaggcgagcaccggggagaggtggacaccctattcttcctacagggcgcggctagtgcggagtcagaacactcgaggaagcaaggaggggagctgaggatgggcagccatcctctctatgctgggtgcacaggctgagggaaaccatggttcgccctgccacctggtagcatggttagcggccctagcagctaaaggaacaccccatccaccaccagatacagagatggaggactcgaggcctgggtgatccttcgttctcagccctggaaggcaataggagcatcttctgggcctgggagactatcttccactctggggcaaggttaagagaccccagatctggactaatgggggtcctcccaccccattctctcccacacccagaaaaatcaagtctaggtgccacctcctcctcaataattgtctctcattctccgagaccgtaaaaatgaccaggaaggtaagtccctgaagctgcggtgaccccatacacttcctccgccaagactacacctgtaaagttctggctggagcctggagcccgccccgtcgagcaagcggtgcgccaggctcag

SEQ ID NO: 473410 - DNA, 1000 bp, Homo Sapiens; identical to SEQ ID NO: 342423

SEQ ID NO: 473411 - DNA, 1000 bp, Homo Sapiens; identical to SEQ ID NO: 160248

SEQ ID NO: 473412 - DNA, 1000 bp, Homo Sapiens; identical to SEQ ID NO: 342426

SEQ ID NO: 473413 - DNA, 1000 bp, Homo Sapiens
tttttttttttttttttccatttaaaatgaacaatttatttattgcttaaagaacatagaccataaaacactaataatatacctagaaaaaaacccaaacaagattgttaaagaagtcttcataggcattatggcatcttgttcttcctaaccttaactgatgagggttaggaggagaaggctcagaataaggataacagttcataatttcttcatctctgctctaactgttcccttagttggtgaataacaaccagctccatcctaaaaacaacagaacataagcagcagcaaggaatcatccttgagcaggaatgcagtcctgttacctgaacagagacagaacacaatctagtattaactgctgcaaggtaggcacttaaactcactatggcaggtcctagtgcttagtagaaatgacctcgttttttcccctatgttttaggaaatactaaaaaccaaaagaaaagctaaaacatatgcaaaccaaacagctgtacggcctctaggctagactgcctttagaagcatggctgaataatctgctggtaccatagcacagaagcaatataatcaattcttgtttggtgtggtggtgcacaactgtagtcccagctactcaggaggctgaggcggaaggatcccttaagcccaggagtctgaattcagcctgggcaacataacaagaccccatttctaaattaataataataattcccaaattgacaaagagaaagtctcatggtcgagtggggtctttaagtctactacatttttatactggccttttctacatgactacaaactgtgagcatattttaagtagcaaagaaggtacagataaatataactgattcaacataaggcaactgaagggacaaaaacgtgcacagtttcatccaatctgcagtctggatggtgaatccaaggtttgtgggccacgccaatggctctcctcacttcttcagaaaacgctgcaactgttcctgtagggaaatga

SEQ ID NO: 473414 - DNA, 1000 bp, Homo Sapiens; identical to SEQ ID NO: 160250

SEQ ID NO: 473415 - DNA, 1000 bp, Homo Sapiens; identical to SEQ ID NO: 342427

SEQ ID NO: 473416 - DNA, 1000 bp, Homo Sapiens; identical to SEQ ID NO: 160251

SEQ ID NO: 473417 - DNA, 1000 bp, Homo Sapiens; identical to SEQ ID NO: 342429

SEQ ID NO: 473418 - DNA, 1000 bp, Homo Sapiens; identical to SEQ ID NO: 160252

SEQ ID NO: 473419 - DNA, 1000 bp, Homo Sapiens; identical to SEQ ID NO: 342430

SEQ ID NO: 473420 - DNA, 1000 bp, Homo Sapiens; identical to SEQ ID NO: 342431

SEQ ID NO: 473421 - DNA, 1000 bp, Homo Sapiens; identical to SEQ ID NO: 342432

SEQ ID NO: 473422 - DNA, 1000 bp, Homo Sapiens
tttttttttttttttttgagagtaacaaaagctttattggtgtgtttgagctggtgggtgcattagctgagatggaagtgacaaatgccgagaggaattgtaaggttgccaggattctagaagaccaggaggcttcctggaattccctgctaggagccagttagagaggctgcccttggagggacagaggtgggtgggatggatttccgagcagagtgagggcaccagagaaattcaccaggaaaaaaaccagcttttttgggctcttgtggctttattgagggactggggtctctcttggacccctgattcttaaccctcaaagcacttcttaagatcagcgactctgggccggcttgctgggctgggacttttgacagttgctggtgggtgtagcaggggaattcagggctcctggttcctcccgtggctggaggtgagcgcgctctgccagcagggctttgggaggccgggctctggggtcctccagagaactggggtctgaggaaggatcaaggggctgggacgtccaggctatatcaaagttgggctttgtgggggccagaatttgggggctttctggagggctgggctcagtgggtgcagtggagagccagggagtggggttttcctgggctgtaaaatcttcagctgccttgtgggaaggggtgagatgaagaattaggggctctgtgagaggagagggtttggggtccccccagatgcttgggtctgcagaagctgttgaggactgggatggagacgtgacttcttggtcggactctgagggtatcagctgggacctggagtcctttgaagagctggtggcatccaaagacgaggcattttgcagggatggcagggaaaggggctggggctccggctctggtagtttcttatcgtctggttgccatcttagtatgttgggcaggctgaagcagctgtccaggtctcctctgtgacagcagtctaaactctggctcggtctcaggctgcctgc

SEQ ID NO: 473423 - DNA, 1000 bp, Homo Sapiens; identical to SEQ ID NO: 342433

SEQ ID NO: 473424 - DNA, 1000 bp, Homo Sapiens; identical to SEQ ID NO: 342434

SEQ ID NO: 473425 - DNA, 1000 bp, Homo Sapiens; identical to SEQ ID NO: 342435

SEQ ID NO: 473426 - DNA, 1000 bp, Homo Sapiens; identical to SEQ ID NO: 342436

SEQ ID NO: 473427 - DNA, 1000 bp, Homo Sapiens
tttttttttttttttttttttttttttagagtcaaaacccatcggtgtgctgtattcaggagacccacctcacgtgcaaagacacatataggctcaaaataaagggatacaggaatatttatcaagcaaaaaaaaaaaaaaaaatagcaggggttgcaatcctagtctctaataaaacagactttaaaccaacaaagatcaaaaaagacaaagaagggcattatataatggtaatgggatcaatgcagcaagaagagctaactatcctaaatatgtatgcacctaatacaggagcacccagattcataaagcaagttcttagagacctacaaggagacttagactcccatataataatagtgggagactttaataccccactgtcaatattagacagatcaacaagacagaaaattaacaaggatattcaggacttgaactcagctctggaccaagcggacctaacagacatctatggaactctccaccccaaatcaactgaatatacttatgtttttatttatagaaatacatctggaaatgatagcttaaactcctcttaatcacttttgacttacaaaaataatcaacgtgtacaggtttttagaacctaaagtttttataaatggaatatctcctatagagtgctgtatgtgtagttaataacacaaatatttattgcacatctcctccatactttcacatatattaactaatgtattctcccaataattttgtaaggtaggtatcattattaccctgctctagatgtggaaatagaatctcagagacagaatgacaaaactgaaatctttttgattttaggaccatattttacctccccgtagctgcctccttgtgtcaactgattgaatcaataaataacctaatgttagcacagactgcagctctgtctatgcttcacaccgttaaaaaaggcctgggtgtggagtccccgtctgttattctatacgttatcaccaagcctcgctgttgtata

SEQ ID NO: 473428 - DNA, 1000 bp, Homo Sapiens; identical to SEQ ID NO: 342438

SEQ ID NO: 473429 - DNA, 1000 bp, Homo Sapiens; identical to SEQ ID NO: 160253

SEQ ID NO: 473430 - DNA, 1000 bp, Homo Sapiens; identical to SEQ ID NO: 342440

SEQ ID NO: 473431 - DNA, 1000 bp, Homo Sapiens; identical to SEQ ID NO: 342441

SEQ ID NO: 473432 - DNA, 1000 bp, Homo Sapiens; identical to SEQ ID NO: 342442

SEQ ID NO: 473433 - DNA, 1000 bp, Homo Sapiens
aaaaacatgagagcaaattgtacatatatcaatctcccttgcttgtctttaagaaagggccgttcatagcatttggcacaaaccctctatttctgttgcattagcatgattttaaataagaaggaaaataaacatttgatttatttcatgcttcctaagtttctgggcagggacatgccttactcttttagaaaccaattccaagatgacatctgactgcatttttctgttggtccgaacttctaaacaaacactcataaagtaagtttaaacaatttggagatgtatgaggaaaaagtcttgttctgttcagttcagactttgttaaaaaaaaaaaaaaaaaaagaaaagaaaaaaatgctcatttcacatgtccatgatcttccatggattttttttaagcttatttgagtttgattaagggacaaaaaagaagaggcggcaagttttcctatctctttggagtgtttcgctcaggaaattttgctcatcaaagttcagctaacatacacagcggacacatcaaaggcaaactggggtgctccgaggatacagaggggaatggatcggaagggatgtggcacttggcaccaccctctggtggcactggcctcatatcccttgtggcaattgtcaccaccatgattgctcaaggacttaggaaacatgcacagcatcttcaattcatcttctgccttagggcaggactggcaaacaaacagtttcataaagaggctggagagagaggggtaggttgcctgtgtcaggctgccaaatcttttgtctttttcctactctggagtcctatgccccagtccgagtatttgccgttgttatgtctgccaatcatgtttgaaactattcctaaccctaggagcatgggaagtgcatagtacaacatgtatttccaacactgaatttgtccatctcagaacagagccccattagtaccctggagggtccccaagctgctggtccggggcgtggcagtcagagtgga

SEQ ID NO: 473434 - DNA, 1000 bp, Homo Sapiens; identical to SEQ ID NO: 342443

SEQ ID NO: 473435 - DNA, 1000 bp, Homo Sapiens; identical to SEQ ID NO: 342444

SEQ ID NO: 473436 - DNA, 1000 bp, Homo Sapiens; identical to SEQ ID NO: 160254

SEQ ID NO: 473437 - DNA, 1000 bp, Homo Sapiens; identical to SEQ ID NO: 246557

SEQ ID NO: 473438 - DNA, 1000 bp, Homo Sapiens
ttttttttttttttttttgggcagtagcaagatttattgcaaagagcgaaagaacaaagcttccacggcgtgggaggggacccgaggggggttgtcactgctggctcaggcagcctgcttttattctcttgtctcgccccacccacatcctgctgattggtccattttacagagagtcaagtggtctgttttgacagggtgctgattggtgcgtttacgatccctgagctagacacaaaggttctccacatccccactagattagctagatacagagtgtggacacaaaggttctccaagtccccaccagagtagccagatacagagtgtggattggtgcattcacaaacactgagctagacacagggtgctgattggtgtgtttacaaaccttgagctagatacagagtgcccatcggtgtatttacaatcccttagctagacataaaggttctccaagtccccaccagactcaggagcccagctggcttcacccagtggatccagcactggggcagcaggtggagctgcctgccagtcccgcgctgtgcacccgcactcctcagcccttgggtggtcgatgggactgggcgctgtggagcagggggcggcgctccttggggaggctccggccgcacaggagcccacggggggtggggggagggtcaggcatggagggctgcaggtcccgagccctgccccgcggggaggcagctaaggcccagcgagaaatcgagcacagcagctgctggcccaggtgctaaggccctcactgcctggggccggccagctgctctgagtggggccccgccgagcccacgcccacccggaactcactctggcccgcaagcgctgcgcgcagccccggttcctgcccgcccctctccctccgcacctccccgcaagctgagggagctggctccggccttggccagcccagaaaggggctcctacagtgcagcggcgggttgaagggctcctcaagtgctgccaaagtggg

SEQ ID NO: 473439 - DNA, 1000 bp, Homo Sapiens; identical to SEQ ID NO: 342447

SEQ ID NO: 473440 - DNA, 1000 bp, Homo Sapiens; identical to SEQ ID NO: 342448

SEQ ID NO: 473441 - DNA, 1000 bp, Homo Sapiens; identical to SEQ ID NO: 342449

SEQ ID NO: 473442 - DNA, 1000 bp, Homo Sapiens
tttttttttttttttgtgtaaataagaaacttttttttttttttgcttctcttctacaaataaattaagaaacaaactagaaaattacccacacccattgtagcccttgggtgtgggatgtgccctgtccctgcagggccaaaagggtccatgtttccctcaaatctcagagcagtcctggcccaggctgcaggcaggagggaagtcgtgacctcttggcaggctcagtcctgcagctgccccaagcagccagactgtccctggggctcgtccaggcccgggcgctggctgggaggggaggtgtctggcaggtcttggcatggaggagaagagctgctgcagggcctctcgggggaggggttggccaagtaggcattcaccagctgcatgatctcttccacctgggggctctgcaggaggagctggctctctcccaccctcaaggccagggtgtgggggcccattagctggcaggcggccacatggccatagctgacactgtggatgggctccgtctcccctggccgggagagggacatggccttggctcccaagcccaggcacagcttctgtggagcaccccgaccaggctccgtgctcagctccagaacgtcataccgagcagcgccgaaccccggacactgcgccgccagggccaggtaggcggccatggcctcagctcggcccatgccccgtagccgcttccagccgcccagcacggcagctgccgtgccggcgccgcctcctccctcgcgggcaatgcttcccgcagtgcggccggccccgccgcgccgggcccgctccgcccgcctcttggccaggcccgggctccagagcgccccggccagcagggcagcggaagggggcggcctgggggtcgggcggggcgggtcttcgcgcggcggggccgggggcgggagcaggcggtccaggcggggcaggggcacccgcggagagaagtcccgatgcaggctctgcaggcgcagcgccgccagggcgc

SEQ ID NO: 473443 - DNA, 1000 bp, Homo Sapiens; identical to SEQ ID NO: 342451

SEQ ID NO: 473444 - DNA, 1000 bp, Homo Sapiens
ttttttttttttttttttttttttttttttttttttttttttttttttttcactgggctgcctcagggggagaggtagccataataaatttatgggttggtttgtggggagggcagggtggggagtccttgatgagatcgcacagctgccaggaaggcttcatcgaatgtgtcacgcaggttcatggccagagtgtcggtccagaaggtgttgtcacccaggtgccgcttcctgggcacttccctcatgctgatggggtaaaagccctggggcaccttcattctgtatggccatacacgtgggtacagcatgcgcagcagcacctcaaaaggcagccgcggcacgggcgccacccagtggccgtccactgtgtgcagccgcgcaccgccgtgcccatcaggcctcacctccaggaagctgctgaagtcgtgctccggagtggggtctggatgcacgcccaggcggatgccctgcgagtggctgatctgggtggtggggggtctggcggggttgttgctaacattccacatcgcgggccgcttgaccgtgggcttcctgtagatgggcttgggcatctccgtgggctgtggaatgcattgcaggcgtgcatccacagaggggtggaagctcctggaacgctgcgattcccgttgctctggggtcttggagagggcggtggcccgggcttgcttggtattggagaccagagagtggcctgggtgcagcttgccgtggagccactttctgatagcagcttctctgagaattttgtgctctttagaaagacaattcccttcttctccaaaggaatccacagtctgatagtagagaaatgtcctgccataggagagtctctggtgtgatgggggaaaaggcaaatgggaagtgcacactgcatccttgaccttgatactcaatcaggtagttgtgctccatgagggtcagctggctcttgaacatcttcattttcgtcatctcacgggcaaagtccttcttgtcc

SEQ ID NO: 473445 - DNA, 1000 bp, Homo Sapiens; identical to SEQ ID NO: 342453

SEQ ID NO: 473446 - DNA, 1000 bp, Homo Sapiens; identical to SEQ ID NO: 342454

SEQ ID NO: 473447 - DNA, 1000 bp, Homo Sapiens; identical to SEQ ID NO: 160255

SEQ ID NO: 473448 - DNA, 1000 bp, Homo Sapiens; identical to SEQ ID NO: 342456

SEQ ID NO: 473449 - DNA, 1000 bp, Homo Sapiens; identical to SEQ ID NO: 342457

SEQ ID NO: 473450 - DNA, 1000 bp, Homo Sapiens
ttttttttttttttttttttttttttttttttttttttttttttttttttttttttttttttttttttttttttttttttttcttcagaaacaagaactctttatttggttaaaaggagcacagggacatatgaagaccagagagttacaactttctcttgagaagaacaaggcgtaagcattgaagaaactaggagataagacagaaaggagccaccattttctatctcaagcaaaccctcatcaatgaatatgcgatcactgatgggttccaacccattttcacacgatttcgtagttcctttccttcctaaaatgtctgtgtgctgtgcttgtctccacactgatagtgactattcacctggtctcaaccacatgacctctttgtatactaatatagtcagaggctaaatacagctagggaaaccttagactaactttgcaactatctgcctccagtgtcaatcccaaaccccgaacaaccatctttgtttagtgggcaagagagggaccacattgatttcagaaccctcagagagctgcttctcattatataggcaacgtgtgaagacatatgatttatattgtgtatgtcacttcttttgttcaaattgactgcattagtgtttatgcacctattaacaaagttacattattacaaaatctgtttaattttaagctaaaaataattataaggcacatgtcttgcacaattgaaattagacaatccttgcctctaagtaaaatgtttgaggaggtttatatcacacttaatgaaatagcttcttatttctgaagagatttcctagacattgaccaaaagcagagaagctgaaagatgaattatttcgagaaaacaaactttttctatggtactatatttgtgtgtgtgtgaattcagttgacaacagtaataagtttctttaatcaaaagagcatgtattgaaaaatgagatgccataaaaataaatattagaacagttcatttttatcaaacact

SEQ ID NO: 473451 - DNA, 1000 bp, Homo Sapiens; identical to SEQ ID NO: 342458

SEQ ID NO: 473452 - DNA, 1000 bp, Homo Sapiens; identical to SEQ ID NO: 342460

SEQ ID NO: 473453 - DNA, 1000 bp, Homo Sapiens; identical to SEQ ID NO: 342462

SEQ ID NO: 473454 - DNA, 1000 bp, Homo Sapiens; identical to SEQ ID NO: 160257

SEQ ID NO: 473455 - DNA, 1000 bp, Homo Sapiens; identical to SEQ ID NO: 342464

SEQ ID NO: 473456 - DNA, 1000 bp, Homo Sapiens; identical to SEQ ID NO: 342466

SEQ ID NO: 473457 - DNA, 1000 bp, Homo Sapiens; identical to SEQ ID NO: 160258

SEQ ID NO: 473458 - DNA, 1000 bp, Homo Sapiens; identical to SEQ ID NO: 160259

SEQ ID NO: 473459 - DNA, 1000 bp, Homo Sapiens; identical to SEQ ID NO: 160260

SEQ ID NO: 473460 - DNA, 1000 bp, Homo Sapiens; identical to SEQ ID NO: 160261

SEQ ID NO: 473461 - DNA, 1000 bp, Homo Sapiens; identical to SEQ ID NO: 342469

SEQ ID NO: 473462 - DNA, 1000 bp, Homo Sapiens; identical to SEQ ID NO: 342470

SEQ ID NO: 473463 - DNA, 1000 bp, Homo Sapiens; identical to SEQ ID NO: 342471

SEQ ID NO: 473464 - DNA, 1000 bp, Homo Sapiens; identical to SEQ ID NO: 342472

SEQ ID NO: 473465 - DNA, 1000 bp, Homo Sapiens
tttttttttttttttttttttttttttttttttttttttttttttttttttttggggcaggcactacttttacctttctgacctttgaggttagcaaaaccctgcagggtaaagcgctttctggaaagcgcagagctttctgaggcagagctagtgaccgtgtcatctatgaaggaagagaaagaaactatgcagagggcatcgcaacccgatgcggaggcgggtccggctgtcgcagggagggcccaaggcggctccgggttgcacgctcggccgaggctccttctggggctggccttgctgatgcaggggtgcagagcaatggagagggaggggctcttctgtggggtcctagggctctttgcccttttcggggggctttgtcagtggcgctgagctgacgtatccctccaggcttagggggtctgttttcctttcttccagcttcttgatgttccttgagtttcctcttgagggactggtgctggtcggggccggcaggggcaggctctgtgactgctccagcgcccggtgctggctggcttctctacaagcctgcagctggctggtcagcactttccgaatttcattcacccacgcggctttaatctcaggagttggcgcctggacgatgtagacctcctcgcgcgcgttgtaccagatctcgaacttcttagcatctcccttcacgttctccgtaatgccaacggcagccatgtttaaggactgcttgtagctgtaggagggagctttctcatacccctccccattctcctccctcttcttgcagaagagcactgccttctcgtgcaggaacaggtgccgctgcatgggcttgaacctggccagctccttcaccttggtgtggcccctcttgtggtcggtccagacgctgaacgagccctgcatcagcagcttgcccaggtcgccgagattcccgtcatagccggtgatagcgatgaggtgcatggagtcgttcacggccttcaggatgcccagg

SEQ ID NO: 473466 - DNA, 1000 bp, Homo Sapiens
  misc_feature (400)..(400): n is a, c, g, or t
gctcaggtgcttggaagttcccctggggtcccttgggattcctgagattctcctggcttggaaggcgcgggagccttgggagtgccagccgggctcttggtgggaggctgagaagagcagcagcagcaacagagagagaagagccgagttcggacggcgcgggtgcagaggacgaacatgatgcagttggcacctccctgaaacgtgttcccgataccatgcagaaccaccagcaccggcgtctgcacggccggggagccacagagggtcagcacgaaccgcacggtgctccagaccctgaggccgatgaagatgagcgggatgagcaccagcttcttgtccgccatggaggagtggcgcascaggcggtgctcctgggagaggatgggccggtactcanagagtgccgtgtgcgctctgttgatgtgcttccggaccaggaggtacagcagaggcagcagcacatatgccagcatctcccacagcttccccgtcagcagcatccacaggacatggtccttggcctccaggtcgatccagcaccagcccacagacacgtccgaggcgtcatagccaatcttcttcagggcgacggccgccacagtgatgaccaacgggaccccccagctgacgacatggaaggcccaaagcaggcgatctgtgcgaggcccgcgcgcggcgcggacgatgctgaggtacaagtagagcgcaatggccacggtccagaagaaggagctggtgttggcgaaggtggacagcgcgccctgcagcacgcagtcccacgacgggcccgcgaagttctgcagcactccgtagaagtaggaggcggccgagagcaggtcggccagcgacaggaagagcagcaggcgccgtgcccggctgcgcaggtcgggccacagggcgtgcgtggccaccagcaggcccgagccgagcgcggagagtgcgcacgacagcagcaccacggcgcgctccgacggcaccagctcggtgggcggcgggg

SEQ ID NO: 473467 - DNA, 1000 bp, Homo Sapiens; identical to SEQ ID NO: 342473

SEQ ID NO: 473468 - DNA, 1000 bp, Homo Sapiens; identical to SEQ ID NO: 246558

SEQ ID NO: 473469 - DNA, 1000 bp, Homo Sapiens; identical to SEQ ID NO: 342475

SEQ ID NO: 473470 - DNA, 1000 bp, Homo Sapiens; identical to SEQ ID NO: 342476

SEQ ID NO: 473471 - DNA, 1000 bp, Homo Sapiens; identical to SEQ ID NO: 342477

SEQ ID NO: 473472 - DNA, 1000 bp, Homo Sapiens; identical to SEQ ID NO: 342478

SEQ ID NO: 473473 - DNA, 1000 bp, Homo Sapiens
tcatatgacttgaattgggagaccagtagtcatgtgaggaagacactttccacagtaccctccacatttgccgaaaaatctagttccatcctgtgatcttcgtatgctgacagaggtataactcccctgagtgagccactttgctgtgctggatatcttcatcccagttcctgacaaattaatgctaaactgtccctgtgggcatctgaaagcactgtagcaatctccagctgtggcaaatggaactgcatttccaaatattgttttggaaaaaagaaggtccgtagctttaatttgcatggaagtgagatcaattcttattttgctgaaaacagtgtatccagcagctaagtgtccattgtcacattcacagtcttcccttctactcccattaaaaggacattgatatggattttttagcctaaagccatacacttcagaaaagttttcttcaccttggaccagtgttaaatattccttagggttctccaagtacatgtctgcacaataaatctttattattcttcccttaatgttaaggtaatagtcaccatcctttctaatgtggtttttcacttgaatttctttgcaggtggtaaatgatttacagtcattggcataacatttcttttgagcacctggttttaaatggtttaaacataagtcactggacaaaccatgtttggtaatgcatttcacttgtctcttcattatcccaattccacaagtcactgagcacttgctccattttccaactttccaagtggccaaatgcaaacagctgttaatgcattggtaaacctgagaggaaggcaccacagggcattcttgataaactataggccgaagtcgatggagcttatgtttcttagtagatgggatctcggtgcaatatgtaatcctttgtctgtaactaaatccacagttgtttgcacactgtgatgagtctgctgttaccacaatgtaattgcaaggagggttcctgcaattcttggatgta

SEQ ID NO: 473474 - DNA, 1000 bp, Homo Sapiens; identical to SEQ ID NO: 342480

SEQ ID NO: 473475 - DNA, 1000 bp, Homo Sapiens; identical to SEQ ID NO: 342484

SEQ ID NO: 473476 - DNA, 765 bp, Homo Sapiens
tttttttttttttttttttttttttttttttttttgacctggaccctctgcatctcagaaaggtttattatcaattgaaggaggtaacatgtagcctttgctggggacaaagatgcaacaagtctctgccccatcctaggtgctgccccgtgtagggctcttcccaggcccgccccccttgggcagcctggtagcgctgggctggcgtggcatcctctggctggatccttcgcggctgctgcgttccgccagggccaatgctcccccgagggcagcgctgcctttgtttctccctcgggtctcgggcacgctcgacgtgggcagagacacggccgcagggtcctggggctcgctcgctagcctctgcccggcacacatggacttgagcatctggaagacggcgaggggggccacgttcagcttcagcaggtccaccaggatcttgaacacgtcggggtcgatagcgccgcccgccgcctgcgccagctcgtacagctccatctcctcggtgctcagcaccttcttccgccgcagcgccagcttctgccgggccgcctccagccccgggggcgccgccgaccccggcccaggccctacgccctgcgccgccatccccgcggcccgcggaaaggtgcgctccgccccgccgcgccccctagcggctgcgcccaccaccctctccctgcagcgtcaacgtctggcctcccgggctgccctggcgggaggggcgggagcgcggggacggggccgcctccgcggcgtcat

SEQ ID NO: 473477 - DNA, 1000 bp, Homo Sapiens
tttttttttttttttttttttgagatggagtttcttctcttgttgcccaggctggagtgcaatggcatgatctcagctcactgcaatctctgcctcctgggttcaagtgattctcctgcctcagcctcccaagtacctgggattataggcatgcaccaccacgcctggctaattttgtattttcgggagagatggggtttctccatgttggtcaggctggtctcgaactcctgacctcaggtgatccgcccaccttggcctcccaaagtgctgggattacaagcgtgagccaccgtgcccaacctaaatgcagatttttaacagatttttacattgatgacacaggatgtgcactgattggctggtggaagactttgggttgagagtcagtctgtggtgctcaatgaagggaataggttacataaaatttacttcaggagaggagctacttggtattttcccaaagccttgaagtcaaagtgggaggtaaatgctgattagaaaggcttagacaaaaaggcaagaaggtagagggtggcctcccaaaaccacaggaagagggtaaatgataattgatttcctatcttatttcactgaaaattcctgtaggtcattaggatgagattaggggcactgcaaactacaaactgattgagtgtcactatcctctaaattactgatttagacttccatgaactcacttccaggtctcttttcataatataggctgattatgtctcctgatagatctttccaagatggcaggacaagaagttaaaacgagcgataagcccatgactctatgaacactacaacaatcaaacgtctgctaaataaaggactctttgcttagtgctagaactcagcttggagaaacaacagagctaccccattattattatagaaacacgtattctacagtgctatggactgaattgtgctctccctccctattcatattgttgaaaccctaattcccaatatggactgtatttggaga

SEQ ID NO: 473478 - DNA, 1000 bp, Homo Sapiens; identical to SEQ ID NO: 342485

SEQ ID NO: 473479 - DNA, 1000 bp, Homo Sapiens; identical to SEQ ID NO: 342486

SEQ ID NO: 473480 - DNA, 1000 bp, Homo Sapiens; identical to SEQ ID NO: 160262

SEQ ID NO: 473481 - DNA, 1000 bp, Homo Sapiens
ttttttttttttttttttgcgtccacttcctttatttctcatcatttacaaaagatgtacagagagggcatgtgttgggcacggagcaggtacaaggggctcctccccacgggggcagaaaagggggaaagaggttagggggcaagaggtgggccccccagggagagtcctggagcccctggagggggagaaattgtcctgtccccccattccgcctgctttactttgaaggtctcggaccccaagccagtgctttggagctgctcaggctgccggggtggtctggggagggcagccaccccccgtctcagggacccgcttcttggatctgctgctgttgctgctgtcgctgccattgccagctctgaacagcccctgggcaggtgcactgtggggtacgacctcggaccccgcctcagcggatgaggggtgctgagcggtcattggtgatggtgggacgaagcttgacagtggcaaaaggatttgtgcccctcgggaagagctcctgtggtgggtactgctctgaggacatcagtttcttgacgtcagtggcaactgctgtgctgcccatgctgctgcggcggctgctgggcaagggtggaggtgcagggctgggggcacggcttggcacccggcttggggtggagttgcccggccggtccaggaggtcatcgaggctgtggctgccccggagtgggtaggacctggaaggcagctcgttcccggggttcatgggtgtcatgggtgtcatgggggacatggaggtcatggaggtcatgggggtcacgggggtcatgggattcacgggcccctcctccagagccttcacgtacgcctcggggaaccaaccgctcgcggacgagccctccagcttgccgtagagccagccgttctgggcctcgggcaccaacacctccaccacgtccccagcggagaagcgcagcagcgtgtggttggcgccctccgagtgggagaccagggcgcggactctcctggcgcc

SEQ ID NO: 473482 - DNA, 1000 bp, Homo Sapiens; identical to SEQ ID NO: 342488

SEQ ID NO: 473483 - DNA, 1000 bp, Homo Sapiens
actttcagttaatgactccataggatctgcttaaactgggttagactgaattttcagtggggaaacaaagatcccttagccatcattccccacaattaagcaagggagcatctgcagtggaactgggaagaaagtcttgatgtatattcagtgacttctctccaagaaggagtgcttcaggagctggagagcagaaggtcgctcatgctggtccctggtcaggcacatgcgcacaaagtctgctgcattttctgagaagtggtctggtaaaggaggcatcagccctcggtgtgctccgatgtaaaacatggcggccatcctgtccatggaagccagtggaggcttccctgtagccatctcaaacacagtacaaccaatgctccagatatctgatttccgtccatagccagactcattgatgacttctggggccatccaatatggagtcccatgcatggacttaagcatgtcactgtgggtgccatttaaacctgcccaggccaaacgcctggcacagccaaagtcaatcagctttattattccagttggcatgagcataacattatttcctttgatatcgcgatgtaccacacagttctcatggagataagcaacaccttgaagtatttgtttcgtatatttacagaacaccatctcaggcaatggcccaaaacggtttataatactagagattgagccaccaggaacaaactccatgaaaatgctcacagtgttctcttgcaagcatgtccccaaataggccacaatgttgacatgtttcagtgctttgagcaaatctacttcttcctgtagtttccggtattccttttcagcagctaatttattagaggtatccaaagccacctgttttacagctattagctgtccttgactagtgagaccacagtatactgtgccgtaggctccctttccaagaatctcacccttggtccataggataggttcttcagactttaaactattttcagaaaatatcttc

SEQ ID NO: 473484 - DNA, 1000 bp, Homo Sapiens; identical to SEQ ID NO: 342489

SEQ ID NO: 473485 - DNA, 1000 bp, Homo Sapiens
cagggaaggcagagatgtgcctggcatcacagtttattgtttataaaccatgacaataacagctgttgctcagcacaggcctagcagagcccactgcagggggacggcagcgggcaccagaggccttgcctggcccaacccaatgggaacacccagactcagctgggtccccaagggagacttggcacattggcatgggtgtgggacaggtaaagcatgcaagagggagaagagggacataaggggcatgcggctgcggggtgttgggacccaaataaataaagcaggatgacagggtccccttcccctcaccaggaatgcctggacagcgtccagccccaaagcctgcctgtcccaaggctgtagttcagcatcaacagggcagggagcttggcagggcaagggcagagctggagatcatgcccagtgttccaggtgccctccctcccaatcagcctggggggcacaggacagggatggagaaggggctctctccatggcttgggtaacatgccaaaggcaggtcatagggcagactcagtgggggtgggggcctggctaacaagcaatggagagaacgggggccatccagagaggtgggcagaagagagcccctgggtcaagagaaaactgtgggaagacagacacgggagaaggagcagggccacatggtaggagagtttgggggagaagctgccagggggtaacaaccgggtgccaagaggtttgggggccagggcccaggaggaccccaggtctgcatgaggggcctggaaggctcagtccagcttggcgaagcccccaatggtgactttcctctcaggcttagtgcccactggctcctggagctgtactgcgccacccccgatgaagcaaaaggcagggcacacaggccctgagcagtccagggggcactccaagagcccacggaaggaaacagcatccaggaaggaaacccggccccgctcatagtccaggcagatgcccaggcggggtggca

SEQ ID NO: 473486 - DNA, 1000 bp, Homo Sapiens; identical to SEQ ID NO: 342490

SEQ ID NO: 473487 - DNA, 1000 bp, Homo Sapiens; identical to SEQ ID NO: 342491

SEQ ID NO: 473488 - DNA, 1000 bp, Homo Sapiens; identical to SEQ ID NO: 342492

SEQ ID NO: 473489 - DNA, 1000 bp, Homo Sapiens; identical to SEQ ID NO: 342493

SEQ ID NO: 473490 - DNA, 1000 bp, Homo Sapiens; identical to SEQ ID NO: 160263

SEQ ID NO: 473491 - DNA, 963 bp, Homo Sapiens
ttttttttttttttttttttttttttttttttttttttttttttgcagcttaaaagcattttattaagcatttttggatgttgcttcctaccacttaagaataaaaaatgcattttaataaaaacaaatctatactgaagtcattttcctttgtgagaggaaatatgaatgaaatacattcatacttaaaaacagagtattttactgccaaaactttaaatatctcaagagcataccacattttaaacacattatggtcatgtagctatttcaatattcctgggagtggtgggcaattagcctgtctatggcttaggatctgattccatgcttgcttcctgagcttcttctacctctgagagtttttcatcattttccaatgtttgctgaagttcatggatggtactaagaagaacatgaaactgtttccgtctcaattccagcttatcttcaacactttctttaatgtgtgaaagatgctctaattcttttcccagagcctctagttcctttaatgtctcatgcctgtctggatggtgctgaatcacttttgccaaagcatcatattcttggcgattttttcgtattcgttttgcttgaagaatttgctttttgcactcagcaattttttcatgtgctccagctatgctacattctatttccttgtaaattttttcataattttccatttctctgagattcatatcatatactagtaaagttttgcccattgaaaattcacattgagacagcgtgctcagcatacgttggtactggctatatccctcctcctgggacccagagttgcaccatttaatgaaactcttcactagcagattaattctccgatcacctccagcaccatctccatcaatgaggagacgcttccgtataacttcgtcgtcagtcacggctcccatggcgtgcgcggcggcggcggcggcggcggcggcgcaagctgag

SEQ ID NO: 473492 - DNA, 1000 bp, Homo Sapiens; identical to SEQ ID NO: 342495

SEQ ID NO: 473493 - DNA, 1000 bp, Homo Sapiens
ttttttttttttttttttttttttttttttttttttttttttttttttgcagtcggcgacagtttaatgtgaggcaattaccgctacagacatcttgcttcatcttaaaaaaataaaaattttcaaagcatctcacaggccaaagagctaagcaggaccctcactcagacattcaagagtgtttccgaggaaaactcgaggaggaggcagcgtggaacatcttcccatggccacggccccggcacagagctcagatgcctgcgggaagcggcccctccacctgcggaagggaagacgatgcctgttggagccgcacggaagcatccagaactctgaggcctgggggccggctgcggtcagtgcaaggctgctgacatggtgtgacctcttgcaacggggtgggggcagagcgtgcggtgacaagggtcagactggcggctcccactgcagccagaagtgagggagccagcacacgggggtgggcagtggacaggacaggatgcggcaggccccagtaccccccactcaggaatttgcttcaggccaaaagcccagggcagcagggtaaggcgccatcggccaggacctgcacggcaggggcagccccctccactccctggacccgagaccgtctctctcctggaagatggacatcaaaactgcatccggaggtgcagtctgcacccagaaggaaggggatctccgccagcagagcccaagagtggcgtgcagactgcatgtgcacagcctcagcccggccccctcagccattgcccatgagggcctccacgttgtctgatggtcgctggcatctgccacgtccccaaggactcgaggagaaccagaggctgacaagagcagcatgagctagccctggcgatgctcagccgggctggacacagcggatccacaaggcgttcaggcctcgcagccactccaaaggcccaggaaacaccaactgtcagaaaacccggagcacggtgaccctgcgtccgcacag

SEQ ID NO: 473494 - DNA, 1000 bp, Homo Sapiens; identical to SEQ ID NO: 342496

SEQ ID NO: 473495 - DNA, 1000 bp, Homo Sapiens; identical to SEQ ID NO: 160264

SEQ ID NO: 473496 - DNA, 1000 bp, Homo Sapiens; identical to SEQ ID NO: 160265

SEQ ID NO: 473497 - DNA, 1000 bp, Homo Sapiens; identical to SEQ ID NO: 342499

SEQ ID NO: 473498 - DNA, 1000 bp, Homo Sapiens; identical to SEQ ID NO: 160266

SEQ ID NO: 473499 - DNA, 1000 bp, Homo Sapiens; identical to SEQ ID NO: 160268

SEQ ID NO: 473500 - DNA, 1000 bp, Homo Sapiens; identical to SEQ ID NO: 342503

SEQ ID NO: 473501 - DNA, 1000 bp, Homo Sapiens; identical to SEQ ID NO: 160269

SEQ ID NO: 473502 - DNA, 1000 bp, Homo Sapiens
atatttgtcgttttttttttttgagacggagtctcgctctgtcacccaggctggagtgcagtagcatgatcttggctgactgcaacctctgcctcctgggttcaagtgattctcctgcctcagcctcctgagtagctgggattacaggcacgcaccaccaggctcggctaatgcttctatttttagtagagacggggtttcaccacgttggtcaggctggtctcgaactcttgaccttgtgatccacccgccttggcctcccaaagtgctgggattacaggtgtgagccacctcgcctggccagtggtcatgaatattaagatcatttctgcatttgtaaaacaggatcatcatactagctgggggagagctgtagcaggtgacatgaaacggcatgttctagggacctcctgcgggatgccgaggccacagcctgcactctgcgtcctcaccgctttcccccttccccacatcctcccacctttgtggatcaacatggcagctgagtatttctggcttccggtgaccagaagctcacatgaccatgatccttctaaaagctgacactcctggtcaaagtcaccaattctccctccacaggagcccagcacagaaagggtaccatccacgtgcagaatcctcactccccaagagcgggcattggtcaggaggctgctgctgcccccactgcctcctccactgatgctcccctgaaattacaacacagagtcaggtaggagcagagactccccaaggcctgaaagtgaaggggacagatagaaattgcttctgggaggcctgagtcatccatgggagggactgcagggaggcaggtaggagagagagtacagtgcccagagagtccatcccaacccccaggaagacatcctgtcctccacatggccacattgggagaggaaggaccactggtctgcctatacattgtgctctggccacctcgtgaccaggaaggaacagatgcttctgagagagctgttcg

SEQ ID NO: 473503 - DNA, 1000 bp, Homo Sapiens; identical to SEQ ID NO: 160271

SEQ ID NO: 473504 - DNA, 1000 bp, Homo Sapiens; identical to SEQ ID NO: 342508

SEQ ID NO: 473505 - DNA, 1000 bp, Homo Sapiens; identical to SEQ ID NO: 160272

SEQ ID NO: 473506 - DNA, 1000 bp, Homo Sapiens; identical to SEQ ID NO: 160273

SEQ ID NO: 473507 - DNA, 1000 bp, Homo Sapiens; identical to SEQ ID NO: 342510

SEQ ID NO: 473508 - DNA, 1000 bp, Homo Sapiens; identical to SEQ ID NO: 342511

SEQ ID NO: 473509 - DNA, 961 bp, Homo Sapiens
tttttttttttttttttggaattaattactcttttattagcacaaaataacagcaacctagcagccgcacggcccgagaataagttaaggcacagagcaggcgacgggcggctttcccagggccaggcctgcatgccccgaacttcctgagcaaactccctaggggctggggtttcgagggtcctggagggcctcttcccttgagatgaggggaacggaacagggcaagaggggcgcccccatgggcgcaaggggtccacgctgcgccgcgatcacttctcgaagtagggcaggtagaagaactggaagccccggtggcccttgaccgcgcagtagatgaagatcacgtgatagactccaggcaccaacaacaggaagcccggcacgaagaagatggcgctggagacacctggagagggggtcgcctccagtcccacgccgaccaggatcagcaccagccccagcagcaggagcaggaaggaggccagcaccactcggcggttcttctggatcaaagggtgttgggtccagctgcagcaggtgttgtaggagcgctgggtgctgctgctgatggtgctgaaggaccactgggagctgcggatggaagttcggctggaatccctggtgccgactcccccatccggctccggagaggcctgggctccatcctcatcgttctccaggttctggtagcgcagccgggactgcttgtcctcgtcagccacctcgaaccgggcccgacgctcgaagtgcagcggcccaaagcgcgcgaccccgctggactcgggcccagggcccccgtcctccagggacagctcgaaggcatcatcaatgctgaactggggccgggcggcgctcatggccccggcccgctcaggcgccgtgcgccgccgccatttgcgcccacacacccagcgtcgccgctgccccgcccccgcattgttttttttttttttttttt

SEQ ID NO: 473510 - DNA, 1000 bp, Homo Sapiens; identical to SEQ ID NO: 160274

SEQ ID NO: 473511 - DNA, 1000 bp, Homo Sapiens; identical to SEQ ID NO: 160275

SEQ ID NO: 473512 - DNA, 1000 bp, Homo Sapiens; identical to SEQ ID NO: 342514

SEQ ID NO: 473513 - DNA, 1000 bp, Homo Sapiens; identical to SEQ ID NO: 342515

SEQ ID NO: 473514 - DNA, 1000 bp, Homo Sapiens; identical to SEQ ID NO: 160276

SEQ ID NO: 473515 - DNA, 1000 bp, Homo Sapiens; identical to SEQ ID NO: 160277

SEQ ID NO: 473516 - DNA, 1000 bp, Homo Sapiens; identical to SEQ ID NO: 342518

SEQ ID NO: 473517 - DNA, 1000 bp, Homo Sapiens; identical to SEQ ID NO: 342519

SEQ ID NO: 473518 - DNA, 1000 bp, Homo Sapiens; identical to SEQ ID NO: 160278

SEQ ID NO: 473519 - DNA, 1000 bp, Homo Sapiens
gcctttcaaaatgaatgctctattttgaattttaaaaatacatacatcttacactgtaatcaaaacaaagcttaagaaagtcaattcccgcttcctttagccctgacttacactgggtacccgtttctgtggccgccgggggtgacgggcctttgcaggggctcatccccgctccactgcacattagccagccccttccgccttgtcttccccgtgttggtcatgatccccaggtactccgtggtcagaagcttctctcctgagagttctccgagctggggctggatcagttcgtctttgtccagatcggcttccatgatgtcatggtcctcttcatcatcttcatcttcatcatcatcagattcaagaacaccatctggtagctcttcggaatttagctgcttgatgatgaattctatctggcggatcatttcagcattgccttctttgatgaagcagcgtaggatgtcttccattcccattgctcttgcttcctcacgaatggatggaacagaaaggatgctgtacagagctccattcacatacggctgtatctcatggttttcatggccaagaagatccgaaaggactttgagcacgaggcctgccaccttggcacacatgttcttccctgtgctgcggaggcagaggttcatgagcaaagccaccgagtactccagcgtgtagtcagacaggcagtcagggtccttcagaacatcaaccagccagaagatgaggccgtcttgaatcatcgctgtctgcagcgggcgcctgagactgaacttctgcagggccccaggaacattctccctggtgatgatatccttgtcctcctccttcagccttccctccagcatctgcagcacctttgtgttctgggcaaggtagaggcgaccttctgccagtgacgcaaaagcattgatgagcctggccatgtactgccgcaccacgtcgctcgtggagtgcagcaactgaagcacactcctctggttgtggctat

SEQ ID NO: 473520 - DNA, 1000 bp, Homo Sapiens; identical to SEQ ID NO: 160279

SEQ ID NO: 473521 - DNA, 1000 bp, Homo Sapiens; identical to SEQ ID NO: 342522

SEQ ID NO: 473522 - DNA, 1000 bp, Homo Sapiens; identical to SEQ ID NO: 342523

SEQ ID NO: 473523 - DNA, 1000 bp, Homo Sapiens; identical to SEQ ID NO: 160280

SEQ ID NO: 473524 - DNA, 1000 bp, Homo Sapiens; identical to SEQ ID NO: 342525

SEQ ID NO: 473525 - DNA, 1000 bp, Homo Sapiens; identical to SEQ ID NO: 342527

SEQ ID NO: 473526 - DNA, 1000 bp, Homo Sapiens; identical to SEQ ID NO: 342528

SEQ ID NO: 473527 - DNA, 1000 bp, Homo Sapiens; identical to SEQ ID NO: 342529

SEQ ID NO: 473528 - DNA, 1000 bp, Homo Sapiens; identical to SEQ ID NO: 342530

SEQ ID NO: 473529 - DNA, 1000 bp, Homo Sapiens; identical to SEQ ID NO: 160282

SEQ ID NO: 473530 - DNA, 1000 bp, Homo Sapiens; identical to SEQ ID NO: 160283

SEQ ID NO: 473531 - DNA, 1000 bp, Homo Sapiens; identical to SEQ ID NO: 342534

SEQ ID NO: 473532 - DNA, 1000 bp, Homo Sapiens; identical to SEQ ID NO: 160285

SEQ ID NO: 473533 - DNA, 1000 bp, Homo Sapiens
catttttttttttttttttttttttttttgagatagagtctcgctctgtcacccgggctggagtgcagtggcgtggtctcggctcactgcaaccttagcctcccgggttcaggcaattctcttgcctcagcctcccgagtagctgggactacaggcgcccgccaccacgcctggctaattgtaagccttctttttaaacaacacactagacacctccttgtttgacccactataagcttcctcctcattgtcagcatttccacctcccttgccagaatttaaatgcctctcagtccatacagctactctccacaacagatggtgatgtctcattttctcgtgcttagactactaaccaaaaaaaaagtcctaggaagctggctttagcttcccattcaccttcctctatgtgtatgcctttgtgaacagtttgttcaacctcatccaagacatgagcatggcccaatgtaaatctctgcccagaaatatggttgcatcaagatcaatttttataattccaattgcttatgggatggagcttaatttcacattaaattcaaaaatcaaacccaaaggcatccacttcctctgtcaaactcccaaattatcaatttctgccaatggtgtcaccattctctgtatatcaaacccaaaatgtcaatctctttctttctcccatttaaaatcctataaattcaccttttccaactctccttaatgttactgatgatcattctttgacataattcctccagttggctctatactcacagatttagagttcacacctttaaaaaacaacacatgcgtcttttcaaagcatttgacatttttgatcccttatgtattattattatttcttcataattattatcatgtgatttctctaaaagcacatacctcttttggtaaggacactaatttatttctgtctgcattcaagttgctcaacttctttagttttccaatgcttttaggcagggtcaggagctgattttct

SEQ ID NO: 473534 - DNA, 1000 bp, Homo Sapiens; identical to SEQ ID NO: 342536

SEQ ID NO: 473535 - DNA, 1000 bp, Homo Sapiens; identical to SEQ ID NO: 342537

SEQ ID NO: 473536 - DNA, 1000 bp, Homo Sapiens; identical to SEQ ID NO: 342538

SEQ ID NO: 473537 - DNA, 1000 bp, Homo Sapiens; identical to SEQ ID NO: 160286

SEQ ID NO: 473538 - DNA, 1000 bp, Homo Sapiens; identical to SEQ ID NO: 342540

SEQ ID NO: 473539 - DNA, 1000 bp, Homo Sapiens; identical to SEQ ID NO: 342541

SEQ ID NO: 473540 - DNA, 1000 bp, Homo Sapiens; identical to SEQ ID NO: 342542

SEQ ID NO: 473541 - DNA, 1000 bp, Homo Sapiens
ttttttttttttttttttttttttttttttttttttttttttttttttgtggtttatggatttccatttaatataaaccttgtttcttttttgtttttaatgaaattatatctactaaagtaaatgtggcaaaatgagagaagtaaatcatagagaattgaccaaaactggcatggttattcctcctctaagccaaacgcgtccttcaaaaaggtccagtagtcaatgtatttcgcaggaataggtgatggcataccaagccaaacatcttcacatctctctttaaggtatgatgctggttgcaattcaggcactggattctttctccagttcagggcagagaaaaatgacttataatctatttgtttttcactgtcttcaaaccttgacaataaggattctagaagatcatcactcaaaggtaatctggaggatttgcacagccttttaatgtctttggtgggtaatacattttttttttctcgatcttcatacacacaggaataaatgaaagtgtcgaaattctcaaacatatttttcttgaacttttcgtgggccagtgcgattaagaaatccatatctgaacatgtgccctcaggcacacggtagtgacgtgcaatggttacaaattcttgctctgcaaggtttccaacagtcaaagacatcaatatgtctctgaatgtattataatccaccatatttgtgtgcttagagtcagcagctttaaatacctgcttgagctctctggattttccttcttcttgcttcagcttttgtagggcaagtttgaggttactgaaaggatacttatctgtattctgctccatgtagtttaaggtatactcatcagcattgagcaaacgaaataggtaaccattcacattcaccgtgactccaatgtacagctcctcggccttgatatattcagatagttcacttttaaagacttcttgtccaggcttcttaacgcgacttcttttcaagaacatcccaccagcaa

SEQ ID NO: 473542 - DNA, 1000 bp, Homo Sapiens; identical to SEQ ID NO: 342543

SEQ ID NO: 473543 - DNA, 1000 bp, Homo Sapiens; identical to SEQ ID NO: 342544

SEQ ID NO: 473544 - DNA, 1000 bp, Homo Sapiens; identical to SEQ ID NO: 342546

SEQ ID NO: 473545 - DNA, 1000 bp, Homo Sapiens; identical to SEQ ID NO: 342547

SEQ ID NO: 473546 - DNA, 1000 bp, Homo Sapiens; identical to SEQ ID NO: 342548

SEQ ID NO: 473547 - DNA, 1000 bp, Homo Sapiens; identical to SEQ ID NO: 342549

SEQ ID NO: 473548 - DNA, 1000 bp, Homo Sapiens; identical to SEQ ID NO: 160287

SEQ ID NO: 473549 - DNA, 1000 bp, Homo Sapiens; identical to SEQ ID NO: 342551

SEQ ID NO: 473550 - DNA, 1000 bp, Homo Sapiens; identical to SEQ ID NO: 160288

SEQ ID NO: 473551 - DNA, 1000 bp, Homo Sapiens; identical to SEQ ID NO: 342552

SEQ ID NO: 473552 - DNA, 1000 bp, Homo Sapiens; identical to SEQ ID NO: 160290

SEQ ID NO: 473553 - DNA, 761 bp, Homo Sapiens
tttttttttttttttgaagaaatccctatacataaaatgaaaataatttctggatattttcttcagtggtggactaagcagtttcttaaaacaagacattagtttgcccttcatttccaaatgccttgaaaataagatatactactgctttaaaagaaccatcggaatgcttcagcgctgggaacaggtgttctctctagtgaagtgccaggttttttctttagctcttcacattttctaaatttgcagatctggtgtcccgttttgcggttcctgcaactgctgcagacgccacagttgatgagcctcttgcagggcacgcagaccccacaccttttcctcttcttcttggctgggttggctccgccagctccccctgaggaggacgaggaggaggaggaatgattctgcgggcagtctgccagattggcaatttgaaacgcactgtctgtgacggctgctgaggctgctgcgggggagtgaagggctgtcatgacgatgacccctggaggtaatgagatgccccctaaagccgggatagcggaaaaagtccccacgcgctcggggagattcattatctctgcttcagcagcgccgcatttgagcttgttcatgcattcccccgccaaaggtctgcagtgttcaggggataaggtggagaggaaattagtatttgccatttgcaacgacggctctggcgggcagccagctttccccagcctctgggagtcgtttcggtggtgcatgctggtcctgccgcc

SEQ ID NO: 473554 - DNA, 1000 bp, Homo Sapiens; identical to SEQ ID NO: 342555

SEQ ID NO: 473555 - DNA, 1000 bp, Homo Sapiens
tttttttttttttgactaagcaaaatttgtacttgtttaataagaaaatcacttctttaaaaaaatagttctttacatgctgaggttcatctatgcaatgcaagagctgaaaacagattcgagaaaggctgttcctacaagggaaggtcctgaggttacaacgccggcatggccgggaaaacatggctgcagcgatcccagcttcttgctgcccacaggggtggcacatctgggcacacactgtgagctgctcagaggcactctggtgggcagctcccatcgcctcagtcagtgtctccgtccccttcactgccttccaggggactgggcaccttggcgcccgtgccacctgccgtgagagcggtggcactgaagttgtggatgggcaaggtgctcagccactgggccatggagcgttcgtcccgctcggtgccgatgatggtggggtagatgtgctcctccttgaaggctgcgacctttccttcctcctgcgcccagtccagcggctcatgcagcccatcgttgccaaagcgctggttgtacttctcgaagtgcaccctctccaggaccaggccgagtccgggcgccttgggcacgtccaccttctctgtgccccagctgcgctccagcacgctctcaggggcataacccttcacaatggccaccaccaggccgaccatcttccggatctgatgcatcatgaagctctggcccttcaccctgatcaccgcaaactccaggccctcccgcacaaagggttcctcgcagtacatctccaggatgtagcggcaggcactgggatcctgcggccccttctgcgaggtgaaattgtggaagttgtgcgtgcccttgtagcaggccaggagcctgttgacctgctgcagcgtctcggcgctcaggcggtaggtctcatcctgaacgtcccggtccttgtgcgcaaaggcaaacgtgggcagcaggtagcaataggtcctggcatcacatctgttcttggagttaa

SEQ ID NO: 473556 - DNA, 1000 bp, Homo Sapiens; identical to SEQ ID NO: 342556

SEQ ID NO: 473557 - DNA, 1000 bp, Homo Sapiens; identical to SEQ ID NO: 342557

SEQ ID NO: 473558 - DNA, 1000 bp, Homo Sapiens; identical to SEQ ID NO: 160292

SEQ ID NO: 473559 - DNA, 1000 bp, Homo Sapiens; identical to SEQ ID NO: 342558

SEQ ID NO: 473560 - DNA, 1000 bp, Homo Sapiens; identical to SEQ ID NO: 342559

SEQ ID NO: 473561 - DNA, 1000 bp, Homo Sapiens; identical to SEQ ID NO: 160293

SEQ ID NO: 473562 - DNA, 1000 bp, Homo Sapiens; identical to SEQ ID NO: 342561

SEQ ID NO: 473563 - DNA, 1000 bp, Homo Sapiens
tgaaagttgcagctcaagagaagttgtttaatgcaagagggcaggtctatacagcctggaggagcagtctgctccccgctggggtggggcagaggaaggaggggggagatgagggaagagggaggagaagaggaggaggaagggaaagggcagaagtgagggagggagacccaggcactcagggaagataaaacagcccagctaagcagtccagcttgttggtgatgactaagtatggttttgcctcagtttccccagtggcttgaaatgagaaattcgcctgagcagcgagctggcccactctcaggcctcccagtggtcttgcctcagctctggtagaagagtccactggatatcaccacgtagccctcatagacaaagatctcaggggcgacatagtggaggttgaccacaccagggagggcaattcccatggccaagagagcattgagatggtccagcaggggcttctcaaaaacggtgcccatcagtgtgcgcacctgatctgtatcaatgaagcccacgttggaggaggccaccgtgagctggacatcccccagcacagacgtggtcccctgaagcttcaccttggacacagagagctggagtctcaagttcactaccacatccagggagaagagggactggaaagccgagttggaggctgtggccaggacctccacgaagggctgcagccgcagggtggcgttgtttgtgtggagcatggccacaggtgtggcacccagccgcaccttgagcaccacaggcatgggctcgggaaactggcgggccacctccgggatgagccggcccagagcagaggtgttcagcaggttgtcatccgacctcagctgccctgtgatgtccaggttgagggcaccggccttctgcagcagcaggagcgcagagtcaaacagctgctgggagaggcccacggtggccatggagccctcggtacccacatgccttggcaacacaaaaggggtggcatccgtgggca

SEQ ID NO: 473564 - DNA, 1000 bp, Homo Sapiens; identical to SEQ ID NO: 342562

SEQ ID NO: 473565 - DNA, 1000 bp, Homo Sapiens; identical to SEQ ID NO: 160294

SEQ ID NO: 473566 - DNA, 1000 bp, Homo Sapiens; identical to SEQ ID NO: 160295

SEQ ID NO: 473567 - DNA, 1000 bp, Homo Sapiens
tttttttttttttttttgcattaagaaagctttatgttaaagtatgaacagcatttccaataaaacatgaaaagattcatattgtatctacaaaatttaagtctttgctacaataaatgctatatttcttttaaacaagcctaagaaggtaaggaatgtcatgatcaatccgtacattctctttgcagcataagcctggagactttgatgtttaaattggacaatcatagatgtgaatttcctggtcatctccaacagacacaatttttgaaccatttccattgtattttactccccagacctgatcctggtgatcaaagaaggtgtgaacacaagtcctcgttccaacatcccaaacttttacacttttgtcagacgaactggaaacaaagtgagtgtcatcaggacagaatgcaacgttcagcacccaggaggcatggccgctcagcgtgccagccaaattggcatgttgtacatcatagatcttgatgtagccatcatctgaagcagtgacaaggagctgggagtccggggaaaaggtcaaggagcgaatgggcatggcatggccttccagggtatgcagaagttttccagttgcaatatcaaaaatattgatgattccatctatggctccactggctaggtatttcccatcaggactatatgcaatactaagaatgaattttcctctcgtgtccaaagaatattcctttttcccactttccacaccaaaaatgttcactttcccgacatgagttcctgtggccagatactgggaatcaggagaaaaggccaaagtccaggcatccacaggtcctgcatctatggactttatctgtttgccattttccaagtcccaaagacgaatatgagcatcaagagagctggatgcagcaatgggcagggtgtggctgatgtccacagacaccactcccagctgatgtccctccagactccactgtaggtccagcctctcatcacgccatttccagaccttcac

SEQ ID NO: 473568 - DNA, 1000 bp, Homo Sapiens; identical to SEQ ID NO: 160296

SEQ ID NO: 473569 - DNA, 1000 bp, Homo Sapiens; identical to SEQ ID NO: 160297

SEQ ID NO: 473570 - DNA, 1000 bp, Homo Sapiens; identical to SEQ ID NO: 342569

SEQ ID NO: 473571 - DNA, 1000 bp, Homo Sapiens; identical to SEQ ID NO: 160298

SEQ ID NO: 473572 - DNA, 1000 bp, Homo Sapiens; identical to SEQ ID NO: 342570

SEQ ID NO: 473573 - DNA, 1000 bp, Homo Sapiens
tttttttaaaataagtcaaaaattttaatgggaaaatctgtgcccagtcctagaacagacaattcaattcatagcgttaccataaaattactgtcaaaaaaacgaactgaagtgggagaatgagtggcgtttcaggccatctcgagtcgcagcagacacatgagccggcgccacgggcctggctgaggagcaggggctcatgggcaccaccacccatctgggttttctgaggtcgtcggcggcacgttcagtaacaaagcaacggctggcgatacatggcagctcacgcagcgctctttcctgcttatcccccaaacttaattagatgtactggagttgatgctgccagggtctccagcaggtgaggcagttgcaggttggggggtggccccctgccagctaccctgggcctgggactgcaggcagcctcccccaggaggaggctggagagaggccagagtccgcagggtgaggaaggcgtccccagcgctgggcagcgggaagggtccagaggagccggagctaggtgttgacaggcagctggcgtggttccctgggaccccaacttccgtggtatccacagccgttttacccgtgtaaatggtagcctcttcttgaaacttccccatgttctttttataccggattcttttgttgccaaaccagttagagacctgggagatggtgaggccgcccttcctggccagctcttctttggcttcttcgctggggtaagggttgttcagatgggagtaaaaatactcattcagcacttccgtcgcctgcttgctgaaattccgccgcttgcgcctggcatcgagcagccgcgaacgcagggtcatcactgcctcacaggtgctctgcttcaactgcatctggatggcgctgaacttgccgtgaatggcgccgaccatgcgctcaatctccttaggggagacaggcctcatcctgctctgctcctggaggaggttggtgacgtgcgtggtgaactcacgacagg

SEQ ID NO: 473574 - DNA, 1000 bp, Homo Sapiens; identical to SEQ ID NO: 342572

SEQ ID NO: 473575 - DNA, 1000 bp, Homo Sapiens
tttttttttttttttttccagggtttttttttttttccaggagggattttttttttcctcttttgttatttttcaaaaaggcttgctcgccttggtacaaaaatgatccaaagctagaaaacaaggatgaaccaacaaaggcaaaaacaaaaaaagaaatgaagaaacacaacccgtttcccctccccccaaaccttcaacagctcccagctctccccaggtgcggaccttccccagccaggccccagggtctggggagtagggtggggtggggtggagatgaaggaagagaggggagaaatggcaggagtgagggagggggacaggcggggcagcggggtgaggggcttctagaaggagatggaagaattccttgccccaaaggaagtcaatacagggatagaggttctggaagccgagggcttttctgagactgggctcgaggtctcattcgacccgctcatctctttagatggtttagtggcctgctgctgggcctggatccgcatgtactcggccctctgcttgccatgtttgcttttgtcggggctgcccgcctggccctgggccgccttcagccgagaggcccccggagtcaccaccttcatgggtggtacactgcctccgccactctctagctctgcgatgatgcgatcctcgtcatcctcgtccttgatggccgaggccatgatgggtggtgtggaggctgggcgggccacctcagacacagcccggcgcagcttcacctggggcttctgcacctccagctcctcggactcagccttcttgatgaaggccgagtccttcttgctggtgaccaccacctctccggtacgtgtggtggtcaggccatgggaggaggggaagctccggcggggagggggcggtgggggcgacttggagggcttctctgtgcggtatcggggcacggtcaactcatctgagcccctcctcccactgggctccgttcggggggctgccttctggccgtggggggcct

SEQ ID NO: 473576 - DNA, 1000 bp, Homo Sapiens; identical to SEQ ID NO: 160299

SEQ ID NO: 473577 - DNA, 1000 bp, Homo Sapiens
ttttttttttttttttttgctttttaaaatttattttaaaacatgaaacccaagctgaatagaaaccacagaaattacattgacgagatttttagtatttgccaagaaaaaaagcccccaaagaaataaaaatcagcccccaaacccagttctaaaaaaacaaaaaaacacagcgacagtacatacagccatggccctacagaggctggaggagggggaaatgcaaaatggttcaggcctcagttcctggatgttaaatcacactggggtgggggaggtcagatgcccaggccgggggggtaaaccaggaggctgagtcttaaggagattatatatatatatattatatataacaaatatgaagtggttcagtacacaaccattatggttaaacacaaaacaaagatcccacaggagaggccctggtcccccgcctgcccccttgtctggggttctggggtccagggggctgcctcaccacccctctcagggctggggcagagctggccccagggcaggagcaaatgttgcttggaactcgaattgcatagtgagatgggtgggtgggcaatgggccaggggctgctcccaaccaggcccattcactaccaaccttgccatgacatgtggggggccctggggtagtggatgcctgctggggagcactctcagtgaggtaagcccctgggctcctccctcttgtccccagggccaccctgtcctcccaacgaggctgtgggcctgggggctgcaagaccccctgtgcagggtgagagtgggggctggccatggcagcaggcaccagccagatgccccagtaggtgtggcgaggtcatgggatggagtagttaggaacacggcaccgaaaactcagaacaaaaatacaaccaatggcaggcgctcccctccacctactgaggtggggtttgaaccccttttgattttccccgtttcctttcttcaaccttggtgagtagaaagtcacagacgggcacacacg

SEQ ID NO: 473578 - DNA, 1000 bp, Homo Sapiens; identical to SEQ ID NO: 342574

SEQ ID NO: 473579 - DNA, 1000 bp, Homo Sapiens
gtttcaccatgttggccaggctggtctcgaactcctgactcaggtgatccgcccgcctcagcctctcaaagtgttggattacaggcgtgagccacggcgcctggcctaaaacctttttttaccacaaaatggagacctgtaaggcgaagtgaggttggatggctggacggtgggggtggggtgcagtcctggatcagggccggagctgtcacttcttcctcttcttgttgtccgggggcgcctcgttcttcttgcccagaatctttagaaggctcttggacatgtagtagggccggtccagggagccgttgttccgctccaggtcttccaggaagcagaggaagagcgtgtccacacacatgccgaaaacgctgaagaagccgctggcgatgacataggcccccaggatggaggtcatgatgggcagccagtaatagttgaggtgggggctcttaaagtctttacccagccccgggatgcgaccggagaaaaaaaagaaggacaggacccccacgcctccgaccaccagcagcttcccaaagaacagcagcaggtctgtgactttgtccaggacgaccaccctgacaatgtttcgcatgagtagcatgaacgcatttttggctgagacacagaaattcttcccgtagatggcgatcatgatgtatgcattgcggtttaggaacttgataaatttttccagacaccagaggcagcacttgaaacagcacatgatgcagcgggctacagggttctgcactcctctgagcttgtggtcaatatactccaagatgacccgggctatctgcacaagggtcaggatgagggctccaaatgccaatgacccagtgtggtaacggagtgtgcggatgaaggcagagattaaggggaaggtagggatgtcctggggcttgtggaaggcccagtagaaggaggcaaaggctccagcgaggacgcattggcccagggccagtacccagttaagggtccagaagagccccag

SEQ ID NO: 473580 - DNA, 1000 bp, Homo Sapiens
tcagatgagccggtaggggtggtgtgccggtccctgtgatggaaagtagtagttcctcacctgcggggctggggccgataccaggagccggaggaaagcatgagtcgggggtactgggttggcttctcgtccccctgcagtcacagtcaccatcaccacggaatccggggccgctgaatctgggacctccagccacaggcggccccaggccgactcattcagttccaggtgagccctggagaggttggaggtgagggagaagctggggttgacgaaagtcctaaggtcaagatcctgagggcccgagaagctggcgatgcggagactgagcgggactttgctgcccggggccaagaaacccgaggggccactaagctccagaaggacagggactacagtgctaggctgaggggcagccctgtgcaggcgccgccccgctgcgtcctggccaatcagctccagggagaagggtctaggggtggacagcagcgtgggcgacagcgaggctgcgaggagacctcgctccggaggtcccacgggctccaagggcacctggcctagttcggcaccctctgggacccctcgaaggatgacgtgggagaaatgcggctgaggatccccaggattggctctggaacccaaccctgtcacttctaccagcagctgggtctgaagacctgcaactggctgagtcagggggtagaggccagggtggggtccatcctccatggggatcccaaagtggaagaggaagtccagggaggtctgggcttgcactctcaccccaggggtgtcctcagctgtgacctggatctcccaggttcctgtctgtggagggtcatccatggtcaccatccagaactgcccaaagcggcgagtgtgacctagaggacccccgccttcctcctggccctgggagacccctgcagggttcttgatccagaagctgctgatgtctccgtggatccggactgtgatcttctggagcagcccatccacg

SEQ ID NO: 473581 - DNA, 1000 bp, Homo Sapiens; identical to SEQ ID NO: 342577

SEQ ID NO: 473582 - DNA, 1000 bp, Homo Sapiens; identical to SEQ ID NO: 342579

SEQ ID NO: 473583 - DNA, 1000 bp, Homo Sapiens; identical to SEQ ID NO: 342580

SEQ ID NO: 473584 - DNA, 1000 bp, Homo Sapiens; identical to SEQ ID NO: 342582

SEQ ID NO: 473585 - DNA, 1000 bp, Homo Sapiens
ttttttttttttttttttatgaagaaaagaggtttaattgactcacagttttgcaggctgtacaggaagcatggctggggagccctcaagaaactgacaatcacggcagaaggcgaaggggaagcaggcacgtctggccatggtggagcaggagagacagagagagtgaagcaggagggctgcatgcttctaaacaaccagatcccatgagcactcactcactatcacgagaccagcctgcccatggccctcccctaaaccctcctgagtgcaacttacagatgcttggagagggagagaaaccagaaaggcagaggagaggcaggggggctggtgctgggattccaggcagggtacggggtgtgctggtgggggggaaaggcaaggagccctgagggggcctgtgggtgcaggagctgggacaaagcaccatgcactcactcccggcgccccatctcccccagccccatgcaaagaggccaggctaggggctgaggctggggagggggtccaggccaggcttgcagcccaccggcagtgtggcggcctcgctgggtgggatgtggtgggtcatgtagcgcttgcccatgaaggagccgatccgcagctgctccggggcctcctccggccaccacaggctggagaagcgcatggtagaggctgccaagaaggccaagagtaggaggccggccagagaagagaggatggaggtaatgacgatcatgctgccacttcgccgccctggccaggtgtcgatggatccgggggtcttcccgatagggtccagggccagggaggggcgcgttgcagaagggctgctggtggcagccgtggtcatggcccacccgcagcacgggggcgcctccgctgcccgccatggggtcgccacagggcagctggtccggagacaggggcagcgtcatgtagtggccatcggtcagcagctgtggggaggccggaatgtcagccagtgtctccgggttctggaagcccctggagg

SEQ ID NO: 473586 - DNA, 639 bp, Homo Sapiens
tttttttttttttttttttttttttttttttttttttttttttttttttttttttaaaaagggtccaaaggttttattcacatggttcatgttttcaaagagaatagaaccataattaaacataatccagtatattttcaccagttaagcagactgtcttccaggaatctggtttgatcaaagtttttttcttcatcttctggtgatttctgaagggacgccagtaagatggttgctgcctccggaatagttagtagttggggatttgggcttcgtctttccggcagtggccggtcggagaggtcctttctccggctctggtcggagatgaagcggcgaccctgtgcccctttcaggtagagcatagcttgaggagtccagttccttctctccaacagtctctgcggagcgcagctggagtttcccaggaaaacaaacaccaggaaaagagccaaggttgttgctgccagacttctgagtcccttcatgttctgcgtcttttcagaaccctgaaataactataactttatctgtgagttttcgactcttgctctgaaattggagcttttaaaatcttggtgttaagggcacctccccatctggagtagagtttgggagtccacagggacatcttgtcag

SEQ ID NO: 473587 - DNA, 1000 bp, Homo Sapiens; identical to SEQ ID NO: 342584

SEQ ID NO: 473588 - DNA, 1000 bp, Homo Sapiens; identical to SEQ ID NO: 342585

SEQ ID NO: 473589 - DNA, 1000 bp, Homo Sapiens; identical to SEQ ID NO: 160302

SEQ ID NO: 473590 - DNA, 1000 bp, Homo Sapiens
tttttttttttttttttttttttttttttttttttttttttttaagaaaagaggtttgtttaatgagaaacgtcctttcactctgtgaaaacatcgtgtggataatacataaagggcagagtcaggtgccgggggcgcatgcaggaagtgctcagctggactctgccctcggacaccgcgccactgttacatggagaagtcctcccggaggtgaatccgctgatgctgacacatgttggaactgtgccggaaggccttcccacactcgctgcacttgtagggcttctccccggtgtggatcctccggtgctgaatcaagtacgtgctctggctgaaggctttcttgcaatcgctgcatctgtagggtttctctccgtggtgcagcctctggtggtggatgagtctggaactgttgtggaaggccttcccacactcgctgcacttgtagggcttctctcctgtgtggattctctggtgctggatgaggtgtgtgctttggctgaaaactttgccacagtcattgcattcatagggcttctctccagtgtggcttctctgatgttccacgagtttggttttttgaatgaaagctttctcacattcattacatttatagggtttctctccagtgtgaattctctgatgttggataaggttagaactttgtgtaaagcctttgccacattccttgcactcaaatggcttctctccggtgtgagtccgacgatgtcggataaggattgagccatcactgaaggctttcccgcagtcattacatttatagggtttctctccggtgtggattctctggtgataaatcagggaagagtaggcgctaaagtgcttcccacactccccacacttgtagggtttctccccagtgtgaatcctctggtgcttcatgaggttgggcctccgggtgaatgtcttcccacactcgtcacaccggtagggaatctctcctgagtgcatccttcggtgattgatgaactcgcagctc

SEQ ID NO: 473591 - DNA, 1000 bp, Homo Sapiens; identical to SEQ ID NO: 342588

SEQ ID NO: 473592 - DNA, 1000 bp, Homo Sapiens
ttttttttttttttttttttggttgcaaatgccttgatttgcaactgtgagaaacagtgaccagcagtcccccagacacaaatttgctataatgttaaaagctgccaggaaagaaaaaatattttgttccaaacgacttaaaaactgttttaaggagtgtaaaaaggaaccggtaaaaaccctcgagcgtaaaatatgaaatatgattttggtttaaatgaagagcaaagtctccttattgtttacagtaaaaaacaccagctgaacactcagtttatgccgttcaggtgggggttaaataaatggaaaggcactgtatggcaactgcaagaatgaaaccaatgagacctgcgcatcatcaccatcagtattgcaaggaatgtaaaaaagcgcttttaataaataaacctaggtgtaggcatccgtgtcaataccttcaggaatttttttttttttttttttccccgcttttcatctgcaaaatgaggaactaaaatctgggaaaactacagagtcgcttggagggtaagccagagggtccttgcccttggtacaccccctgaaaacaaaacctgacaaaactcaatgtgcattaattagtgcagaaacaaagacagattcagcaagtgcaaaggtgactacaattttcccttgtccttgggaagccagctccctggtcgccagtggcagggtggtgcaggctgcttgcctgacctgccagctttgggcgccacaggccactgggcaaggccagctcctctagctggaatctcggttcttctggttccgcatcagggggctgtggtggcgcaggccctccatgctgtgccgccagtgccagcagctccggcagaagtatttgaagcagacctgatctcgacagaagaaaggaccaggctgagaactgcagatatgacacagagaatcttctaggtaggggtcaatctgaaccttctttgtgaacttggtggttttgatctccacaaaagcagcgctgact

SEQ ID NO: 473593 - DNA, 1000 bp, Homo Sapiens
cccagcattcattatatttatagagttgtagcattttagagctaacagagctcctacaagatttctaactccaaaatcattcatttaccaaataaagaaccataacctggtggaagtaggcaagttgtccaaggcagtggcagattaggactacgtaccaggtctctgggctgtccagttaaacactctcacatttttctctccagtgtaaagtctctgatggccaaaggagaatgtgcggtatgatataacagaacttatcttcagcatgactcttcattgtttatattagctatttaaaccttctgatataaaggaaattatacattctgaatcaagatttctctacttttagatggattctctgcagtggtattatctgatatgatatattgtacttcaactgaaagattcccacaatcattacatttattaggtttctacattgtatgtctcatatgattattactgaagagttaatcatgaggtaagggccagtgaaaacattcctcacgtatgagttctttgatgtcgtgtaaggtttgtactccggctgaaggcttttccgcattcattacactgatagggtttctctcctgtatgagttctctgatgcactgtaagggatgaattcttaatgaaggcttttccacactgatcacattcatagggtttctcaccagtatgaattctttgatgttcaataaggtaagcactctggctgaatgcctttccacattcattgcactcataaggtttctctccagtgtgaatgacctgatgcacggtaagggatgatcgtccagtgaaatgttttccacacaccatacactcataaggtttctctccagtgtgaattctccgatgttgagttagagatgaattcttactgaaagcttttccacactcgttacattcaaaaggttttactccagaatgaagtctctgatgttctataagatatgtactttggctaaaggatttcccgcatttgttacat

SEQ ID NO: 473594 - DNA, 1000 bp, Homo Sapiens; identical to SEQ ID NO: 342591

SEQ ID NO: 473595 - DNA, 1000 bp, Homo Sapiens
ctttatatgttttaattaattactctgtgcaaacaaatactttgtttgcctctttttttagggaggaggatgtcattagttgcaacgcctgacctcatccagtacatagtccggaaaatgcaggttgcatacttgtaaaccatccagcttgcagggcatccgagggtactcatcttccttccacttgttttcatccggatcaaaagtgaggatggaatcgctgtaatgaccattataacaaaggcctccaagaaccattatttgtttgtccagcacagtcacaccatggccacttctaccaatcggcatggatgccaagatggtccactgatcagtctctgggttgtatacttctgtagaagggcatccctgagattcgaaagaggccctcaagatcacacagacaccaccgaagacataaagcttgccattgtaagaaatcatcttgtgaaagcatctcgcgtaattcatcttgctcttattctcccaacagttggtaaccacttgagttctcctggtccgttgttctatggtcccttctttgctggggtcaaacacgcacacttgcttggaggtggaagatgaggtgattccaccggtgataaacaatttgttattgagcactgtcccctcatgtccatatttgttaactggataaggatccacaaattcccatttatcgttggtgatgtcatatctctcagttgaatagaaagtctcatctctggttctgcctgctacggcgtaaataaacttcccaataacacctacagcaaattcagagcgtggtacagacatatctgccatctgcagccaggagttctgtctcgggtcatacctgaatactttggaagaagcatggaattcaccatccgggcccagctcttccccgcctaacaggaacacaaaattattgacgatagcaaggcagtcaggtcgcagaggtacttgtgggccttctagctcccaccagactcttggtttctttaagagaagtatt

SEQ ID NO: 473596 - DNA, 1000 bp, Homo Sapiens; identical to SEQ ID NO: 342592

SEQ ID NO: 473597 - DNA, 1000 bp, Homo Sapiens; identical to SEQ ID NO: 160306

SEQ ID NO: 473598 - DNA, 1000 bp, Homo Sapiens; identical to SEQ ID NO: 160307

SEQ ID NO: 473599 - DNA, 1000 bp, Homo Sapiens
ttttttttttttttttggttttctcaagttggcaaattttatttagaaaaaaaaaagtgggagagaaaaaagtgacagcgctctttagaccaaggacttagaagagaaacctccacccttccggagcacgttagtcccttccctctctcactgctcaacctccctgggcttccagagcaagaaaaggctacgtcccctgtcgaaggagagtggacggtgaaggtgcctggaaacggccagagaaaagacctaggcggtcgatgttgcggtggaggacactgtgcagcacagccagatggggtccaccctcacctccaccctccctggagaagtcccgaatgaagcgaccccgctctgattggaagatgaacttctgaggcaagggcccatgctcccggagaaaaccccagacactgagcagcagcagacgcacctcgaaaggtgccagttggctaaatacttcatgcatattacccagggccggaggcaggaggcttccctcagccatgacagccactaaggtgcaggatgcctccaggtgccagggggagtgggtcgtgtcagggtggcgagaggcttcccaatggcccaagagggcggccagcagcccccgaagcagcacggaacagtagcacagggctgggggtgcagctgctaccagctttaacagctcaaagagcaggggctgttcgcggaagcgccggccaatgcggagatcccgctccacggtggcccgggcgtgttcctcggggggccaggccagctctgcaccagctgcatcgggacacacactctccaccaaggtcactgccactgctttggctgcctctggactcaagatgggtgccccccagcattccccacattcagtgccccctggggcactgcagcagtgaaccaggaggctgaggaggctctgggtgttatagatcacttcctgctgatttcgtgactggacaaacttgggtggctttaagccacggccgatgactccagcatg

SEQ ID NO: 473600 - DNA, 1000 bp, Homo Sapiens
ttttttttttttttttttttttttttttttttttttttttttttttttttttttttttttttttttttggagcaggaggttttattgtaaagaggccgattgtacagagcaaagattgttctgacacggggggctgggtggtgggacccagaggccagagctgggtgaaggatgaggggtggcatcgccccatccaggcagtgggcagggcagggaggactaaacggctgcctcccagttcccttccctgcccctcattactgggtaagagggagccaggctatttccacggatccaggagaatatagcaggagaccctcaccaccccacaccatgccccaaggatacgggaggtgccccagtctggcttttgcagtcggccagctcccagcctcctcgaggagcagcctggccacacctttttcccctggagcctggaacagctggctttgggttaggaggctggaagcacccccttaccctgtccaggcacctcaagggacagcccgtggttccctggtcaaaccccttagggcacagtgacccattggcttctgcctctggggctgggtagcacaggagtgggtgggcactgaggggccagcactgagccaggtcttaaagagggagtccgagtgttgggggcagtggtctctggtgggggcatagccccagagatggggctcctgtgagtccagcctaggggttgagggggatctgagccagttcacattgtcctggccacaggggtctctagggcatgacactcagggccactctgcctgttccaggccctgatcgtggtaatttaaagctcagaatggtggatgggggaagcctcagggaccaaggccctgccttcccctagactgagcccctcgtcggcttcatcctcacacccgctgtatctcaaacagcttcacgtcggtgtcgtaccagacaggggggtccacattcctcagatagatgacgccccacatgtaggtgcggaaccacatgg

SEQ ID NO: 473601 - DNA, 1000 bp, Homo Sapiens; identical to SEQ ID NO: 342595

SEQ ID NO: 473602 - DNA, 1000 bp, Homo Sapiens; identical to SEQ ID NO: 342596

SEQ ID NO: 473603 - DNA, 1000 bp, Homo Sapiens; identical to SEQ ID NO: 342597

SEQ ID NO: 473604 - DNA, 1000 bp, Homo Sapiens; identical to SEQ ID NO: 342598

SEQ ID NO: 473605 - DNA, 1000 bp, Homo Sapiens; identical to SEQ ID NO: 342599

SEQ ID NO: 473606 - DNA, 1000 bp, Homo Sapiens; identical to SEQ ID NO: 342601

SEQ ID NO: 473607 - DNA, 1000 bp, Homo Sapiens
tttgccttctattatcattgctgctggttttatcattgccactagaagtttccctacccccagtattcttcagggaagacttgcattttgcctctgttaaatcaaggttcagtggtgacagggtgaccaactcttctcattgtcggtgtcttcccggggcctgtctcccctttcttgctggtgctggtggggctggctggtggccaagcatccttggggcagagactgtcctctttggtgtcctcagtgccacgccagggcccagcctaggctggtgctccacaacaggccaggggagaggtgagcgagacccttctggtttaaccacacgggatcctcgaacagccctgccccgggagctggaacaggtctggctcgccttctgcggcaggtgccggtggtgctgggtgagccggtccagctcctgctccagcttcttagcaagtgctctcagttcctctgctgtctccgtccttgccccatcctccaggtgcttccagctctgcaggaagctgctcatgtctttcataagtaagaagccagccccagcagcacccatcacccaggcaccattggtcatggccagagttgtgccctcaaaggctctctgcacccctctagccgtccagaaagggatgtgtctcttggccacaaaattcttgaccatagccatgaagccagagttggatttggccatctggtaggcatgaagatccttgatgccctggatagcttttacacacttattaacacaaaagccagcagcctcgatttcagaccaatttattcctccgaaagcctcatgtgatgttgtcagaggccccagtcggctggctttgtctcttgctgctgaattgcttctattttctaagacatttgttactatgttggtgatggcagctgctgcccccaaccctgtcccagttgctgagagcatgagactgcctcctgctgtcacaggtgctagggccaaacccaggatgttcatgaccccagaaac

SEQ ID NO: 473608 - DNA, 1000 bp, Homo Sapiens; identical to SEQ ID NO: 342602

SEQ ID NO: 473609 - DNA, 1000 bp, Homo Sapiens; identical to SEQ ID NO: 160309

SEQ ID NO: 473610 - DNA, 1000 bp, Homo Sapiens
aatgcactgtgccacaagcctgaccgcgctatgttatgtacatttaatgtgtactcaaggaggaaaaaattactagcactactgaaaatattgcaaaattgccatagttaccgcttagagatactagttttcttctcttctttcttaaagtatatattacaactcttccataacttaatgcaaacaaagtaaattcatttcttctcacatcttaaagcaaagatatctttgtttacatgcgagaataatattctataataataccctggccctatgagccagtactttatattaggacataataataaaatgatgatatagaaagaaccagagagacctacacactgctattgatgcaaaaatccatttggaagttttctcttgtaaagggtatctaagaaagagaatagggctgaggggtgaaatgactttagaagtgggctcctatttactaagaaaaaaaccaaagccattctattgcaagatacagatcaaaggttaaaaggcaaattatactacatttagagaataaagatgtagtaattgtcaacccttaatacggcacatatgcaagtgtgctaacacaatttgcactggccataggaaaaaagcactatggaaaaaccactgactaaaaatgactgaaaaaccccgtttccctgtttcagtctaatcatttggcatctccgaatgtggtacagatttagacttgaaccaccaaagaacatcacgctgtcttatgtcaaatgctcgacaatacctctcagtaggacgttgttgcaaggctagctaattttaaatctggtatgagtaatacagtcaaacctagttagtatgcgagaaagtcgttgctaacgcatggtgagaggatgtgacgtcacagcatgagcagtccctggttgtcccattgtcagataaacgtagtgcatagatccaagtttctattccaggtctctgaaccccaaagccaggcctttcacttttgctgggtggcctggaa

SEQ ID NO: 473611 - DNA, 1000 bp, Homo Sapiens; identical to SEQ ID NO: 160310

SEQ ID NO: 473612 - DNA, 1000 bp, Homo Sapiens; identical to SEQ ID NO: 342605

SEQ ID NO: 473613 - DNA, 1000 bp, Homo Sapiens
caactaagtctctttaatattgtctttcagaagttcacacacactcacacacagatcagaacaaggcggggccgccgaggggagcggggagcggggacttgggaggtccatagcctggattcccttctgcccggctgcccaggggctgggatgggtggaagggagtatttacagagcgtttacaggcaggtttcttatcccagggagaagggtcctacaccaggaacttcccaaatgtccttaaaaaaagcaaaaggaaaggttctgggattagcaagaaaataggcagatacctgggtggaggagggacaaaaatgtacttgcaaaaaacaggagtgtgggggccttactaccccagggctcggtccttttgccggaagaaagggaggggtctgtccgtctgtgggcgaggcctggagccacaaacccaatcactggactgaatcaccccgcggagaagaaaagaaggcggagcctgccgacctggaggcggggttttgtcagagctggggcggtgcttatagaggaggcggggttttagggaccaaaccgaggttgctcggttgggggcgctacactttgagggtgagggggcctggagcgactgagggtccggcgtttggccgggatcccggaaagcggcgtccctgggggtgtgggttttggaggggttcctgaggaactggattccgagcttgctcgcaaggcgagacgttccgtggaggcggagtttacgatgtatccaagtctgacggccccagaaacgggtgtgcagggcgcccattgggtccgcggtatgactgcagaaagagcctgggagatcgaggggcgcagagtggggccggaccaggggcgtttttagggatcccagtagttctcgtggtgctgcgcggcgatgatgatgactacggtgaggatggtacagagcaccatggccgcgatgcccacggccagggagatgaaggagaagttccgggcctcgcgtgaagcgatctcggcc

SEQ ID NO: 473614 - DNA, 1000 bp, Homo Sapiens
tttttttttttttttttttttaaccaacagcacacttttatttaaggacctgtagctgtgcaggatgcaaacatctgggcatcagtgactttcctcctgcccccgtttgtccctgatggtggcagaagatcccagctgaccacagcccctttctctggggtcagagggagaagacaggcgcagtcagcaggggcagctgttgcaggtgggagggatattttcccacaggaacaaaggtctccgtgatgacacggggtctctatagtcatgttgagagcctaatggcccttggcataattgctggtgttggggtagaaggtgtcttggagtttgctcaagtggttgagagggagggaggtgccatagacttggaggaactggcacgaagccaaggatacaaatccaggcagggctgtggggcaggatagggagcagggccttctactgaaggagtgactcaggaaggaggaggggaaggtgacaagcccctgggcaggagccctgtggccatggatcattttaaattgagaccagagagtgagcagtccagggcagctataaccttggctagaaagggcagaggcagatgggcctgctccatctcgcctcttaagaaggtgggcaggacggagatgccacagtggatgccacagctgccacagcctcctgcggagaccaggaaggaagcctggctctcagccatgcaggatggaaagaaagattctattccaggaggggagctgccctggaacgccccaaggacagccaggacccactgttcattcaggattcccccattttctcctacgggagctaacgcctgtgcctgggtcctggcagcgctctggactccacactctcctcctgggtttcacctttgtaacaggatccccgcagaccacgcccacgacaaacactgtctccagcgggcaggacaaaggaagggcacggcgccaggcagtggtgtggttgcccatcaggaagaggccgacttctcccg

SEQ ID NO: 473615 - DNA, 1000 bp, Homo Sapiens; identical to SEQ ID NO: 342606

SEQ ID NO: 473616 - DNA, 784 bp, Homo Sapiens; identical to SEQ ID NO: 342607

SEQ ID NO: 473617 - DNA, 1000 bp, Homo Sapiens; identical to SEQ ID NO: 342608

SEQ ID NO: 473618 - DNA, 1000 bp, Homo Sapiens
ttttttttttttttttttttctggacagtggttttattggtaaagatataagacatattggctctattaaaaactcaggtaataaagcactaagcttgatttttgtattgctacagtctctttcttctaaggggaagaaaatctccccaagaataggatgctacctgaggaattatgccgaataaagaaaaggaatggatggtcggcagtgaaattttcttcgggcatcaacatgcagaaagttgcgatgcctgctgtggcagctgccgcctctgttccctcttcattcacttccacaaatgacttgtggacaatttttgatataaaaatatctctggctcctgacatgccagacagatcagccttgctactgttaaagagatcctgcacacctaggcgggcgaggtcggagttgagagtgtaactctcttccagtttgaacctgggcaagctgacattaacttcaatgaaatcgagattctcaggtttagtccactcatgcaacttttccaaagtcaactgttcctcaatcttcttcaggcccgtggactcgtcctcaatgtcatccggcagcaggatgaccatgctgagctcctcgccttggtaaggcagttccagcacacggcacttaaggtcctcgatgtagccatatgcaaattttttcttctgatacatcattttcacagtttttctgtctttcttattcaatctgaatggtgcattcgtcgtggcttctttcatgaatttatccttccagtttcccttgaaatagatggcatttactagcacaagtttggtcatgttatcaaccatgcccgaagccaacagttccggaatttttccttctgtctgtcctttgacccactggtttatggtcttccttgcatcttcagaggcatgctgaaaatccacactggccaggtcagcaccatatgttttctgagtcgaaaccaagaactcaggaaggaaattgtaagttttctctccatataatctatta

SEQ ID NO: 473619 - DNA, 1000 bp, Homo Sapiens; identical to SEQ ID NO: 342609

SEQ ID NO: 473620 - DNA, 1000 bp, Homo Sapiens; identical to SEQ ID NO: 342609

SEQ ID NO: 473621 - DNA, 1000 bp, Homo Sapiens; identical to SEQ ID NO: 342609

SEQ ID NO: 473622 - DNA, 1000 bp, Homo Sapiens; identical to SEQ ID NO: 342611

SEQ ID NO: 473623 - DNA, 1000 bp, Homo Sapiens; identical to SEQ ID NO: 160311

SEQ ID NO: 473624 - DNA, 1000 bp, Homo Sapiens
tttttttttttttctttaacatgtgcaaagataagcctcaggtctgttcctatcagaccctagagaactaaaaagaaagcccccttctttaaaaaccacacaccatccagagtagggtgagaaatgtaagatgagagagagggagagcctccccgtccacaggcgagttgggtctgggtcatttaccacgcgtgcggctggtgacagttccttgctgtctgacgctgagggctgtgcccggctctaggtcctgcttcccatgagacttcgctgaatccgcccagccacacacttcaccccttcccagcgccctggtgccctacttgcaggtgtgcacgtcgtagatgcgaatacactcctggcagctgacgtagcagcaccagtggaagatgcagtggcatttttccttccgcttctccgtcctcgtgttgtggccccggccacagcagagcagatcgcagccatcgatgccgtgggaggtgacattgcaagtccggtcccttgtgccaaaggaacccgtctctgggttgggctcacaaaagttgggggagttctcgtagtagaccaggtccctctccgtgggtggcttgaagagcgagtacttggcccggagggtctccacccagcctcgggactcacggtgcttctctactaccatctccgaggcgctgtcatacttgtccttgaggaagtcaccgatggcacggaagtcaggctgcgcccaccagcaggtcttcacctcacagctgcccgacagcccgtggcacttgcatttgaggtgcatgtggtccaggatagtcgtgcggcccgcctcgttgttgtgcttgttcatggccgagcgcgcgtccggcctgttctcgcgcgcatccgcgaactccctggacactaacacgccgaagtcagcgtcctcgctgcagccgccccacttccagccttcgccaggcggccccttatgatgcgagtcacagccgcaaatggtggaggtgccctcggcgcagga

SEQ ID NO: 473625 - DNA, 526 bp, Homo Sapiens
ccacctcttaagcatttattagatgcctattatatgccatatctcagcttctctggacatagacctcactaactttgaatccctgccccgagggctcatagccaggtctcctgagagcagagtgaagaggaagctcagtatttctcaggcaggccagcaggtcggaagtgattggggtctctgccactcctgccccatttattggcagcctgatcggccagcgagtcctccgcaccatggcctgtgagtctctggatattctctctggcattgctgatcacttctgcggcccaggcacccccaggtccccttttggcagcatcatagttcccccgagcatggaagtatttgtctgagccgatgtaattggcttctctcatgtcagagtaggctctccacatgtcccgagccccatcaaaagcctcgccaaggaacgaaaagaagcttcggctgctgacactcaggaccaaggagcagaaaaccaggcccgtgagaagcttcatggtgctgatctgtgctgtagctg

SEQ ID NO: 473626 - DNA, 1000 bp, Homo Sapiens; identical to SEQ ID NO: 160312

SEQ ID NO: 473627 - DNA, 1000 bp, Homo Sapiens; identical to SEQ ID NO: 342614

SEQ ID NO: 473628 - DNA, 1000 bp, Homo Sapiens; identical to SEQ ID NO: 160313

SEQ ID NO: 473629 - DNA, 1000 bp, Homo Sapiens
ttttttttttttttttttaaaacacaattactttattgatttcttacaataaaatactgccaactagcattacgtccactcttgcatcattaaaaacaaagggtatttcctccttggtattttcaaatgatgcattatacaataaacgaagttagaacttaaaatgcaccctgattaattatgtaaactggtaatttgttttaaaaagcataataatttggttcctttcttcataaaatggaaatttaaatatttcttctgatagtcttgaggttatcattatgagtagtgcaaagtgtggcacatatagtttcatctagaaaggtgtgtatctcacacaccttaaacaaacagaatgtgcattaacaaaatgcatacagtcaatgcatgatagaaagcatgtttcaaatataaggcagcccctccggccaccatattatttaggttttgcattatcatttatggcattatagattaattacacataacttttatacattttaaccctgaagataagaaaaataactgttgcttgaaagaaattcttccaggtagccatttggtttgtatcaggagaaaccgaacctccatgagtttagcgtctgccaagtcggagtcattagctgaagtgagtgaatgagatacgcagcgcatttcacagtgactgtttcccaagtcctggcaatgcctctgctcccacagtccaccagatgaagcatttccgggattacccttctatgtggttttcccttttcatttctttttgctggattaacgattactgtattatttcctcttttccccttttctgtggccttccattttaattattcataagtcctttcagaatatcctcagagagctccataagaggaagttctggagatggaaaatccaagggaggaagattggggattggaatgtccttggctttcccagtatttgctgcgaacttctgccaggttgaggaggctgtagcagtttctgcatgtggtggcaa

SEQ ID NO: 473630 - DNA, 1000 bp, Homo Sapiens; identical to SEQ ID NO: 160314

SEQ ID NO: 473631 - DNA, 1000 bp, Homo Sapiens; identical to SEQ ID NO: 246560

SEQ ID NO: 473632 - DNA, 1000 bp, Homo Sapiens; identical to SEQ ID NO: 246561

SEQ ID NO: 473633 - DNA, 1000 bp, Homo Sapiens
tttttttttttttttttttttttttttttttttttttttttttttttttttgggttgcagtgtttttaatcagagctaacagggtgagaggagttaaaaaaccaagttggcattttctgtagagcagcaggcatcaatttcgcatcacgatagagaatcaacactgagtccactctcaggctgttgcccaacccacccttcagcgctggggtatggggccagctgcacacttgagcccctcatctgtcaccagtgcccacatggtccacatctcgagggggctgaggcggtgaaccagcaggagccccctatacaggcaggggtctaaggggtccaggggccgccggattccaaatgtcttgaagccagcatggtgcatagggctcagccccagcctcctcaggcacatacccacaaagacatcatcaatggggaagagttcagcatcttccatgatagcctggaggcgccgcactgtggctctggacatgacatatcctcccccaccagcatagggtgggtagtgggtggccctgtacattgagggtgggatgaagtatttgaccttagtgttcctgttgggcagggcttggcggatgacatctcccaccaggaggtcctgggctgggtcccagccatccaggaactctaacacgttggggacgtggacaaagacatcgtcatctccctttagcatgaaatgggcctgggggcaggcagccaccacccagcgctgcaggtgcagctccttgagcgtcaggttgaagaagtcctcagtgaagtcccactggaggatgtcatcaaactccctactctcataggccagcagctgggctgggggagcggatcctgccacccctaggaggaacaccagcttcagctgccggcccctagcccatccccccaccctgccccacgtgctgcggatagccgcacgtcgctccacgtgaccaggctgtgacttgatggccaggagcaagaaggtatccttggaacagcc

SEQ ID NO: 473634 - DNA, 1000 bp, Homo Sapiens
ttttttttttttttaagatcaatattcattcttcatttgccctcgtaacgaaaatagatttttaaatgcctcaaatatacaaacatcattgatgcacacacattccagaaatgcagaggtatgctgctgccacggggtaggggtgcgggaggcggcctggcctcatggccgcagaccgtgccccagcccgggcctggcaggtagctggccactgataaatgccactgggatcctaggagaagctggggaccatgcgtgaggtactgaaggggaccatggtggatggcatcctgggcactttgtagcttgtctgagggaaaggcctctgctgccatagaaaagctggacacatgtcaccctggggccctgacatcctaaaatgccccactgactaccagtcactaggagaaaggtctccggctatgcccttcccagtgatgcttgccccagagtgactggtcacaggtgggggacaggtttgctccagaaaccgtaggcctttcttgtctggccccctaaagaggacccaagatcaggaaaactccccagtttaaaaaaatatctgtccatctgtatataaaatacctattattagctggagttgcacacatgcaggaccaggagagactgcctgaggttctgcctggaccgaaggaggcctcgctcacagcacctctgtgaggggactggtgctcctgggaagtcacttctcttggtgaccgagctgacaccccctccacttggaaagcacagggactgagcaggcgggacctgtgctggagggagaccctcctggtgaggaactatgcgggccttctgggcctcagcagctccagcccactcctggcctggcaggccacctgcccacccacccacccatctgcctctgggcccccagtgaagtcagaagaggcaggagccccgcaggctgtgagcctggcgcaggtcggctgacagcgagcttctcatctgcctggtggtagagcggacgctctcggca

SEQ ID NO: 473635 - DNA, 1000 bp, Homo Sapiens; identical to SEQ ID NO: 342621

SEQ ID NO: 473636 - DNA, 1000 bp, Homo Sapiens; identical to SEQ ID NO: 342622

SEQ ID NO: 473637 - DNA, 1000 bp, Homo Sapiens; identical to SEQ ID NO: 160315

SEQ ID NO: 473638 - DNA, 1000 bp, Homo Sapiens; identical to SEQ ID NO: 342625

SEQ ID NO: 473639 - DNA, 1000 bp, Homo Sapiens
ttttttttttttttttttaaaatttaaaataaaattttattttatcttatactcaggttcagacaatagcatgtggtgtacattcaaaatttttgacaggtacagagcacattaaaaaatgaagacatgatcaaggagatgtaagagacaaatagacaacaacattctccctgaatctggaaaaaagcaagcaataagatcacgaaaggcagctgtaaaacaggattattctgcatgtgttgcccacaactagggcaaggttatctctcatcacaagtacaaagccattgatgttagtgtgtaacagagagaaaacagaggatttgtacagctgaggaaataaatggcagatgttacacaggaagcaatataacatggtcattaagtaactgtattcaaccatcaaatttaattttaaatcttggcacagtgcccacaagccgtgtgactttagtccccttgataatataaacttcatttctctcacttataataaagagacacaaatggtacctactccataaagttacgaagaacacataaaacctgtgaagcacttataatagtgccagaacattgtgagcacacatgagatgttcattggcattattattaagggcttatataaattcccaggtaatgcataataacagtagagactgtgacaagccctggcttccataaattgtcagcttcattttccctgtttcatttgatatgttattccattttatgctttgagacagggtcttgctccgttgcccaggctggagtgtagtggtacgatcgtggatcactgtaacctcaaactcctggactcaagcgattctcccacctcagctttccaggcagtgggggctataggtgcacaccaccatgcgaagctatcatattccctatttaaaaagttgtacacaggccgggcacagtggttcacacctgtaatcccaacactttgggaggctgaggcgggtggatcacaaggtcaggagatcgagac

SEQ ID NO: 473640 - DNA, 1000 bp, Homo Sapiens; identical to SEQ ID NO: 342626

SEQ ID NO: 473641 - DNA, 1000 bp, Homo Sapiens; identical to SEQ ID NO: 342627

SEQ ID NO: 473642 - DNA, 1000 bp, Homo Sapiens; identical to SEQ ID NO: 342628

SEQ ID NO: 473643 - DNA, 1000 bp, Homo Sapiens; identical to SEQ ID NO: 342629

SEQ ID NO: 473644 - DNA, 1000 bp, Homo Sapiens
tttttttttttttttttttttttttttttggaagcctcagacgttcgttgtcactttattggttctctttgctcgtgaagatgaccctcaccttggagccacggaggcagcatgaccccagcacccgggttccaggcccccttgaggggcagctcagtgatctctgaccccatcatccacgtgtcctccggggtggtctgtgtgaaaggaaggctcggaggaggtggctcagcatcgctgcctggatccgctgcctctcagccacggagtgtttgtggacgagcgcccacacgagctgcgggggaagtggatgtggagccagtgtagacgcctccaggcctcagcgcacccagggcccacggagtgcagaaagggtaccgagatgtccctgcctggaccacaccatggctgggtgacagggagcttggtgggccagaggccacggggctgaccaggcagaaaggggagggaggaccctggttcctgagggacacactgccccagagcatgcccttgccacgccagccagctcccagctctggagaagcctcggagcccagagcacacgtgcacaccacaggcggccacgcatgtgtacacacgcgcgtacacacgcgtacacacacgcatacacacgtacacacgtgtacacatggagatgaggctgtgctggggcctcctccacccctcgccttcagcctcgccaggtgcacaggagaaaagcaaaaaaccttgagggcaaggccgggcacgtggctcctggtgggactcacacaggaggaggccacggaggcctgggctctgggaggctcacgaggcagccacggcccaggtcagtttggagttggtgctccctcgccctcggccaccccaggccccagcaggtcttcgtccagccccagtgggtgctggtccccgttgccgacggtgctgccctggtcatccttgttctgccacttctgccaccgggtctccttgtacctcaatgtgatgtcccgca

SEQ ID NO: 473645 - DNA, 1000 bp, Homo Sapiens; identical to SEQ ID NO: 342631

SEQ ID NO: 473646 - DNA, 1000 bp, Homo Sapiens; identical to SEQ ID NO: 342632

SEQ ID NO: 473647 - DNA, 1000 bp, Homo Sapiens; identical to SEQ ID NO: 160316

SEQ ID NO: 473648 - DNA, 1000 bp, Homo Sapiens
ttttttttttccaggagcacagtggcccgccctggccatgggatgagtttttaatgtgaggcaaaatcagtccacaatacaaaatctaaaaatcacacccacttttcccacctggctcccggggaggggggaagctgggggtttcttttgcctgcagggtgtggggaggagcagaggagggccaagaaagggagaaggaaacagaggccacagaggcctggctggaggtatcctgctgccccctgccctgtcctggagctgcccttggcctcctgtgccctctaccggtgcacgcctgtgtgggcccagcccccatctgtctggtctggccctgagaggctcgggcaccagctgcatcatttctctttcttctccagccccttcgatgctgatgcctctgttccctctttggattctgtcactgccgctggatccttaggatttgactcctcataactgaacatctctgtcacttctcccttggccagcgccaccaggacaggaaaaccgatgcaggcggggaccaggtataggagggcaggctgagcatgcttgaagatgtgcatgatgaagatggtaaggcccaggccgaagatgtaggctgcaaagctggtgtagaagtaggtgtgggtattcttcttcaagctgatgtcaaagcgcagcagcaaggcaatgaagatccctggaatgacgacatctccaagtcccagcatggcaaagttgtttgcttcgaggcctttctccagcagatcctggggaaacaccaattttattggtgcctcgaaggacttggccactgtcaccatcacattggtgccaaatacccagaagacatcgtagatgaagagtccgcccagcaggatgcagccagtgctgacattgttgaggtgcaggagctctactccattaagggagaaggccaggccaaaaaggttgttggcaatccagtgcttcctcagcaggtaccagacgccaacgatgctgctcaggcccaggcaca

SEQ ID NO: 473649 - DNA, 1000 bp, Homo Sapiens; identical to SEQ ID NO: 342634

SEQ ID NO: 473650 - DNA, 1000 bp, Homo Sapiens; identical to SEQ ID NO: 342635

SEQ ID NO: 473651 - DNA, 1000 bp, Homo Sapiens; identical to SEQ ID NO: 160317

SEQ ID NO: 473652 - DNA, 1000 bp, Homo Sapiens; identical to SEQ ID NO: 342636

SEQ ID NO: 473653 - DNA, 1000 bp, Homo Sapiens
ttttttttttttttttgagacacagtacaacagtctttaatgtatatataaatatgcctacataacagagtttgataagagaagttttggctatatacaactctgcatgtaatcaaactctagaacatcaaatgcaactccactgcatagctgttttgacagagcaacagttaagcataaaatagctttgcaccttattattttggagcaaaataaaaaataaccaccacaaaaaaaatctctacaataatttaaactaaaaatgttgttgaggatagggtaaacaacaaaaaagaaaataatttgatccatatgtgatatttggctgaagattaacagtgttaagtctaaccaacagcgagataattttaatttccaaagcatcttctaccgtttattagcaatatttggatattaagggaagacatttgccttaacaaaaactatactgaaaaagacaaatgaattgaaaaagacaaaaatactatccaagaattacaataaaaaatttggttaagttggaaagcctatcaaattaccttccaaattgcttttttaaagcaatttggtaagtttgaaaacctagcccaaaacaaattaatgacaagtgggtttctccagacgattaatgaagaaaaacatacttatgtgaatcaataaatatgttatttctctcaacctctttttatgctttgaaaacttgttctaaaaaagaaccattgatacatcattttgacatttctatttagtctgaaaatctctttaaaaaaaaaaaaaaggcagtattttcctccctgtaccatatctttctcgtaactataactgagctttgtccagaatcagagacagtttttctagaaaaagccaatgatcagtatacaagatacagtattttcctacagattctctctggcaagagaacatgacaatataaatcaaataaatttaatacaataaaataatgtaactcaaactgctcatttaatcccctttttgtctg

SEQ ID NO: 473654 - DNA, 1000 bp, Homo Sapiens; identical to SEQ ID NO: 342638

SEQ ID NO: 473655 - DNA, 1000 bp, Homo Sapiens; identical to SEQ ID NO: 160318

SEQ ID NO: 473656 - DNA, 1000 bp, Homo Sapiens; identical to SEQ ID NO: 160319

SEQ ID NO: 473657 - DNA, 1000 bp, Homo Sapiens; identical to SEQ ID NO: 160320

SEQ ID NO: 473658 - DNA, 1000 bp, Homo Sapiens; identical to SEQ ID NO: 342641

SEQ ID NO: 473659 - DNA, 1000 bp, Homo Sapiens; identical to SEQ ID NO: 342642

SEQ ID NO: 473660 - DNA, 1000 bp, Homo Sapiens
tttttttttttttttttttttttttttttgcttccaaacaagctatttatttgcagatataaaacaagatccaaccacgggtggcaagggcatcccaggctcacctgcagcaatgcctccctggccagaaagggcctgtaggaccagaaatgtcaactgtcccccatcccctagtcaaaaataattgggactcctagcaggagtgctaccccagttaaaacctactcaaccaagaagaatgagacaaaccaggggaaatgccaatgaaaaatcagtggctctcaggcatggagatggcagtcagccactcataccccaatgataggccaccctggaaaaactgtcccctgcagggtttccaaggatgacatcttgtcttcccccttgggtaggtcccactcttgcaacaagataaaaccttagaacctaaaaaataccctcatgcccctagaattccaaagccagctcaccccaccccacctcattctacccccacccagaacattttgctaaaattaatccgcccgtgcccatctaacaggagcccattctcaggagtgagccagtagggtcacatcctcatatgctcaccatactcctctcgggacatccactcagactggtaggtagaaaggtgagccaccacggacgctcctagccagacactaaagtttctattggaaccctcccagactgtggccttggtggaggagacgtgatcccccatcagctccctgaacaggcgctttgtgaacccgggatagagggtgttgcccccgcaggccatcacgtgggagaccagcagggggcgcagggagatctcgcaggactccacggattccacaatggcccgtgggatgctgggccccggctgctcgaacacctgcgggctaaagaacatctcaggagccacccgctgcatgggggtcagctccacgcgggagccgtctgggagctgataggtgttgctctcatccaaggcactctgctgcctctcacg

SEQ ID NO: 473661 - DNA, 1000 bp, Homo Sapiens; identical to SEQ ID NO: 342644

SEQ ID NO: 473662 - DNA, 1000 bp, Homo Sapiens; identical to SEQ ID NO: 342645

SEQ ID NO: 473663 - DNA, 1000 bp, Homo Sapiens; identical to SEQ ID NO: 342646

SEQ ID NO: 473664 - DNA, 1000 bp, Homo Sapiens; identical to SEQ ID NO: 160321

SEQ ID NO: 473665 - DNA, 1000 bp, Homo Sapiens; identical to SEQ ID NO: 342648

SEQ ID NO: 473666 - DNA, 1000 bp, Homo Sapiens
tttttttttttttttttttttttttttttttttttttttttgccttgatatattaggttaaatatcttttcatttatctcattaaatccatcttttctctaacttggcaaaggttatagcaaaagatgacatttgtcatgtgagtagctcataaaatgggagtggctatgcttctgaatcgcattcacatcaccttctaggcatattacataacacttagctatcctggggttgctccctacgaggttatcagctgatggttccaattttacaactggaaaaatggaaaccttgtccttgtaagtagtcctaatagaaatgtgacttactcatatgctcaacgggctacagagaaacaacatattatgttgtactttaattacatattatgtgtaattaaaatagaaaaaaaaaagtccgttccttctaggcataaatgtgtatttaaaatttcatagtaaacaaatacttgtaagtgataatttccccattttccaaataagataatgttgaacagacattatgatgaattttatatttgatctctttttttggtaaatgtggttgtgaaaatgagttatatattcctcttttcaaaattctccgctaaacaagcacttgtttttgatattggtcaagacatttggcatactaagtaagggagcaatgctggggaagatacctgagaagacaagcgtgccctcccctcactatctccctcactttttttgctttgaggttttaacatcaagatataaattattttaaggtctcaaaataatcctttcacaaaaataagacagttttatgttgtaaaaacattagttatttgtcaaaggtatgttcttccatcttcatctgtcactagctgtcggcatctcctttaaagatcagttttttcttcataatgacacctgcatgcggctcgttggctgtccagatatggtttacaacctaaatgtataacactgtcaaacaagagctccactgttgtttcaca

SEQ ID NO: 473667 - DNA, 1000 bp, Homo Sapiens; identical to SEQ ID NO: 158775

SEQ ID NO: 473668 - DNA, 1000 bp, Homo Sapiens; identical to SEQ ID NO: 160323

SEQ ID NO: 473669 - DNA, 1000 bp, Homo Sapiens; identical to SEQ ID NO: 336903

SEQ ID NO: 473670 - DNA, 1000 bp, Homo Sapiens; identical to SEQ ID NO: 160324

SEQ ID NO: 473671 - DNA, 972 bp, Homo Sapiens; identical to SEQ ID NO: 160325

SEQ ID NO: 473672 - DNA, 930 bp, Homo Sapiens
ttattgctttcctctgaaggacattttcagagccctctttatgtctttattcctcagactgtagataaaggggttcagcatgggggtggccacagtgtacatcactgaggctgttgcacttgtgtgtgagttgtgggttgcagcagaagtaaggtacacacctaggcccgtacaacaaaataaagagacaactgagaggtgtgatgcacaggtggaaaatgccttgtacttcccctgagctgatgagattgcacgtatggaggaaactatcttagagtaagagcaaaggatccccacaaggggaccaccagccagcagccctgctgcaaaatacatccccatgtcattaagaaaggtgtcagaacaggcaaggtggatgacctgattaagttcacagaaaaagtgggggatttccaagtctgtgcagaaggacagccacaataccattaagctttgtgacaaggaattcagggcagcaatcatccaggatgccagaaccaggagtccacagagccgagggttcatgatgactgtgtagtgcagaggatgacagatggccacaaaccgatcataggccatcacagccaggagtaagctgtctaaccctccaaaaagtacaaaaaagcacatctgggtgatgcagcctgcataggtgatgactctgctctgtgtctggatgttaatgagcatctttgggattgtagtggagatgaaacagatgtctgcaaaggacaggttggagaggaagaagtacatgggggtgtggaggtgggagtctgagattgtggccaggatgatgagcagattcccgagcacagtgaccaggtacatggacagaaacagcccaaagaggaagggctgcaattctggttcctcagaaagtcccagaagaacaaattctgaaatccctgtgtcattctctggttccat

SEQ ID NO: 473673 - DNA, 1000 bp, Homo Sapiens; identical to SEQ ID NO: 160326

SEQ ID NO: 473674 - DNA, 1000 bp, Homo Sapiens; identical to SEQ ID NO: 342660

SEQ ID NO: 473675 - DNA, 1000 bp, Homo Sapiens; identical to SEQ ID NO: 342661

SEQ ID NO: 473676 - DNA, 1000 bp, Homo Sapiens
tttttttttttttttttttagtaaacaacctagtcttttatttgcccaaggccggctgttgcaagcactgaggccccaagacttccagaagggaaggggaggaggggcaaagcactgtgcctaccaggtgctgcctgccccgtcctgcttcctgcaggaggtgggaagggagagaaaacggacattcgcgccatcaagtatctccccagttttcagccactataaatattcagttgtggaggaggaaactgaggcacacgcatccccccaggcttctacttgctagtccaaggtttaacttactccctcccctcatctctacccccagcagaatgagctgtaagcagcctggggagggtctcaggagcccatctggtggcctgtggagcggggcaggccagccagggtcaagggctaggggtggggggagcaggaggggtgtggctggaggagcagctgctggcggtggggggagtcggcactcaataggggaccccagctggggttccatactgatagcagtgggggacaggcagagccctcagctgtacagacagggaaattgaggctgagaagcctccagtctttgggtagggaggggccttccttcagctactcaggtccattcatcttccccatgaagacgctggctctggggctggagcgccttgtcagcggccactccatgtttagactgaggtacaaggggtggaaggcagccaggtcacctggccacagagcctccttcaactcttgacaaactggaggggaaccctcccccaccacagctgctggaaaagggagtgctgggctctggcgcctgtctgccttccgctgctcacgtgcttgagaaaggctcatttttagcacctggcctcttttccctgcctggagggagcttaggggacagagcagggaagaaggcaggcaagggggacagggagacctggaagcagggcccaaggggatgtctgattgcttcgttctcccctctaagggt

SEQ ID NO: 473677 - DNA, 1000 bp, Homo Sapiens; identical to SEQ ID NO: 342663

SEQ ID NO: 473678 - DNA, 1000 bp, Homo Sapiens; identical to SEQ ID NO: 342664

SEQ ID NO: 473679 - DNA, 1000 bp, Homo Sapiens; identical to SEQ ID NO: 342665

SEQ ID NO: 473680 - DNA, 1000 bp, Homo Sapiens; identical to SEQ ID NO: 160328

SEQ ID NO: 473681 - DNA, 1000 bp, Homo Sapiens
gtttttaacactgtcatggctttattcaaaacacagttgcacaaaagtattaacttcaaagtttttaaggagattcttgaggaacttaacacaatatatacatactgccatacaaaagcattaaaataggaccgaaaacttctacaaaatataaaacccacccttacttatttgcatgaaaataccacccacaaagctaaataagtcttaaaagttatctggaggctctaagtgttgttttcaaaccaaagtactctaattttgattgcacagtaagatgattgataagaaagtcaatatatagatttcattttaaaaataagtattttgtaatctggcatagtatgtaatgagaattgttaggaactagaacagggaatttcagtttttaaaagcagaagaaaaatgttatctttttggggattccaatcccctcactaaacttatccccaagggttttctttcggtcagttgtacaacatttttagtttctccacaagtaacatcataatttttactttaaaacaccaagtcatacattttacattgtagaagcagtagcagcagtactatactcagtatttaaatatgtcccagtatagaagcataacttcaattaatttgctgacactaacttcttaaaaacttacaaatattcaaaacaaagggaaaaaattttagatagccaagatttaaaaagccattgccttgaacatggagcctccatagcaaaagaggagatatacttgtatactcattatattttatttagtagccatgtaaggaaatacacactcacttatcccaaatatttttctacttttaatggacatccacttgaaaacaaatcttaattttaatgtcaatttagtttcaaatacttttccagctgcctagtatattccaattaaatgctattattatatctgttttaaaactgggaattaaaggttagaaatactttgcagagtggtatccaaatcatttgagaggccaacat

SEQ ID NO: 473682 - DNA, 1000 bp, Homo Sapiens
ttttttttttttttttgggaccctgaagtgctttattatcaggacttattggaagggtttcccagttgcttccaggcaggtgagttgatttgggggtccagttcttcaaatctgtgaggctttttctttctaatgtctgagtcccctgaggagaaaaaaatcaaatgggagcccacaagttcaggtctttcttgtaaatcaggcagtttttagtagacttcccaataggcttccctggagtcatgacttgaaggtccttagaaagatatacagtgattttattgctttgaaacgtatggcaggttcttctagggagcacctctccaacagacgaacaatcaagaaactgaccaatgaggaatgtggcttcttaaaaacagcagggagagcttctacctagagcagcatttcacttattgcaatgaggtcttcctgctgaaggcatcagaacagctgagagcagctccatcaaagcagtcagtggtacatgtgatcaatttgttttttgtatttctgggctacaaaatgtctcttaagtttcatcattggacctagctctccaccatagatggaaaagtccttctccaagatgacccacttttgaatcttctgtgcattgttcatggcttcctggttcacagcattgatgccttgctggatggccttgtagaccagggggtcttgctgcttcacaatctcagtcacggtggatgcctggctgtccagatcccgacagaagttgatggcctcaaagttcagcttgtccagaggttctccgctcatctgattcatctcacacttcagcgtcagcaacatgctcagaaacttcagtttatctcctactaacatggcgttactgatgatggggatcttcttcttaaccaaggtctcaacaggaatggggggcacattttcaccaccagcagtgataaggatttctttgatgtggccggtgacatagaggaaacccagaccgtccagctggcccagatccccagag

SEQ ID NO: 473683 - DNA, 1000 bp, Homo Sapiens; identical to SEQ ID NO: 342667

SEQ ID NO: 473684 - DNA, 1000 bp, Homo Sapiens; identical to SEQ ID NO: 160329

SEQ ID NO: 473685 - DNA, 1000 bp, Homo Sapiens; identical to SEQ ID NO: 160330

SEQ ID NO: 473686 - DNA, 1000 bp, Homo Sapiens
ttttttttttttttttttttttttttttttttttttttttttttttttttttttttttttttttttttagtggctgtaagcatgactttattagagtttaggaggtcagaaatactgaagtcaaggtgtgggcagaggccagtcccttctggaggctccagggatgtcctacttgtcctgcccagcttctccaggctgcctgtgtcggggcagggccgcgtcttcaaagctggctggctctggccctgtcatgaaggccctgtgatgacatggggcgtagctggacaattcaggatcacctctccagtcttgaaatttttttttttgagacggagtctcgctctgtcacccaggctggagtgcgtgcagtggtgcgatcttcgctcactgcaagctgtgcctcctgggttcacaccattctcctgcctcagcctccctagtagctgggacgacaggtgcccaccaccacacccggctaattttttgtatttttagtagagatggggtttcaccatgttcgccaggatggtctcgatctcttgacctcgtgatctgcccaccttggcctcccaaagtgctggggttacaggcgtgagccaccacacccaccccagtctttcttaatgacaaaagtcaccctttgctgtgggaggtcccatattcagaggttccaagattagaggggatggcctgccacccacactacccaaccccatattgccacagagcccccttcacccccagccacactcccgatggccccccagggggtgctggatctggcttcccttccccaccagcagcaaggacaaaggtgcccacagaaaccggtttaatgtgaatccaccaggtgagccccatgaaggggcccaccgcccgcagccagagaccctcgggctgtgcagcctgcagcccacatctgcctctggccctcaggggcgctggggaaaggaaggccaaagtgtatcatgttcataaaagaaaatgctggtgggcccag

SEQ ID NO: 473687 - DNA, 1000 bp, Homo Sapiens; identical to SEQ ID NO: 160331

SEQ ID NO: 473688 - DNA, 1000 bp, Homo Sapiens; identical to SEQ ID NO: 342669

SEQ ID NO: 473689 - DNA, 1000 bp, Homo Sapiens
gatatttaaatattttttaattaagctttgaattgaaactaccatttcagtggggtatgagaatcatgtattaaacaaatttgtgaaatataaaactttaacatcaattcagacgctttaacttgtgactattctgatatcccccttgacgtttgcttctatcttattattattcatttccagattcagattttgcattactttgaagagcattttatcatcttttttatctcctgaagaagcccttttgttgagagcttcttctgctacgataaaaaactgttccattggttgaagaatgcttactccatagcctttgttgctataaatatgattattagtcatcttcaatttgggtgctggaagaaccttcatattaactccacctaaggtgctttttgaactgttactggttctgaggttattacagtgatgaatttcatttctttccaaaatagctatgcttccaggatacagttcaacaccagcaccctgggcgccagttatttcactgtctgtaattgtcaaagcagcccctgtaagaacacacactcctgttccttcacattttaatatgcagttttctagagtcatgtgaccagactccaccaccacgataccatcaaccgtcccttgttgtatcaaagatagatgcattagtttcacattgtcagctttggacaccacaaaactgtcacgagaaggttcagaagtaatcataatttcctctctctttccaactccctttataatgatgtcatctgtcaacaaagcaagatttgcagcttgatattctcctggaaaaattattactgtatctccactataacaattatccaaagccaaatccaaatcaccatgctgttggagaagtgtgtctgaagataaatcctttatcatttcagtagtcatcatttttgctacaatatgtgttatagtctttccaaattctctttttcctttcctacgcctcagaattcttggaaagaaaggtccatga

SEQ ID NO: 473690 - DNA, 1000 bp, Homo Sapiens; identical to SEQ ID NO: 246562

SEQ ID NO: 473691 - DNA, 1000 bp, Homo Sapiens; identical to SEQ ID NO: 342671

SEQ ID NO: 473692 - DNA, 1000 bp, Homo Sapiens
tttttttttttttttttgatgttgaataccactgaatattttatttttatattttattacacagaaatacagcaattattacaaaacgagtattaggaatggcaaaggctttaggacagactattagcggaaaacatttggaacttaaggagtgttttacatttggaacttactttaaggagtgtcgttcagacactagctatatcttaacctcaatttttagaagtaagcaagctctcattttttgctattcatatttgaagtgattaaactcataaatttgaaatttactttttagagaccaaagattaaaattaggtgggatgtcagcttttaaaatatactaagatttcctacaactaccaatagcttatttccctgggaaacagattacattgtagtacttaacccagaactcatgcagttcatccaaaatgatggtaaacttttttcctcagaattacctaactttccttgactatgaattcaacattcaagaatcttcttctggtagcaggagcggcagagaggacaggcatggaaaggaggcctgtctcccacggagaactcctctagtgccagcagacacgcatggtggaacacatgtgagcaggacaggagggccatctctctggaacgcctgcctgcacccacgcgctgaccgccagcagcggagagaggggccaggcagatggagcactcgtgggtctcccggcgcagagcctgcacttggattttctcccattcctcttctgtgatctcatggccacatttttcttccaactgctgaagaacacttcgatttatggccaagcactgatcgatttctgcaaagagctcttcaatgttggtgttgtatgagcacaggatgcggtggctgatttctgtgaactttttttcaaagaatttttttcttaacttggcatctgtgggaggtactgttttcctcaggtttctgtaccactttctaacaacacatcctctccagtaggcttggatt

SEQ ID NO: 473693 - DNA, 1000 bp, Homo Sapiens; identical to SEQ ID NO: 160332

SEQ ID NO: 473694 - DNA, 1000 bp, Homo Sapiens; identical to SEQ ID NO: 160333

SEQ ID NO: 473695 - DNA, 1000 bp, Homo Sapiens; identical to SEQ ID NO: 160334

SEQ ID NO: 473696 - DNA, 1000 bp, Homo Sapiens
ttttttttttatgcttgaactttaggcatttattgaaaacttatacatgccatataaacaaactaaactcttttagctgctataccaagtttccataaaactgtctgctggttggggaggctacagcctgaccacattctttgccattgcctacaaggggtaagaaatggcacatggaaacatggcaggccgactcacgaacacaggcctgggccagcgctttcttcttcctcttttattcccatcagtcctagaccagagagtgaaccatgagtgctcttggttcctggcagcaggatgaggcagagagtgcccgggcacaagctgttgtagagctttccaatcttccggctccagcgccaggctgctatcttcgggtggtccagtttcagagtctgcaaggcctcctgttcaaaggggggaggtacaacacgaagccctgggagccttgttgattcaggtggtaagcctctgagccaggcatggaggtgcctgggggttagggcatgcctgcctttcagcttccagtccttgcctgtgagaatgttgagggcctgctgggcactgccaaaacttttgaatttcaggaaacagtattttttctgctttccacttttaagatctttaggcaagatcacagcttccaggccaagaaagaggcggggctcctgcaatagctgttctttgaaggtttcactcactccagacagatatatagagccttggttttcagaatctccttccagctcattcacgagggtgtcacaatcaagcgtgagctctgtcacaggcctctgcaccttgatgcagataccatctaccagaataccatccaaggactctatggccagctgggcagcttctaggacttcatactgtatacagagatgaggctgacgggtttcaagaacaaaagtcattgactggactgggccaaagcttttaaacagcctcttcagagccctgagattgcaatttttgctaaatggcccagcataga

SEQ ID NO: 473697 - DNA, 1000 bp, Homo Sapiens
tttttttttttttttttacttatttattgcttacatctgttaggtttagaaaacactcatatggaacaacaatgaagactgctgtcaaaatctgtccctttggttatattttaagagaatcctcttttaaacaaattttattcattttcttacttttttggacagggttattctttatctctcataataatttaaaatatctgaatcaaaatcctcaaaatgtttacaaaataagtagtagttttttttttttctactttaagaatctaaccaaaggaaaacaaattcagaccaaaagactgagatattttctggtttctaattagactcttctactttataaccttgtaaactaacattcttaacattccataacaaaaagggctgaaaaaaggttggttcacacagatactatcataatgcaggaaaaggatttgtgttagaattcaatgttcacattaaataaaattttcttaattatctggtttttactaatacactgttcttttgtctgatggtgcctttctttctgtgctttcttttctcttgcactgactgtcaaccttgcttagaagaggactgatttgtctctgacttatcagatggttaaagtctgccttatttgagtaagctctttaaaaatgctgttttagaaaggtcaattagttctaaacaaagatattcagttcagtaagcaactcctatagagacacttcctacagagataagccaatatttcctgttgtgctctagtgtacaaaggggcaaaggaagctgtaagtgaatgcacactgtatcagctggagtccccagaatttataatttctcacagcacttacgggagatttccactgagctcctacaccagcattttctagaattttgctgaattatttcatttgtatggagagaggtgtttcaaaatacatccaatctatcatgaaatctggatgattttttttctctgtggtgatttttggttttgcccatctctttccat

SEQ ID NO: 473698 - DNA, 1000 bp, Homo Sapiens; identical to SEQ ID NO: 342673

SEQ ID NO: 473699 - DNA, 1000 bp, Homo Sapiens; identical to SEQ ID NO: 160335

SEQ ID NO: 473700 - DNA, 1000 bp, Homo Sapiens; identical to SEQ ID NO: 342674

SEQ ID NO: 473701 - DNA, 1000 bp, Homo Sapiens; identical to SEQ ID NO: 342675

SEQ ID NO: 473702 - DNA, 1000 bp, Homo Sapiens; identical to SEQ ID NO: 342676

SEQ ID NO: 473703 - DNA, 1000 bp, Homo Sapiens; identical to SEQ ID NO: 342677

SEQ ID NO: 473704 - DNA, 1000 bp, Homo Sapiens; identical to SEQ ID NO: 342678

SEQ ID NO: 473705 - DNA, 1000 bp, Homo Sapiens; identical to SEQ ID NO: 336054

SEQ ID NO: 473706 - DNA, 1000 bp, Homo Sapiens
cgtagaaatctacacaagacagaactttattgatgtagggcttcctggcaggagtgtgtgggccccagggcagggtctgtagcaccatgagggggtggcctggatgtcggggtgcccctggggcgggcagggcagaggttggggtggatcctccccctagtcaggtcaggggagggtgtcagggaggtggtgctacccccccccctcccatagcagacacagattcccccccagctcggagtggaggggtagggcagtgctggggggcagggcaccggcagaccacctccccacccctactcttcacagtacatattccgatcaaaggagggggggagtgttggggactccctaagggtgggttcaaagggtgctggggtgaacagctgtcccctccccagacccaccctggagggggggtctcactatgtgaactggaaggggcggatgctgaagaggggctctggggggatagccagcccctctccatccccccagccagggccctgcaggggttcccaataaataacttccggctccgtctcacccttccctcccagttcccgcccccccggggccccctctggccggcccgctgcagggctggcggcggagaccccgccagctgtggctccgggtgccgcgcgccccctagtggccctggcaggttttgcagcacatctggcggaagtaggctcggctgcagaactgaaatttgagcaccagggggcagtaggcgaccttgttcacatccttgcactcttcagggccgtccccgggggttgggctgtcgcacttggcctcacactgctgcgtggtgggcggccgcagggcctccgtgcactcgtgcgacgcctggcccgtgtggctggtgcagcgcaccgagcgctgccgctgcccgacgccgcactgtgcagagcactcaccccactcgccagccacccagcgggccggggggcagcggcgcaagttgcagcgcatggtggccggtggcttggcg

SEQ ID NO: 473707 - DNA, 1000 bp, Homo Sapiens; identical to SEQ ID NO: 342679

SEQ ID NO: 473708 - DNA, 1000 bp, Homo Sapiens
tggaggacaaatttaaatttaattctatcaaaaatttagttggaggataaatttaaatttaattctatcaaaaatttatcaaatttaaattgtgcaaacactccaactgaaacaaagagcttgtcacattggcttaatgggtatgaaaatgcagttagatagaatgaagaacttctagtattcaacagtaaactaatgcagggacagtaatgtaggtttagcttgattgtggtagtctcttcacaatgtatacatatactaaagcatcatgttgtgaagcctaaatatatgcaatttttatttgttaattatacttcaataagctggggaaaaacaagatattttcaatggctagaaaaatctctccctaaaattaaatacccattaaaaattctcttcaagaattaagattaacaaaaatgatattctagataaaaactgttgtgagaaaaattatcatcagtacattcctgctgaaggaaacacaaaaggaaaaaaaataggcaaaaataaagattatctcatatggaatttcagtaagatacttctattacttggaaaattccaaaggtttttgtcctaggagaaatgccacattcttttttacacagcagattcctactctaaccctccccatacttcctacctccttagttctccttgccaccgaattatcctgacatatgtacttacgcgtttggttatttggggcctccatcacattaaactttatgtttgatgacattatggaatttgttttgcttgctcctgtgtttcttgaacctactacactgcctaatataatatgtgctcaaaatttttgaaagaaaaatataaaccaggtaaacaaatcatttcttacagtgaagtgatggaaatcagtcttaatagaaatcagatatccctcattagtcctagtggtgttgctgccagtctttaaacaacttcctaccaaagattttcttcagagccatcatcacttctttgttcctaagggtgt

SEQ ID NO: 473709 - DNA, 1000 bp, Homo Sapiens; identical to SEQ ID NO: 160336

SEQ ID NO: 473710 - DNA, 1000 bp, Homo Sapiens; identical to SEQ ID NO: 160337

SEQ ID NO: 473711 - DNA, 1000 bp, Homo Sapiens; identical to SEQ ID NO: 160338

SEQ ID NO: 473712 - DNA, 1000 bp, Homo Sapiens; identical to SEQ ID NO: 342684

SEQ ID NO: 473713 - DNA, 1000 bp, Homo Sapiens
gactccaatgtcaattaatgcttgatggtttgctatactcatttcattgggaacggttatctcaaaaatgaattttctgatgttctgcatggagtgatcttggactgaagaccttgccacactgatgacatttgtaagatttctgtccagtatagattctctgatgtctaatgacgtgtgaacgtgaagcaaaggctttgccacaatcatcacacttgtgaggtttctctcctgtataaattctcctatgttttgcataggatgaagcttgactgaagaccttggcacagtcatgacatttgtaaggtttctctccagtatgagttcaccgatgacctgcaatatgtgaacgatctctgaaaaatttgccacatttattacacttgtaagatctctcttcattatggattctccaatgatttgtaatcgttgtagcattactgaagactttgtgacaatcattacattagtcaagtttccctacaccatgaattgcctgatggtgaataagtgttgactgcttgccaaaggctttgccacactcattacacttgtaaggtttctctccagtgtgaagtccagtatgttgttccaggtgtgaatcactcccaagtcttgtcagaaaccttacatttgtaagctttctctccagtataaattctcctatgtctttaaggtgtgatttccaaatggaaactttgtcacatgcttcacatttctaaggtttctctccagtatgaattctatgatgacgtgaaaggtgtgattgttgattaaaagccttcccacattcattacacttgtaaggtttctctgcagtgtgaattctggtatgtcttgacaggagtgaattacgcacgaaagccttgtcacaaattgtacatttgtaagatttctctccagtatgaagtctacgatggtatataagggatgagcagtgacggaaggtattgccacactcattacacttgtaaggtttctcaccactatgaagtctacg

SEQ ID NO: 473714 - DNA, 1000 bp, Homo Sapiens
ttgtgtgttaaaaaggaactttattgggtgttggggattcagatgagatccatgaggatgtcgtcctccatgacgctgggctgcaggcccggctgggggaccgggccccggggacccccgctcagcagcatctgacctggcagtggagcccgagggggaagttgtgcgggccaggactgggcaggtggtggatgcaggagtgggggccccaactggggctgccccaggccctggtgcggcggaggcagcagcgcaggagcccctggtggctggaggtggtggagggaggcctggggtgggggcaccccagtctgcggcggtggtgggttgaggaggaggcttcgcagctgagggttggccccagggttctggggccgaaggatgggtccaggagggggtgggccagaagctgctccaggagggccttgaggggcacctggcgggggctgggcagtaccttggggctggggctgccccgtggccccagaggcccctacggtaccctgaggctggggctgcggtgggcggagctggagcagattctgtgagggcctggcttggtcctccagaatgggccccagccctgggggtgcctgctgtccccccattcctcgctgctgctgctccagcttctgctgctggacctgcttgtggttggtgatgacctgccggatgccgttgacgaagccgctctggtcgtaggggatgaggcccatgaagatcttcttcttggacgagtacaggagcatgagcacgcgcacctcacagggcgccgtgtgggggaagtgcacgcagcccgcgaagccgttgcccatgatgcggtagaggcctttgagagactccaggtccttgttggtgaaatggaactggaccatccttgagttccggaacaaagggcccagggtggtcagcagctgctgggggatgagctgcatgatcagcttctggggccactgctccgtcttcaggttctcgccatgattcacgtagacctggcagg

SEQ ID NO: 473715 - DNA, 1000 bp, Homo Sapiens
ggctcttaagggtctttaatggtttcattttgtggcccttccccccaaccctggtgactgtcccagcaagcagtcagtagaggtccccggagttcagtgggggcctggagatgtcggacttgtgagggaagggccactctccccttgtaacctctggtggctgctaggtggaagctgcagcaagggggtcccaagtgcagggcctctgggtgctacacatctcacagccagggcggtctggggcattgatgaaggtgcaggaaggacaggaccagctgggctggagtggactgggcaggctggaggcagctggctgggggcctggggtagccccaatgatgggggaaacaagcgtccaagttccccgtccatcttctgggggtgctgagggctaggtcctgtggctggggcttctcgaggagctgacagcaagtagaggaaagcagggtccccatcctgccgaaccccgtaagaggcaaggctgcgctcaggcacacacaggcaccgtccgatgacccagcgttgcacggctggcgggaaaccgagctctgagaacacctgctcctggagagctgcaacagtgcagtgggggtggacccgcagggcaacgtgtgcagaggacgcggcggatgcggcagaggcagcgtcttcaagtgtgacctgcagcctgatggggccaggtgggaagcaggcctcctgaagctgaacactcagggccacacgatgctgggccaggacggctgccacttgggctgcccccttctcgtctccacctgcaatagcccgggccaggctccctgccagctcttctctctccgtcaagtttccagggctcctaggaagatctgcctcaggtggagggcccttgagtgtggaggcttccgggggactgggcagggagacagggcatgcttctgggcccaaggctggtggtgagttgctcttgctgccattctgtccttccacggtggcacctcggactaggactgcccaccgctga

SEQ ID NO: 473716 - DNA, 1000 bp, Homo Sapiens
ttttttttttttttttttttctttttttttttttttttttttttttttttttttttttttttttttttttttttttttttccttgcaaaaaccctcagctcacccgagggccaatggaaatttattaattttttttgtccttttccatctttccccaagtggcttttccttgcaaaatgcctgacatgacaccagaggggaacctgggagcggggggcaccccaagggggcagcccagggacttaaatacaagctggagggcagggcacaggtgggacaggcaagagacagcacgagggacatggcttctcagggagaccaaagacttgctttcttgcaggaagcagctgtgccagagggcaggggactaggatcctgggtgcagagtgggtgagcagagaggcccccaatcctggatggaacccacattccccagagaagtagcggcaggggatgagggccttccctggtgggctccagagacggagtggggagtgagccagatgtgctaccttggggaaagggaggaggtgctagcagagtgagggttaaggctggtgcccagcctctggcacggtgggccttccgcctccgcctgacatggggacaaaggggcacggtgggcaggcagcgcatgggtctgtctccggcagggcagagggcggcaggagcagtctccctccaggctcaagacacaggcccagcactgctacccgcccacccgccctagatatactcagatcccaccgcagctggacggctcgagctgggagtgtaggaagggagaggaggcagtggggagaggaaagggtgggctgctgggcccctgtggcctccatgcctgtcctgaggtccagcccagggccctggatcccaggtcctggatcccctggccacattcctcgccctgggcactgactgcagccagggcagtagaggccggggagaccctcagttcttgggcaggacagcaggaagaagaaggagagaacccagtgca

SEQ ID NO: 473717 - DNA, 1000 bp, Homo Sapiens
cggctttcaatcacttcagtgacatttttccaaaattctgaacatccacacttagggttttctttgaatttgggggtgccctccccccacccggcagccttctgtgtcagcgggatacgatcttgatatagacaccattttttggacctagggcagatttggattctagctgcagcggtacctttcagggttgaaggtctccgggcttggccagtgctcagggtcatggtgcagggcacccacggccatctctagcacagcgcctgcggggatgcgctgccccagcacctcgcagtcctgagctgcctcccgtgtgaatctgaaagctggcgggtacatcctcagcgtctctgcaatcaccatgtccagatagggcaggccttcctcgaggctgcagaactcaggggccatgtgtttctccttaaaaacgtctacctctctcagaagcttctcttggcagtcagggttggtggccagtaggtaggtggcaaaagaaagtgtgttggtgatgatttcatagccagcgatgaggaagatgaaggcctggcccacaatctcatccacagtcaaaggcctggccatagggctgggctggtgttgccgggaagggttcggcttgcacccagtagaggagaaaacgtctctgacgatgtcaaagtcttgcacgcccatgggacttgcagaatgtcgggcatccaggaccatttggaggaagtctctccgcctctcttcggcagcttgctggtcccgcaaggcaatcacattcctaatgagtttgttaaaaaagccattcagttcgtctcggttcttattgggcaaaatccgggccagtgggaccattatggatggaaatgataagagtaaaaccaggataggtctggggatgcagaattcgaagaaacgcttgcagtgtttcacaaagggatcctcaggggcctgccaggagtccaccggggtgccaaacgggacgctggcaaccacatctgtggtgtaattgcag

SEQ ID NO: 473718 - DNA, 1000 bp, Homo Sapiens; identical to SEQ ID NO: 342687

SEQ ID NO: 473719 - DNA, 1000 bp, Homo Sapiens
aatgtatctatttgatctttaattgcacacacttaaaatattgagacagggtaaagaaagtgacaagtaattaatgcttcatatacacattaaaaagcacttttccaatatgtgaaatattttcaaaggtgatgcattttgccaaatcatgataagaaagacacaaaagatgcaaaggtgaattccattacttatttttttcagcctaatctctaagttaaaagcttttaaaatgttgccactatagagtaagaaaaggagaagcatggaagtaaatagccttccagcaaggcctgcgcttcacccctttgccctacctggctgctgcccatatctgctcactgtattcctcagaataaagtgggcctcagaaagaagagggccaaaagaaccagcccattttctagggagcagacagacggtggacccaaagcaagtgccactcaacagaacaagcctacaacagggccaaggctggctcctgcgaacccagctgttataatctccctgctcaggccatggagagacactgtcaccataccaaggaataagcggaatccttgtctaggttaaaacctccagcaggacacagaaatggattggaagccaacagactttggatgccttgtgggtgtggtcagttgtccaggggttcactggcaagacctgcagatcgtttcaaaatcagaacaaggaccttcactggcccagaacagaacaaggagaacagaaggaaattaggtctgagattgcctggaaaggttctagatcaggaatctataagacctggcatgggttatcaggctcaagagcagggtagaaaatttcccaaagatggacattttcacgaaactttctgcttttgcggtctgtagcagcagccagtgcttctgtgtccccttttggaagaggcagcatgagaactgaagccacagaagttcacagtgcatggagaaaatccaagggctcctccagaggcagcggcattgatgctccggcg

SEQ ID NO: 473720 - DNA, 1000 bp, Homo Sapiens
tttttttttttttttttttttttttgctcttggaaatatttttattggttctgagataacagggctgaggcgagctgggacgggcgcagagcgaaggtgggaggctttgccctggggcggacatgctgtgtggggtctgctggcgggctccctggcccacccagccagcagcagctgggcacatggcccttggcgcctggcatgacctctgccggcttggcacggtggcctcctcgtcggcgggcgcccccgctttccagttgcaggagttagtctttcacagtgcggaggggtgggggtccggggtgggcgcctccccggggtgcaggcaggccccatccgccagtacatcctgggctctcggcggctacagcgggtgaggcaagctctagctcctcttagccccgcctttgggagcttggcagtcctggaggggccctcgcggcctcagcgggacatcatccggacaaactcttcaaagtccactcgtccatccccattgaggtccacatctcggataatttcctctatgtctcggtgtcccacctgatgacccaggagcttcctcatagcctctcgcagctcactggtgcttatttccccatcaccattggtgtcaaactctcggaaagcatctcgcagttcctttacaccaatcatatctgctgtctctgccaggagtttaggccccattagctccacgaagtcatcaaaatctacatggccacccaggttcatgttgatctgctgggacagttcgatgagctccatctcggtgggcatgtagcccatggtgcgcatgcagttgcccagatcccggcagttgatgtagccatccttgtccttgtcgaattctctgaaggcctctcggagctcttcaatttcctctggtcgcagtgatctatcaggctgcctgttctcagcgaagcccttgcgcaggaaaatgcaggcagggcccagcaggttgtgcatgactgcgcagttctgggccagcatcagg

SEQ ID NO: 473721 - DNA, 1000 bp, Homo Sapiens; identical to SEQ ID NO: 160341

SEQ ID NO: 473722 - DNA, 999 bp, Homo Sapiens; identical to SEQ ID NO: 342688

SEQ ID NO: 473723 - DNA, 1000 bp, Homo Sapiens; identical to SEQ ID NO: 342690

SEQ ID NO: 473724 - DNA, 1000 bp, Homo Sapiens; identical to SEQ ID NO: 342691

SEQ ID NO: 473725 - DNA, 1000 bp, Homo Sapiens
ttttttttttttttttaaaattttaaatctttaatttccgttttcacgtattttcttcttgcttccaaaaggaaaggagtgcgtagctctgttgcctgtacatcgtccacagcccctgggtcggggcggggtcccctgggccgcccggggggtccacatgcagcccctgggtgggggccggcgcggggtgaggtccgggggccgccttattgctgaggtccggccggttggggccgccgctaggcgcgctggctgggcagctcctgggagatgaagcgacgcaggcgctccaggtactggctgtagagctcgatgtcgttgtgcccggcgccctccacccacagcggctccaccgccttggggcagcgctcgtagagcgccagcccgtgcgagaagtcgatcacctcgtcctccgtgccgtggatgatgagcacgggagacgtgatcttggacaccttctcgatgttagggaaggcgtcgaagcagtaggtcttcttggtgtcggggaaggcgacgcgcatgcccgaggtgagcggcgagtgcagcaccaccgcggcacactcgtagcgcgaggccaggtccacggtgggcaccgtgccgatgctctgcccgtacaggatgatgctgtccgggctgatgccgtacctggtgcgcagggcctgccaggcggcgtcgatgtcggcatagaggttcctctcggaaggcctgcccgagctggcaccgtagccggagtagtcgtaggagaagatgttgcagtggaggcgggagcccaggccaatgtagaagctgctcatctggcccaggtccacggcattgccgtgcgagaagaggaccgtgtacctggcgagaaggtggatgtacccgcaggccagggcagcccctgtgccccagctctcgcccagcaggcaaccaccaggcgctgggttgttggagtcgcccagcctgcccacccatgccagctggggatggcctccctgagcctggtgtccttgtctggcac

SEQ ID NO: 473726 - DNA, 1000 bp, Homo Sapiens; identical to SEQ ID NO: 342692

SEQ ID NO: 473727 - DNA, 1000 bp, Homo Sapiens; identical to SEQ ID NO: 342694

SEQ ID NO: 473728 - DNA, 1000 bp, Homo Sapiens; identical to SEQ ID NO: 342695

SEQ ID NO: 473729 - DNA, 1000 bp, Homo Sapiens
tttttttttttttttttttttacctatttgtaaataagtttaattttttagtttttcaatgacattcagtagagatagttatattggctatataacacaagtaaagtggtgtttggaaagttcctccattcatttgatttcctttagaaagcgaattccaaggtgtgcaatttatccatgaccacatacaatgattcaatgaactagataatgttaaatctctcaggtaactgttaaattttgaggtaggattaaaaaatacttcaggggttctactctgaccacgttctttactgatctgttgcccttggctttggggtcatgggaagaaagagggagaaaatgtcgagggagaaggataaggggatgagaggagtaccccttagaagtttgagcccattgggttgggacttttcctcccccaatcactgaagctgtagtaagagcaaatcaatgtcacatttacagttatctcttggttagccacactaattgagctaagcaaaaatgggaacatgccaaaaggatttttatttgaatttgaagtgcatcatgtgaatttttttttctacagcagacacagggccctaataatacttaacccaggctattactaaattagtttgtattacttgatgattatatatagtttgtattacctgaatctacaggtaacacaatgaattgtagcacaggcaagtggctgaggcataaatcgacagactgggaaagaatttcctctgattaaacttttgccacagacagatcatatgtagacaaacaggaattaattgggcttaattcacagcaagggtcaaatgctgaatttctaagcatttctccaaagactatgaatgttgcttttccacctccacagaaaacaaaattaaagtactttaattcacactagcaggtgggtttggccccaggtaccctgacattggcctggtctttctaatcaacttgagtgtttctgccccagacataaaaatccccttgg

SEQ ID NO: 473730 - DNA, 1000 bp, Homo Sapiens; identical to SEQ ID NO: 160342

SEQ ID NO: 473731 - DNA, 1000 bp, Homo Sapiens
ttttttttttttttttttttttttttttttttttttcctttagaattattttattaaatcataaatgtacaacagcttcttaactctacacacgcacttaaatttttttaaaggaaaaacgttatgtcttattacaccatgatcctggctaatagcttttcaaaactttgagaaaaatcttaaaaaaggtttcacatgtcacctgaaacttacaaatttaacattatcaaagaaggaatgcttctacactcttacaaagaccactagaaagaaacaacaattaaaaagctaagaaactgtctcaaaggcatttttttttacaatccttcctccacagtaaggtaatgttattaaataatccaatccattcacaaaatggctctctgcatctgctctggtgtcttctgccatatcactgcatatttatgcatgactgagataagagtttccttaacattgttatttcgataacctgaagctgttctgttacctctgggctctcatcctctcctatttatacagtgaagcccatggcaaataggaagaagctcagtatcggctcctcccaccataacccccacttcctccactgcctcctggaccatagtttcctccaccatatggtccccccatgttcctgctaccaccaaagtttccactcttcattggaccgtagttagaaggttgctggttataatttccaaaatcattgtaatttccacttccataatttcctcctccatagttgtcataaccacctccgtagcccccaccctggttgccatatccaggtcctccaccaccatatcctcctcttcctcctccataaccggggctacctccaaaattgccacctccaggtcctcctccatacccattatagccatccccaaatccacgtccactgccatatccatcagatcctcctctaaagttacttcctggtcctggtccgaaatttccaccgccaccacgtgaatccccaaagccaaagttgcct

SEQ ID NO: 473732 - DNA, 1000 bp, Homo Sapiens; identical to SEQ ID NO: 342697

SEQ ID NO: 473733 - DNA, 1000 bp, Homo Sapiens; identical to SEQ ID NO: 160343

SEQ ID NO: 473734 - DNA, 1000 bp, Homo Sapiens
ttttttttttttttttttttttttcgggagccttgctttattctgcctcgggtcggaggctgggggagcgagacctccagtgcccgtgcggctgggggagagggtggaggggccacttagatgtaggagtcatcaccaccgggcgcatcgtagggacccccacccctccccgcgccctcgccctcatcgccgctgccggagtcactggcgccatccacgtccagggtgggcgcgttgagaacgaccacgtctgcctccgtcccgatgtcctcgccaaaccagacagccttgtacccgccctctggccgccgctccttggtcaggatggacctcaccgccgtggggcttccgccagctcgggccgctgcggggggctcaggggcaccgcctggggaggcagggccggggggtgcgggctctgcgggcatcggtgcctccgcgggcttggggtcgtgcgtggggctggggacgggcgcccagttggccttgtggtcagggaggaacgcctggttgtcaaagccttggggctggggctccggagctttgccagagcagcacttgagccgggggccatagtgcttgtggacaaggacggcgaggccaaggagagccagcagcagcagcgcacccagcaccccgcccagggccgccatatccaccaccgagaagcgcttgtcctccgaggggccgccacctgaagatggggtgctcttgctgaggggcatcggctgagaggttcctggctctggggtctgtgctgtgcccccaccgggtgtggttggttggtgggaggtgctggttcccataccggggggcatcggctgagaggttcctgcctctggggtctgtgctgtgcccccaccgggtgtggctggttggtgggaggtgctggttcccatactggggggcatcggctgagaggttcctggctctggggtctgtactgtgcccccactgggtgtggctggttggtgggaggtgctggttcccacaccggggg

SEQ ID NO: 473735 - DNA, 1000 bp, Homo Sapiens; identical to SEQ ID NO: 160344

SEQ ID NO: 473736 - DNA, 1000 bp, Homo Sapiens; identical to SEQ ID NO: 342701

SEQ ID NO: 473737 - DNA, 1000 bp, Homo Sapiens; identical to SEQ ID NO: 345407

SEQ ID NO: 473738 - DNA, 1000 bp, Homo Sapiens; identical to SEQ ID NO: 342703

SEQ ID NO: 473739 - DNA, 1000 bp, Homo Sapiens
tggtgagtaatttctggtttttattttactacttttaccacaagaaaataattttaagccgagagcttttattagtcatacataataactaatagtgaaaataatcaaatggaaatagcacacagttatgtcattatattctaagaaactggaaaaatcacctctaaggttttaatcttcttttataatcctgaccataaaaaaaatttcaaaattatctccaaaactatctgatatttaaacaaaatattctaaaagtataatattattaaacattataaattaactgaatccttttttagaagtttcagaaacactaagaagtttaaggaaaaaataaaagaatccacataagatttaaataatttacacttctataaaatgcactaaatatttgaccctcaaaagaaaagtgacgtagttcatgttaatggccagcttaggacattaacatgaacattaatattaacattaaggaatttaaaagttcctttttaaacctagaaattcaaggagtttccccttctctattcgagatatacattttctttaacaactcgagagctttcaaagcataaatgtcattctttcattataacaataataggtttaaattctcagcttatttcaagtatatattttatctgtgtaatgtgtttgcaatcactgtaaacctctgtcgcaggaactctcttttttgtattagaaagttttcaatagcattggcttctttgaagagttcatctatctcatcaatgtaagatgcatctactgctgctctctcacttaaaagctttgcataggtagacaacattagattaatttccttgctcacatcatttaaatctttctccaaggcttcatctttataaaatagtccggaaatttcagagaaagatgaatctgattttccaagagaggacagctgtggactatctggcactggagactccaattctcttggcctcttgcaattcctattatcaggctttacaaggtg

SEQ ID NO: 473740 - DNA, 1000 bp, Homo Sapiens
ctccggggcccactatctttctaagtagatattatgcaaattcttccattaacaggtaagccagagtgaacatttaaaaattcagcagaggaatgacgccaacaaaatagattaggaagctttaagttcttcttccaatacagaaacattgaaaaaatgagaaagtgtctcaaccaactttattagatcagatcttttgctagttccataaaaactagcgcatctctaagagacacaggcatatcactgcttattttattcggtggtggtttttgcagatctacaataagcacaccatcttcttctctaaaaactttcattgaaacagccttgttatttaccattttcaaaaattccactttagcttcctcttcccagccttcatttgaattctgtggaacaatgtctttcaatgagcatggttgtgctaatggctggatgtcttttagcagcccttcagtatatggttcagatttccttagaaccagacataaatcatttagtgcaatatgttgcttagcagagtgttctggtctcacatgggtatcaacaactccagtgacaatcaggacttcagaatttccaaaatctaccatgaatatttgtattagtgcaacttcatggacaaataatctggttggactacaaggttttctggtatttctaccctctattggaattaattctgtgatagttcctcgacaccacattccatttttaatactgctgacaaatattcttgcacctagttccaaaatgtctgaaggatcaaggtgtgaactcctattgcaaaattcattcaccttcttctccagtactttggcgtcttttatttgtgaatacttccgaatgtagaaatggcaaggatctattacatggcttacaaaaactagctctgcagaactttccacgttgtcttcaataatttcttcaattatcacatcagggctagatcccatctgaggtaacacagcaatggttttaggggatgctgttgcaa

SEQ ID NO: 473741 - DNA, 1000 bp, Homo Sapiens; identical to SEQ ID NO: 342704

SEQ ID NO: 473742 - DNA, 891 bp, Homo Sapiens
ttttttttaatgattgaacagaatttattggctgtctttgagtgtctttggtatggctttggcagggctgtctgggttcctccgctttgcttgtttttgggctgctgctgcagcctttaaggctcttcttcgcttcttcagcttttgagtctcctggaaaacccgaatgcacagagccttcttggtcacgaatcggcggtgggctcttcggtaatacagaggggggaaggtgtactcaattcccagcccccagcatatcttctcaaagacatcatagttggtgttacggaggtttttgagcatctttttcctctggtcaatgctcattagcagatagcgtttgtgggctttgtcctttcgatgtttctccaagtgttcttcataactgcggatcttgacagacaaggcaataattcgagcctccagggatctggtgtcctctgggtttgcaacaatcttcttcataaactgttcttgcttgatttttagcatctccttcttgttggccatttccaaagacaagagtcttttcacgacatcatcaaccttctcaattccagggacattctggtagtctttgagcagcgtagaaggaggtgggtcatcatccagcctagactgggctggtttccggacgacatatccgcgcgcggcctggaggaggagacttcgaggctgcaggccccactggttgaaaggaaacttggcgctcccaccgcccggcagcccgggtactaggacctgggtaactgcccgggtccgaatcaaactcagcgtcctccacgcgaccctcagcatggtgacctctaacccccgcggggcccgcgccgcggccgccgttcgctttgcggcacggaccgggttacatgggcgccgccatgctggcccagg

SEQ ID NO: 473743 - DNA, 1000 bp, Homo Sapiens
tttacagaaagattggtttattagaatgaattagctcttgtgactgtagaggctgacatatctcaagatctgcagtcagcaagctggagatccaggagatccaatagcatagtttctttcagtccatatgccagcaagctcaagacccaagaagagccatttttcagtttgcgtctgaaagcagaaaaacttatgtcccagcccaaagcaggagttcccccttacttgaggaagaataagcccttttgttacactcaggccttcaacagactggatggggtccacccacattagggtggagtttgttctgccactgtgcagttatcattctgggatgggggtaccttactctcccaatgagaaattctaaatttcctcttttgagcctggtgcctccaccttctcagaactgcatagggcgtgagctttgttggtgatgtgacctccagaacaaactgtgagcagatttttttctttaatcctgagcctatgcttgctgctgtccttcttgactttcaactaggcctaaaaaagcggcctcggtgggaatgcatttctcttgctccacgtctattttagttgcatatctgtagtgatgacaaatgcctccagccttgtcctctgcaaggctgcactgggctgcatacaggctcctgtctcaggtgtctggtttcctccttgaaaggttggggcagcagagtcagccctgtctatctgggcaaggccctgacacttggaagcatgaaaagccatggttcaggtggagagagcttccaatgcccttggaaggattttatttcagggccgtggggcttaaaagtcatcactgtacaatccactgggagcaaagatcaagataagatgtgatggatatcataaaagcggaacagaacatcccattgctcagagatgggagaacaactctgaatggagagggctcaggttatatacattcacccttttcatgggaaagtgtgaggcctgaggtggggaaacaaag

SEQ ID NO: 473744 - DNA, 1000 bp, Homo Sapiens; identical to SEQ ID NO: 342705

SEQ ID NO: 473745 - DNA, 1000 bp, Homo Sapiens; identical to SEQ ID NO: 342706

SEQ ID NO: 473746 - DNA, 1000 bp, Homo Sapiens; identical to SEQ ID NO: 342707

SEQ ID NO: 473747 - DNA, 1000 bp, Homo Sapiens
tttttttttttttttgcaccggatgtaatttaatagggtggggaagatactcaagagcgggcatgggacggggcgcagagtccgggttaagggccttacgtagccaaaaggggggatccaggaccctcgggcccccccagccgcatctgcaggttgatgcggtagcactgaagactacagagtgcctggcctgtgcgggagcaagcgtagcggcgcggatggggacagccggggacagagcagcgcggcggcgggcctgagggggatggccgctgagacactgccgtgggggcggggacgccaggtgggaaggaaagggtggaaccctgtgctccgctgcagtagcgcaccatgggggccggagccgcagcccgccctccccgccgctcgccccgtgcgcccccccggcctccccgcccactggtcgccgcagtcttggtgaggcgctcgatagtctggttcttgtgctcttctgcccgccgcgccgcctggagccgccgcttccgcgcccgctcctcgcgcttcagcagcatctcctctgtgagggcgggaggtgggcagccctcagctacaggcagcggcagcataggggaaggttgactccgcgccttctggagcagagctcgctgtcgagcagtaagcagccgctcattgatctccttcttgaggtctccattgtcatccagctcccccttctccagggcatccagccacctctgttcctcctcttcctcctgaccccctaaccctcctgataggtcccgaagtggagagggagagagattactgtcttcatccagccaggcacggtactgctcaagggggactccttccataggttcctcttcattatccacaaccataaggggagagggtgagcgaggcccctctgggatcacagtgaaggtaggaacactcttggtccccaggacttgtcccccaagcttgattttgagtttgagctgaggcttggcaggggacggctgcgtgggcccggcgt

SEQ ID NO: 473748 - DNA, 1000 bp, Homo Sapiens
ttttttttttaacagttaagcttcctttattgtcaacaaaatatacaaactaattttcaagaggataccttttgttctaagatatattcacactagcaagattttatttattttaaagataaacatcagcagataagccattttattttccagtttcagttttataatgtcactaaagtcattatcaaattttaaatgatcacatctataatcaaaggctgatactgtaaatattatacacagtaataacaactgtcttagaagagatatagaacaaagcttatttctgcctacacatatgatgacatctattgataagcttttaagaaatatgtcataccatatgacttcaaaagatgggaaaacaggtatattaaatgaatagcaatttaaaagacgctactttcatttcctagatttcagcattaatctaggattatatgattaatttttaatcataaaaagaattttaaactaacaaattaaaatatactacctataataaatgaaatatcacactaaaatgtgtttgagtctaagtgggaggaaaatccacatttatctgatttttagtatttaaattcttgaaaaaatgtatgctttattgcagaactagcactttaacaaaatacagacaataacactatcaaaatgtatgcaaatggcagctatgtaatttgtatgtttaacaagttaaatccatgttatttcttaatttactctcccgattacctaccaccaatatcaatatgaaagaattctttaattttatcatataataccaacaccaaagcaccccctgtaccgcgaagaacattggagaaggcgccacgaaaaaaggaactgattccttcatgttggtatatcttcacaaagcagtctaaggttcctttatattgccgtttagcctcaccactctgcatcatcatacgtcttctaactgtgtcaaagggataagaaagtattccagagcatgtagtcacaacttgagcaatgaaaa

SEQ ID NO: 473749 - DNA, 1000 bp, Homo Sapiens; identical to SEQ ID NO: 342708

SEQ ID NO: 473750 - DNA, 1000 bp, Homo Sapiens
tttttttttttgctcatgctcatgtctttatttcagagtttgggcctggagatggtagtatggttctaaagctcactccatggcaggaagtggacaaaactcaacaaaagttagtgtcttgcaaaataggctgggaccgtgatatactcctgtaagagctgatccaggtcaagagagagggagggctgggaactcactgtcctctgaagaaacacccgtggaaatgctgctcagggctagatgtggattctagcagtatgaggaacccgggcagtggggcatcccgatgtacttggtgaggtccattctttgacccatatcctggggcaaccccttccagcccaaggtgccgcacactttctccctctgtgtggactccgttctgctcgggcctagggctttggtgcatagccttgtgttctcggctttcatcttcttctcttctatctccttcttcagcttcttgttttcctgctgcaagtggaccattacactgtggaggtggtccttttcgccactcagcttggcaatgtagttcacctgctctcggagctggtttcctagtttctcattggcgaccttctgctgttttgcccattgctccaagttggtcataatctgatcattccctcggtagagcctacaggtgtctttgggcacagaccactggggcaggcagcagggctccttatcgtcctcaaggaggttctcttttaaggcggccatctcctcctggaactccctgagctgctcctctttggctgccagcatcttgaggtcattctggtgttgcttctgccactgcagcacctggcagctcatctcctctagcttcttgtcaaaggcgtgcacctccagctcactctcctggtggaagccccgcagttttcttaattccgtattgagctttttcatcctttcctcataagcaatgatttcctcttccagctgagctttcttctcttgggtctgtgtcaagctttgctgcaggctctttgtc

SEQ ID NO: 473751 - DNA, 1000 bp, Homo Sapiens; identical to SEQ ID NO: 342709

SEQ ID NO: 473752 - DNA, 1000 bp, Homo Sapiens; identical to SEQ ID NO: 342710

SEQ ID NO: 473753 - DNA, 1000 bp, Homo Sapiens
tttttttttttttttttttttttttttttttttttatgaaagaggcttttaatgaaaatactgtacagtttatgtgaggcaaaggcagggggccttgtccaggaagggaagaggcccaagaggcttcctgtccccttgggggcagcagagccaaatgcttgggctcgggcccaagctgcctgccctgcaggggtccagggaggtcctgatgagtcctgccccttcccttccagagggcctgcctggcagccagcagcagggtgtttggggagcacctgttcccacacaagggtccttttagtccattccaacaggtgactccgagcagccctgaaggcttggggagggctcctgcctggcaagtgggcctggcacgagtagagggcagaggcccgccctgggtgaggaacatcatagccaggcgccgccgccgtgcgagtagctgtgctcctggccggcgacgaagccccgcagcagctcggcctcacccccaaacaccaggctctccacatccacctccagctcctcttggtctgagtctgagcgctcagaggagaggcctgaggagtccagactgtccgcccgcagccgctcccgctcggccgcccctgccagcccccggagctgctccagctgccgctgcaggctctgctgcttgctgcgcagcctctccttgagctgtcgggcccgctgctcctgatcctccagcttctggatgtgcatcctggcacggcgcagcaggctcagcgtggtgtaccgggcacagtcggcccccaggggcatctgctgcttcagccgctccaggcaccgcttcaactgggccctcctgcgcttctccagttcattgtgcactgaccgcccgctgtcctgcgcgccaggagcctgggggggtcgcttcttcctcctgtggatggggcctggactgcgatgcgggcacagggacgcataaccatgctcggcctctctctcacggcgctccaggaactcggccgcctgcagc

SEQ ID NO: 473754 - DNA, 1000 bp, Homo Sapiens
tttttttttttttttttttttttttttttgtaaaaatgatgaatattttatttttcagacgtccatattttaaatgtaatagttttataaaagaaaaggttggcaacctgttaaggagatcttcatgtgaaaaatacatgtagaagttttaaaaatttgtggatataattgtcattcagaattaagcaggttgattgctgttatctagatgggtctcttcctttatgtttttcagtcacataatcttgatttccatagttatcacatgtacttaaagaagttaatcaatgcctatatggtccaaggtataatttgcacacagtagtttttggtttttatattgtggatcatatgtatcaaaggtaatattcataaagaacaatgttatagttggctacaaagggacaattccacatttctatacagggaatattttaagggtagagttatatcagctatggtgattgagtttaaatatccctgcagggtcaggaacaaaccagctttcccataagtcgttgtgaacactagggaagtcccaaggtttatgtcttccattccagtggagtaatttagcttcctgcagaaaatgctccgaatatctggcatctggattccagcccaggtgccttatgtgccacagggggttaattgtggaatatttcccatgaaacacaatcagcattggggaggtggccacccctcctcccagggagctgctatagaggttttcctccacattcttttgcatccatttctccaattgcttggtgatgcgctggtgcttccattctgtcatgttggcaacaatcacaccaggattgaaagagcaggtgctggggctgatgccaaggtccttgatggccttcttccggtagtccagatagcccatatatgtgttctgaagtcccacgagtctgtttatgtcctgagcagagggcaaatcgcagtcatctgagaaagccgccgcgtggcccagggccaaggtggtgtcatacag

SEQ ID NO: 473755 - DNA, 1000 bp, Homo Sapiens; identical to SEQ ID NO: 342712

SEQ ID NO: 473756 - DNA, 1000 bp, Homo Sapiens; identical to SEQ ID NO: 342713

SEQ ID NO: 473757 - DNA, 1000 bp, Homo Sapiens; identical to SEQ ID NO: 342714

SEQ ID NO: 473758 - DNA, 1000 bp, Homo Sapiens; identical to SEQ ID NO: 342715

SEQ ID NO: 473759 - DNA, 1000 bp, Homo Sapiens; identical to SEQ ID NO: 342716

SEQ ID NO: 473760 - DNA, 1000 bp, Homo Sapiens
aattccgggagaaaagtaaaaccatatgacacatagacgacccagaaaacacaccaaaaaacttatgaaacacctcgatggacaaaggaaaagtttctgtcacatgacaacttaaaacgttttccacagataacgaatgggtaaaacaacaaaattaaagaatgacaaaaaaaaaaaaaaacaacccagacacacaagtatgcctcaacttctccagagttgcagaaaactgcacggaggaagcccagtcactgtagagagagagaaagaaataggagccccgtctcagggtccagggtggccctctgcagaagctgcaggtacgtgaggttctcgtgcgtgttggggtcgaagaagcccttggtgtcgtcgctggggtcggccaggacgcggttcatctcctcgtcgaagtagccgcgccggtaggccacgtccacgggcacgcggtggctgtgcacggggtcgatgacgccgcccgtggcgatctgggcctccagcaggcggatgccgtgctcccggacgatgaggtccttctgcatggcctggaagagggagatctgctgcccggtgtaggggtcggtgtagccggtgacggcgcgctcggccgacagcagcttctcctggatctcgccgcccaccacgcccgcggccacggcctcctccaccgacagcctcaggttgcgcacggggtcgatgacgaagccggtggccgcctgcgcctccagcagcaccagggccgtgccgggccgcagcacgcccttccacatggcctggtagatgctcatcttctcctggcggccgggctggtccttggcgggcaccaggacgcccgcgatgcagctggtgccctccaggtagcgcttgaccgagtccatctccgtcacctcctgcagcgtcttagtgccctgggccaggtcccgcagggtctcggggcccaggatcccggacgtgtgcagctcggaggcggacacctggcgcctcaggccgcggaaggacacct

SEQ ID NO: 473761 - DNA, 1000 bp, Homo Sapiens; identical to SEQ ID NO: 342717

SEQ ID NO: 473762 - DNA, 1000 bp, Homo Sapiens
tttttttttttttttttttttttttttttttaaggatttactaatatttattaagtgccaccaacatttcaacgggccacaggcagggctgggagttgggggagaaggagtggctcccctcccgacaacaggtgaccctcacccccggctcagggccccgagggggtcctggaaacactcacgctcaaggagcggaggtgaatggcttcctgttctcacctccgggtccaggcactgggggtgaggaagtggctgggaggccaggaagctggaggaggggaggtgctggggcccagggctgtgcgggaggggatgggatcctgtgggtaccttggcccgtgtgccagggtcgggggaacgtgacactaggtgagaattgggtagaaagtgtgtgtgaaagggcatgcgtgcatgtgatgttggtgccatatctataggtgtcgttgtcatggtgtgtgttgtcactgtgtctgtgtgtgacatcatcaccgtctgtgtgatgccatcgccgcgtctgtgtgacattaatatgtgtgacgtcgacatggcccgtgacgtcgttgctgcatctcggtgtgacgtcatgccaagttccccatgtctgtgtgcgacgtgctgcatctgcacgacgccatcgctatatctcttcgtgacgtctacatggccacgtgacgccatcaccacggtgatatgtgacgtcagcgccgttgcttgcgtgacgtcatctccgcggccgtgtgctctgggtgagggatcgtgaggcgcgggtgcgggtgtgagagggtactaggggtttgcatgcagggagttgtctgatggtggccctgggtggttgggggcggcgggagggggttgtgtcgggcgctgtgagcatatccctgcatcctccgcaaaccgccgagtcgggccatcccttggtcctcaggcctggagcctcctcagccactggatggggctacagggatgcctgcagggggcctctgggactccaggatcttcc

SEQ ID NO: 473763 - DNA, 1000 bp, Homo Sapiens; identical to SEQ ID NO: 342718

SEQ ID NO: 473764 - DNA, 1000 bp, Homo Sapiens; identical to SEQ ID NO: 342719

SEQ ID NO: 473765 - DNA, 1000 bp, Homo Sapiens
aaaaaacatagtaaatactttcaacaactaaattttagtattgacagtcatattagtcaaataaagttaaaaaaagataaaacatatcttctagtacctgttaatactagaacaaaataggctttcctgcagttttttcttggacgtaagaagtaaaacgttttagaaatttaggatactctcgctttgccactgcccttaacactgaggctggtgcccatcctccagggttcacattagctacatatgtaatcttgcatagaatgttgtccctgctaatttcctggtttccctctggtgggcttaccaaggtttgacaaatcatagcaacatttattttggcacggacacatcggttgtttagaggagcactgtcatgatccacagaaaaattacaaactatccaagtttcagggtcattttcagtcaaggctggtatctttcgaatgacagaaagatataatacgtctcgctgagaagcaggccacaccctcttgtgtgtttgataaatgatgattgcattatcagctaatgtttccaccacatgaaagttttctatagttgtttcccagtcattgcgaacgtcaacattccagaaataattgcagacttcatgtcctgtgacgcctttaactgcatgggtagcttttaaaggatccagaacaatcccattttcttctacttctcttctgtataccttcatttctccttcttctacaaccaactgccaattggcatctccgcctacatcctgtaatgagtaagtcatgtggttctgcaccatctcttcaaccttttggacaaatctatgtgtccccacagaagaaaaggcatctccagagggcaaggatgtaggccaatgtaatctcaccttttcactctgtgactgttcttctattttatcttgtctgtcaagagcagcttcaacagcatcaaagaactcttcttcattaatcagactgttagggccttcttcataatctggtcctccaaagtggga

SEQ ID NO: 473766 - DNA, 1000 bp, Homo Sapiens; identical to SEQ ID NO: 160346

SEQ ID NO: 473767 - DNA, 1000 bp, Homo Sapiens; identical to SEQ ID NO: 160347

SEQ ID NO: 473768 - DNA, 1000 bp, Homo Sapiens; identical to SEQ ID NO: 158573

SEQ ID NO: 473769 - DNA, 1000 bp, Homo Sapiens; identical to SEQ ID NO: 342722

SEQ ID NO: 473770 - DNA, 1000 bp, Homo Sapiens; identical to SEQ ID NO: 342723

SEQ ID NO: 473771 - DNA, 1000 bp, Homo Sapiens
ttttttttttttttttttttttttttttttttttttagagtcagtatttgtttttattattttgaagtaaaatttatacatagtgaaacgcttacgtctttaacatactatttgagragttttgacaaatatataaactcttgtcaatatataaactcttgtcaatatatagagtattccaccaccccaaaacatttcctaaagtctctacccattactgtctctactccacctggaaacgcagagaggcacagccctatctcttgcacccataaggacactcacagcatagactgggcgagggccagcatctctggactgactgcccatcagggagggcttaggcctcagccagctgctgcagcaacgagagagtcccatagagggcagacaggggcatctttgcttctacatcccaggttgacctggggttatccagctccatcctaaggccacactcctccagcaggccataggtgatggccaaaccctcactctggagtggggcgaggagctcaggtttgagggtgaagggaatgctccaggggtatctgaagtttggctccaggatgctccttaccagctcctgttgctgaagcaggatcctcttctccatggaacaggccagcaaatcgtgttggaagtcactcagcaccattatggcttcaaggagataaagaatggggtcctttgggttaaaccatgcatggtttgaatcctgttgaagtttctttaggatggcaccaccagggccatccaaatgacctgagctgtccaattccagcatgttcatcaggtcctgtagagcccctctgtctctgagcatggccaggatactgtagaacatgacatcctgaacatcctttgagagctgagccagtgtctttattttctggaaaacctcctcttgtagatgcttgaaattttgccagaagggttcctctattcttcctactgggaggatgtgaacttgttcgtattttggcaaatgcccgctcaa

SEQ ID NO: 473772 - DNA, 1000 bp, Homo Sapiens; identical to SEQ ID NO: 160348

SEQ ID NO: 473773 - DNA, 1000 bp, Homo Sapiens; identical to SEQ ID NO: 342725

SEQ ID NO: 473774 - DNA, 1000 bp, Homo Sapiens; identical to SEQ ID NO: 160349

SEQ ID NO: 473775 - DNA, 1000 bp, Homo Sapiens; identical to SEQ ID NO: 342727

SEQ ID NO: 473776 - DNA, 1000 bp, Homo Sapiens
ttttttttttttttttttttttaacagaaaaaaatatatatatttcaaaggtaactagttttgttttactcaaactatttacaacaaggggcagagtagagacatgaatagctgcacaagttattttaattataaattaataaaagcctacattaaattcatcttattaactacttatgagagtgtataaaaactgatgaagccaacattatttggtacttctgatacttccattcgcttcaacttttctttctaaatagaaaattaaaagatggcaagccatttacaaaaagacatgtaattttgttaatcaggttgacattttgaacatcttcctcttcagttcagctgtcttctcatctatcttagcataggagtcctctgctgccttttcaataccgtcgtggtatttctccaaagcagttttcaagtttagaaatatttcctgggacttcagtttctccctttcagcagcatcttttagttgttgaattccaagtttaattttttggatttcttgattaattgtggttactcgttcatagacagcacctcttttttcttgaactttattgcaatcctcaattactgtgcgtttgtattgcttaacatcttcatgcttcttatttattttgaattgtgctgtggcaagtttttccttcttcacaatcatcagtcttttgaacgaattttcttcagtcttcaatttcttcagttctgactcatcactctcaatttggtcctccaagttcaggctctcctttaagatactggctaatttttccctattatctgaaaggtcctgtattttcttttgatataactgcacttccaactgacatgaaggcaggcagtcaactgagtctccatagatttcatatttctccaccacttcttgtctggcatttttaagcttctggaccgtatctttcattttttctttataattctttaacttctctggagaatccacaatttttgttttcaaactctcttgtat

SEQ ID NO: 473777 - DNA, 1000 bp, Homo Sapiens; identical to SEQ ID NO: 342728

SEQ ID NO: 473778 - DNA, 1000 bp, Homo Sapiens; identical to SEQ ID NO: 160350

SEQ ID NO: 473779 - DNA, 1000 bp, Homo Sapiens
ttttttttttttttttttttttttttttgctctagctggcgactttattcaaaggggagagggaaaagtgagagagttgggtcatttctgggataacctggagaggggtgggtctctggagctccagggaggagggacagacatctcaaaactattacagaaggccgagaggacgaggggtggggttctgggtgtcctgaggggcggggctgggggaagggtcgctcccccaactcagggccacgcgtccgctaggggccgctgccgcttccactgccactcccgctgcccgcagcgtccaggatggaggtgcgagggctgcgggaacgccgggagggagcttcccggccccgtcgtcctggtctgggacgaggtaccgcggagatggagatgttgaagcagtgacgggctccaggagcagccaccggtagggcgtggcccagagccgagcgacaaaggtccgtcccgtctgcgaaggtctgtccataggtaaggcagctgggctcacagccccttttttctgagagtgggagccaagtcgggccgcaggtgatatcatcttcgcagttggcgaaccaggcctggcagagctcctcgcagagcggctgtgcctggcgtacccccaatagccgcaggcggaagcgactgcgaagggcacgttggaggtgttccaggaaggattcgcattcagggctcggcactccacagcgttctggatggtttccagggcccgatgtctctgttgtgtccatctctgagggacaacaaggtcctgccaggtgcagcttgcctttgcccagatcagctgccagcccatggtgttgctgggacctggcttggagtgggcggctccctccacaggcttctagcaggatccatgccaaggtcagttgcagcacccacgtcaggccgatgggtcgcatgtggaccctgcagtccatgtccacctgagataagagctccaaggtggggagggattctgtagccgagaagcgtcctc

SEQ ID NO: 473780 - DNA, 1000 bp, Homo Sapiens; identical to SEQ ID NO: 342731

SEQ ID NO: 473781 - DNA, 1000 bp, Homo Sapiens; identical to SEQ ID NO: 160351

SEQ ID NO: 473782 - DNA, 1000 bp, Homo Sapiens
tgggaaataactcgtggtgtcgcccggcggccggccaaagtttagggggagaaaggagggggagagagacttgagctgggcacagagaggcagaacttcgagagacggacacacagggcacctcctgttcccagggccagaggagaggcagggcagtggcagagaccaaggaccagaccccatttcagggagaaatacgcagagagatgagggtggagagttctagaggcagacagccagttggatccctagggcctaggacaggggcctgccacatgaatagatgctcagtacatttttgttgaatcaaggaaaaggtcagaaggcaggcgatggagaagctgaaaaagcagatggaaaggggaagaggcctggatgggaagtggtctcgattgtccggtggcacagtgtggggccagtcagcagcctgggaccggtaaagggacaggaaggagcagggagggtggtagggtcccatgagccccagctgaggacttctcttccccctccctgggagccccagagaaggatgggtagagaccctgctgatgctccttcctttgttcccctgcgtgccagccctgaccggcaaaagaggacgggcaggaagagggcaggggccggcttcagggtcagggctgggcacaagcttccaggtcagctgcctctggcagcctgttgcagttgaagggccagggggtgcccagtagtgccaggccagactggcactggtgctccgcttcctggcagacagagcggcaagggggcagaacactgcctagtggggtgcaacggggcacaagcagcccacacaggagcctccggaaatgctggtagcagggcaggcttgtcaggctcttgtaaccgctgaggacctctaccacctcctcctgggtgatcatgcccacccagatgttagggaaggctgtggtgttgtagctcagaccgaggcacatctccacctggacaggctcacaggccagctctgggggtgggaaca

SEQ ID NO: 473783 - DNA, 1000 bp, Homo Sapiens; identical to SEQ ID NO: 160352

SEQ ID NO: 473784 - DNA, 1000 bp, Homo Sapiens; identical to SEQ ID NO: 342732

SEQ ID NO: 473785 - DNA, 1000 bp, Homo Sapiens
tttttttttttttttttttttaaggaagaaaaaagcctctttattgaactgaaacagtgtcccagacttatcccattttccttctcactgggggaagggaaggactctgctttagaataacctgggggtcactggcagggcacagaaggaagtgtaggtgacgcgggctggcctggggcacaatgggtggagctgcgcaatggggcagagacacattacactgtttcctcagctctgtagatggcttaaataactccataagataaagttttcttaaaatgtgaaggcaaatttcactgatgactcatcagtgtatttgttcagagtagaggccacacaggctgtcttggagaaaccccattgccttcacttagaacacactcaattctccagatttgtcagagaaggtggctcttacatccccctctgactgtgtggctcctgtcccaggcacagctgccctggcgctgtgatgacagaggagggtcaacattgccaatagtgtctgtgcatctgggctgagcagaaacaaggaaggggaagcgtcctcagtattctatgtggaaaggatagtctttgtgatttttagttctattcagacaccaatcattcaatctgtatattcttccctctgttttaaaaagaaggagccatatttacatggggaacatggccagtcggagattcctgtttaggctgaggatgttatccatatcgtgctgtgttaattcaaaatcaaacacctggatattctctttaatgtgacttggggtgatagatccggggatcactatcacattcctctggatttgaaatcggatcaaaatctgagcaggagacttgccgtgctcctttgcaatcctcttgatcacagggttgtctatcaggtcaaccccctcacacgagccaccaagaggacggtaagcagtcacggacacatctctggattggcaaaaactgatcagattcttctgagtaagatatgggtggcactcaatct

SEQ ID NO: 473786 - DNA, 1000 bp, Homo Sapiens; identical to SEQ ID NO: 342734

SEQ ID NO: 473787 - DNA, 1000 bp, Homo Sapiens; identical to SEQ ID NO: 160353

SEQ ID NO: 473788 - DNA, 1000 bp, Homo Sapiens
ttttttttttttttttcaaaccacatccgtgaaatcacttttatttttatttttttccacatagatgacttcatgtcaactacaaaaatcatgaaatgaagaactgattgtgaaactgcaaactcaaaatcactggagtgataaacaggttttcccccagatgacttaaaaaaaataaccaggataccatgaattcatgtttaagtagtaaacatgtcatatatttaaaaataataaatatagaatagcagtacagaaactaatagcataaacagcatgaagtatattttacttttaagacagatgaaatttctaggcacagctttaggcattaaagaggacacagaggcataggttagagtgcactgctctgtacaaaaatacagtctgaataaattacattgctagccatacaattagacgtcacttaccagtcagttcattgcatgtttaataatatacaggtacatgctaatccatatatatcatttatattcaaacacataagtctctctatatttatgtctttaaaatttacatgttgaacttacaaaaagctaaataattgtgcaagaaatcggaataactagccctgctgagtattttatgctatatgtgtgtgagtatatatatgtgtgtatatctatatctatagatgtagatctatatccatagatatctatctaacaatgggtttgtggctaaaaattatgcttaagaacacatctaacaaacctaaagctgcaaagacataatgttaatgtaggtgaaaatttcacttgtgtttattctgatagacaaaattgtattttagatgagaagcaacaattttcatgttgtactgagattgttagtaatgaaatacttccaaatattagtgatggtagaaatctagtgtagggctctttgctgagaagggaaaaaagtcacataagaaatctacttttcagtaaactgcaaatatgtgtgcttcaacctataacatattctgtcactttga

SEQ ID NO: 473789 - DNA, 1000 bp, Homo Sapiens; identical to SEQ ID NO: 160354

SEQ ID NO: 473790 - DNA, 1000 bp, Homo Sapiens; identical to SEQ ID NO: 342736

SEQ ID NO: 473791 - DNA, 1000 bp, Homo Sapiens; identical to SEQ ID NO: 160355

SEQ ID NO: 473792 - DNA, 1000 bp, Homo Sapiens; identical to SEQ ID NO: 160358

SEQ ID NO: 473793 - DNA, 1000 bp, Homo Sapiens; identical to SEQ ID NO: 160359

SEQ ID NO: 473794 - DNA, 1000 bp, Homo Sapiens
ttttttttttttttttccgcttggctttctgtttattgtaaaacattgtaatttcccaaggctggtttagataaatacattttgtccaagttcaggggccgctgttttcccttgcttcgtgaaattatcaataggcaggcctttgatcttcctgatccatgcagctttgctgacttttcctggatcaaccactccagtggactccctggcctgatattccttcatcttggcttcctggtgctccttctcctccttcacggtcaacagcacgaactcagtgttcactctaaaaggatcaagggctgtatagatgcgaggccgttctttcttaagagacagggtggctgtgcccacttgtggagctagcatgcggtttggtttaatgacctgcatactggtcaggggacccgtactgcacacagccctttcaattgaactggtcacttggtctccaccctttaagctgccagagaacctggagcggataatcatgggctggggtatggtggactggactctaggactgtgcaaagagatcttcaagttgggctgcagtttctggatttcaaggggaatactggttcgtttcacatctataggaggattgctcaatctcaaccgatcaactgcacgttggattgattttcctttgaaattcaagaccttccttgggtatgaaattgaaggtccccagacatcagtaatttctgtttggggcctacagggataggcaaattccccggaattatgggcgtgctgcagggcgctaacagtcaggaggaattggtcaggtgacatagggattttccaagactttttctttgggtgactgggcagttttccaggagtttccaattgtccttgtttttgtgctttctccacatcatctgaagagaacttggccggcttcaggagtactcgggacttgggaggtttgcctggtaggagctcttggatcacagtttgtttactggatacagactctcttgggctgtgaacc

SEQ ID NO: 473795 - DNA, 1000 bp, Homo Sapiens; identical to SEQ ID NO: 160360

SEQ ID NO: 473796 - DNA, 1000 bp, Homo Sapiens; identical to SEQ ID NO: 342742

SEQ ID NO: 473797 - DNA, 1000 bp, Homo Sapiens; identical to SEQ ID NO: 342743

SEQ ID NO: 473798 - DNA, 1000 bp, Homo Sapiens; identical to SEQ ID NO: 342744

SEQ ID NO: 473799 - DNA, 1000 bp, Homo Sapiens; identical to SEQ ID NO: 160361

SEQ ID NO: 473800 - DNA, 1000 bp, Homo Sapiens; identical to SEQ ID NO: 160362

SEQ ID NO: 473801 - DNA, 1000 bp, Homo Sapiens
ttttttttttttgactggggaagtccttctgcattaattacaataagtaatactcattgaaaactttccttatttacacacagttgaacagttattctaagaaaccattttcccaccctatttaatattgacagatttcttcagttagaaacaaaaactcaaaacacacgcaatcctaaagaactcatctatgtcccccttatctcccctcatcttatgtagtccctaaaacagggcttgctgccctttcttcttcttgccttttcagcagatgagtcaaggttgcagaggtggcagtcaaccatagagtcacagagtttgatttttttccatccatcaggtcgtagaagctgccactgagcctgacaagagttggtactcaaaaatgcagaatgaattagtttgaatgaggtgattaaggattaatgagtagtggttaaggaaacaaagaccattagtggatggggtaatattgctgtattactgatggaagcaggattctctaaaaaaactttctgcagccatttacttacatacattttaaagagttactacaagatattttaaaaatttaaacagttaatacaagaaaaatatgaagtgaatagttcatgacactaaactgaactgttcatgacacaaagtatcttagaaaacaaatctcggctgggccagcactttgtgaggtcaaggccagcagatgacttgaggtcaggattttgagaccagcctggccaacatggagaaaccacatctctactaaaaatacaaaaaaattagccaggcatggtggctggtgcctgtaatcccagctactggggaggctgaggcaggagaatcgcttgaacccaggaagtggtggttgcagtaaggtgagatcataccactgcactccagcctgggcaacagagcaatattacatctcaaaaacaaaaacaaaaaccctaggaattgaattcctttatgactccagaaaacatatctcttttctattgagatt

SEQ ID NO: 473802 - DNA, 1000 bp, Homo Sapiens; identical to SEQ ID NO: 342747

SEQ ID NO: 473803 - DNA, 1000 bp, Homo Sapiens
tttttttttttttttttttttttttttttttttcaggaccttttaatgagtagagggtgaatggggcctgatcagtccctctggctcaccagcctttcctaagtgcacagcaaacatgcttgcttcctgccactctccaccctcaggtcaggaggtaactgaggtcttggcagctgcccttcagtccttccccaagccgactgagcatctcatgctgtttcctggggtctccactcccagactcctactccagctaattcacagaaatgttgatttctggagcctttggctgatacatcagctctgaatcttcactgtcacttccactgaatgagtgttctggctccagccccttctcagggatgcttctctcctcctctggcatcagctcatccagccagaggagttcctgtggtgagaagaccctctccagggcctttcggacccccacaaggcccagcaacatgagggggaagatgatggctgcaggggtagacttgattatccaaagcagccccagacaggcaagctggatggctgtgaagaggtggaccctggtcagaggcacatgccgcaagagtagcaggtctggctggtgttttgctggcatcaacaacagcttcaccctattagtgaactgaatgctgctgagcgctgccacccccatatacaggaagatgccatagagcacaggcattggaatgaacttgagcacaggtgccaggaagatggaggctcctgtaaggatgaacaccaccaggcctgtcagcctctgttccctgatacccaggaagttggggcgctccccgggggcacaggctttgctctctctccgaagactgtccatgtgagccagggagatgacagtggctgagacataccaaggcagtccaagcgctgatgtgagtagcatcagcacagccacacagaagaggtccaggtggaagccagctcccttctgcagtctgtattccatgcggttgaggatgactgctgtgat

SEQ ID NO: 473804 - DNA, 1000 bp, Homo Sapiens
ttttttttttttttttttttttttttttgaggatccaacaataaaatattaatttataaaaaagaaattttaaaaagtaacaagaaagaactcgtttgaaaccatgtttcatcatcctgtagctacatctggtcttccttgtgtgctgggggactgcagataggtcaggggtatcagcctcagccactcagacaaggaaagggggcaccacatgagctcagggacccccacccccatccctggcctgggtgatggtacagcgtctggccctgccaggtccttggcctgcacaaagtcagtgacagcaggtgaaatgcccagctgggtgcctgcctggagcgggtgtggggcagtgagcccctgtgggtgtgggcttgggagtggctgtgacaggtggtgagcagggcaggggcaatcagacagccctcagaaggcctcatggcccccggtgagctgcaggaagaggtcttcatccagctcctccccacgggcccgctcccgcgtcgacaggaaaatgtagcccccgatatactcgtgtacaattcggcagctggcagacacgcagctgaaggccacattgatgtgttcatcaaactcgatggccacctgccggatgtcccagttgacattccactggcgcatgttgctgaaacgccaggtcttgaccacgtcgcccacggccaagtcgatgcggatcagtcggttgttggcgatgcccaggatctcgtctttcctgctgcccttgaacctgaccatgacataggagatgccgaagtcgggcagggactgccaggcctggatgaagcgcagctgggcctctgccagcgacaactgggccacattctggtgggcttccaggatccgtggggtgagctgcttggccttgaactttcgctggaaacggggggcaacgaggccgtaggggttgaggccctcggcagaggcatcagggccgtgggggtggttgcccgggcccccactgcccgtgcgctgcaggctg

SEQ ID NO: 473805 - DNA, 1000 bp, Homo Sapiens; identical to SEQ ID NO: 342749

SEQ ID NO: 473806 - DNA, 1000 bp, Homo Sapiens
tttttttttttagagaaacaagagtttattccaatggagaagcagctgagccgagggcttgcaattgggcctggggtctgcagttacagaagcagcaggaggcagacaaggaaaggcacagcacaagacccaggaaagtggaccttgtggagcaaggcagtgagggcgaggaaagcttttaggattttgagaccaggtgctatggcacaagtgataagtgagccctctcctttccttctgagggcaggggaggcagctgagaaagggcaggggaggcagctgagaaagggcaggccaggtgtcacaggcagctccttgcatcccggttcttctctaacccagtcaaccccaggctcaagactgtttcagcccaacggtcccagttcccttgttcaggttagctgtaccactgtctttctctgctccttttttgtttgtttttggagacagggtctcactccttcacccaggctggagtccgatggcacgaacttggctcactacaacccccatctcccaggttcaagcaactcctatgcctcagccttccaagtagctgggattacaggtgttcaccaccatacctggctaatttttgtattttttagtagagatggggttttgccatattacccaggctggtctcaaactcctgacctcaagtgatccacccacctcagcctcccaaagtgctgggattacaggcatgagccattgcgcctgcctctttctttactcctaatccatgatttgagagactcaaaccagccagaaagactctcagggatctggcgtcttaaggttcgggttcttctcttcacagtgaattcaaaaaagcctctgtctcctgacagaccccaaactttaaaaaaaaaaaaaaagcctctgtctttttgctttggcaaagcctggcagggggttagaaagccactgattccaggacaatacaagcttaagctcaagaggccagagatggggataggaagaaggcctaatgagg

SEQ ID NO: 473807 - DNA, 1000 bp, Homo Sapiens
ttttttttttttttttttttttttttccagatgagagcgctttaatggggctgcgaggtggcggagacagggtcgggatggggtgcagcagttggagacacagggtcagggcccctcatcctctattcactccaccggggcagtgaaagggtcccggcagcgagtgggtctggctggggacggggcgcagacttgagggaggtggggccagaggtggggtcccgggggccacaagtgcggcccggccagacaggcagttttcatgtttctggtaaacaaatgactgagaggaaacccttggcggggataagaaatgaggcccgggctaggccgcgcgcagatctggggcagagaggaagggaaaaccccttccccgagctcggggcctgcctccacccaggatgcgccagcgacgccggttccggggtgcgggggagggggctgcatcctggagggggctgagccccgcaggaaaacaaagtcaccacccacggggctggggagagctctgcactctttgatagtcaacgaacatgcaaatatatgtaagtcggcatgcaaataagcagcatttgttgttgtttgcgtcagcagcttgggcactttttctgggcaaccgtggcggcgtgtgcactccagtgttgccaagggctggggatacggggggccagggtgggggtcagggagggtttccagcgcaggaggggagggctgtgcggctcccagcctttccaccagggcctggctggctggggctggggcggagggccccacggagctgcgaggctgcggacaggagtctgcggcctctagtacttagcgatgtcccccttcttcaggatgacctgtcgctgccagggcgccagcttgctctcatcgtagcccagcgtccgcagcttctctgactgttccttctcccgccgcagctcctcctgcttctgtcgctcctcctctttccgcttctgctccctctcttcttccagcttcttccgcaggaggt

SEQ ID NO: 473808 - DNA, 1000 bp, Homo Sapiens; identical to SEQ ID NO: 342750

SEQ ID NO: 473809 - DNA, 1000 bp, Homo Sapiens; identical to SEQ ID NO: 342751

SEQ ID NO: 473810 - DNA, 1000 bp, Homo Sapiens; identical to SEQ ID NO: 342752

SEQ ID NO: 473811 - DNA, 1000 bp, Homo Sapiens; identical to SEQ ID NO: 160365

SEQ ID NO: 473812 - DNA, 1000 bp, Homo Sapiens; identical to SEQ ID NO: 342754

SEQ ID NO: 473813 - DNA, 1000 bp, Homo Sapiens; identical to SEQ ID NO: 160367

SEQ ID NO: 473814 - DNA, 1000 bp, Homo Sapiens; identical to SEQ ID NO: 160368

SEQ ID NO: 473815 - DNA, 1000 bp, Homo Sapiens; identical to SEQ ID NO: 342756

SEQ ID NO: 473816 - DNA, 1000 bp, Homo Sapiens
ttttttttttttttttttttttttttttttttttttttttttttttttttttttttttttttttttttttttttttttttttttttttttttttaagtgttagaaacatttatttgtcaaaaaatttttttaaaaaagggaggagtggagtaaaacaagggtaaatttcagctaatgctgtaccacgatcacaggtcggacataaaaaacaaacaaaacaacaaaacccccaatggtcctagcaatttcagaagagtaacttaagtgttaagagtccagagctaacagaagagtaaaaggctgcttgccactacatggtcattttaaagggaaaggagatgctgcaggtaggcagggagaaggattcaactcctagggaaagcaagataagaggggttccactgcacaggaaaaaggggatgccagcataatccttacctagggctgctcagaggctgagaatataaggaacagagtgaaaggctacagagactagtttcaggaggaaagaaaagtcaacttagaagaattaagaaagaaaacatagttggtcacaaactccttttgtttactgaaacatgaagcaatggaaacatcccggcaaaggggaccgcgcggagcaagttctcatatatgaccgcagcccgagggttcagtccgcaattatcctacctccagtttttaaaaggctgagtaccgggctcggtccacatactgctcccgttcataccgggccatgtcatacagagaattccgtgtagctgcggaagcctgagataattcactctctggcccataaccgtagccctctccaactgtggggagcatggctgcagcacgacgcagtgggctcctgtcccttccatagtaggaggaagtggtggctgcagcagcagccatagcagctgaagtggcagcagcgccagagtttggcaataggtgtctgtcatagggatcaacagaagtagagttgaggtggctggtcacagttgtgctttgg

SEQ ID NO: 473817 - DNA, 1000 bp, Homo Sapiens; identical to SEQ ID NO: 160369

SEQ ID NO: 473818 - DNA, 1000 bp, Homo Sapiens; identical to SEQ ID NO: 342760

SEQ ID NO: 473819 - DNA, 1000 bp, Homo Sapiens; identical to SEQ ID NO: 342761

SEQ ID NO: 473820 - DNA, 1000 bp, Homo Sapiens; identical to SEQ ID NO: 342761

SEQ ID NO: 473821 - DNA, 1000 bp, Homo Sapiens; identical to SEQ ID NO: 342762

SEQ ID NO: 473822 - DNA, 1000 bp, Homo Sapiens; identical to SEQ ID NO: 160370

SEQ ID NO: 473823 - DNA, 1000 bp, Homo Sapiens
ttaataacttacttcactgggaggatttaaacaatcttctcgagacagctgaaggcttgggctgaaggccatgaggtccgtcttgggcgggctctctgcagagcacaccctctgcctcctctgctgcgagtaagaccaactccccacggcgctggagcacaccagcgtgggcttgcccggcgcgcaccggctcacggtgggcggcgctgagcaacgcagcgcagtgtacagcagcagcgtgagcaccagcaggctggacaccgcacagatggcgatgatgaggtacacgttaatatccaccagagccgcttcgggatccacagcgcccactgaggcccgcgacgacgtctttggggcctggccgttctccaccagcgacaccagcaccgtggccgtggacgtcagcgcgggctcaccgtggtccttcaccagcaccagcaggcggtggcgcggagcgtccgcctcatccaggatgcgtgtcgtgctgatctcgccagtgtacagccccacgtggaacgggatgtgcgcgccgaccgccgccggttgcaactcgtaggacagccaagcgttatagccggagtcagcgtccaccgcgcgcactttcgccaccacgtggcccgcacccaccgaccgcggtaccaactcgctaactgcgcctcctgcgctgccagccggagtcgccagcagtgccggcgcgttgtcgttctcgtccagcacgaacacctgcagcgtcacgttgctgcccagaggcggcacgccggcgtcgcgcgcgctcacctggaactgcagcagctccagctcctcgtggtctagcggctgcagcgcgtacaccttgccgctctccgcgtgcaccgacacgtagctcgacagtgcgtgctcgcccacccgccgctccaccagcgagtaggacaccagcgcgttcttctgcgcgtccgcgtcccatgccgacaccgtgaagatgtggcagcccggcgggttgttctccttcacgaacactgtg

SEQ ID NO: 473824 - DNA, 1000 bp, Homo Sapiens
ttactaagacaattttttaaaatataagcttacctctttcaagcattctgagtcctcctccctctggcctgttccctctgcagaacccagacaaggaggaaggctgggactgaaggccatgaggtccgtcttatgcgggccctccccagagcacaccctcggccgcctctgctgcgagtacgaccaactccctgccgcgctggagcacactagagtgggcttgcccggcgcgcacgcgccctcggtgggcggtgccgagcaccgcagcgcagtatacagcagcaacgtgagcaccaacaggctggacaccgcgcagatggcaatgatcaagtaaacattgacatccaccagcgccgcttctggacccacagcgcctgccgacgccctcgacgaagcctgtggcgcttggccgctctccaccagcgacaacagcaccgttgccgtggccgtcagcgcgggctcaccgtggtccttcaccagcaccagaaggcggtggtgcggcgcgtccacctcgtccagagggcgcgtcgtgctgatctcgccagtgtacagccccacgcggaacgggatgcgcgcgccgaccgccgccagctgcaattcatacgaaagccacgcattgtagcccgaatcggcgtccaccgcgcgcaccttcgccaccacgtggcctgcacccaccgaccgcggcatcagctcgctcactgtgcctcccgcgctgccagccccgggcgtcagcagcgccggagcgttgtcgttctcgtccagcacgaacacctgcagcgtcacgttgctgcccagaggcggcacgccagagtcgcgcgcgctcacctggaactgcaacagctccagctcctcgtggtccaacggctgcagcgcgtacaccttgccgctctccgcgtgcaccgacacgtagctcgacagcgcacgctcgcccacccgccgctccaccagcgagtaggagaccagcgcgttctcctgtgcgtccgcgtcctgagcagacacc

SEQ ID NO: 473825 - DNA, 1000 bp, Homo Sapiens
ttttttttcagggttttgaaacctttagtgataccatgcaggataaataacaaggcctaaggggaattactgccttgcagaagttccatttacatccactaaagtgagagttgttatccatggatcagaaaagagctcccatgaaaaacaccgtctttggggaaggtgcaaaaactcaattttgatttcagttcaacaatgatatttacttggctaacaacttaagaactagagtttaacaagtaattttctccatgcctaaggtcagtgtacagaatgacaagccagaaaatgtccattttccccatgcgtccttagcaagcactttaaaggtgacagctcagaagaggcgggggagagggcaatggttaaatcatttatcaaaagtcattttattgacaaaatagaatacttatatctgttcttacaggggtaagcctctaaactttttacaaaaaaatgtacacactatatctttggatatatacatattttacactttttttttttacaatttaacaaataattatataaatacatcctctaatgtaagaaacccgtatttacgtggggtgtataattaagacatttcttgtttgtttacttaaggcatttgcctggtcattaagaatacccaaaccgtgcaatcccatcaggtggcggtcacccctcctccagggtaagtcaggggtgggagtttacgtaggaagagtcgagggagaaaaagaggttctcccaggtgaaatctgtgtatctgactgcaaacccagccaagtgcagccagggagggctccaaatctcgggttctggaaacgccgcagagtccaccctcctcagccaacagaaattaacgcgtggcgggaggagctccccgcacatcaatggaggaaaaggggctgggtctgggaggcttcaatgccaggtactttgttctaagtgagtcatttaagtcccagctaatggataccattaagagttcattatcatgctaatagcaatc

SEQ ID NO: 473826 - DNA, 1000 bp, Homo Sapiens
aacccccattgtaatttatttttacatcttttgtggttatcgtcatcttttaataatgcattgcaatagtttaagtaaatgtttcaccttccatattatattcatataaagcagactcttacatatttttcattcttcactttaaatattagagtgccttacacatctgttgcttataaaatattttggtattttatttttaattttagacctttatgtcatattacttttattgttcttaaataggttttaatttttgcccttgtttctcaaaaataaactataagtcccttgaggcctagggcaatcttctaatacttctatacttccagatttcttggcacaggaagtgctaagaaggagtgtttagttcaattgatgaaatgttgtgaaaggcttgtctaagaaatatttcaaaacacagctagcagccatctccgggccaaaggaatcaaattccataaaatttgcttaccatggcattgacattagcgtgatcccctttcctattccgaatctgaatacaggatattggcaaattcagtcctaccccagtggcaagatttcgcaggtcggcagcattgtactccccacgcaacagcaaactgttattatcagaaccaagtcccagagaggcccgatagagataagtctgagaaagtctctcaactgtagtgacatctatggtggctgatgtcatgcaaggatttgaaaccatcttacttccatacctcagatcctctgtagagcgacagcagctctgagcgcaacagcctgggctctggtgcaacttggtacacacgaagaaaagtaagcaccccagaaataaaaaggaaatacaagccaaggcaattactaaatacaagttctgggcagaaagctgccctcctggttcccagacatcttcaaagtctggaagtaactgagggacagagttgctcaacagcacacccagagtgacagaggaggaaagtggtgggtctccatggtcccgaaccac

SEQ ID NO: 473827 - DNA, 1000 bp, Homo Sapiens
taataaattaacccaagtaaagtactttgataccaaaggaagccctatatgtgttagtgatttcagccttcttcctctaaatgccctttgagttctgaaagatttctgaaaatgttcggccttgtgaccttgggtaacacctgctgctctgagcctcagtttccccgtctgtaagaaatgaggctacgggactcaggaggacccgtgtgtcccagcaggctgatggggacatgtgaagcagacagacagcctgcctggcccctggggacaagctgtgagaccttgggaagccactcccctgctctgagactcaggtttctcccctggaaaacagagtgaggcccccagcctgtctgacagccttcctgagctgcagggagggtaggtgacaggcctggttcaggattgttctgtgattctatggaatagactgtacatcactcttgggttcaggggcaccaactttttctggctttttcttttcttttctttttttttttgagacagagtgttgctctgctgcccaggctggagtgcagtggcgcaatctcggctcactgcaagctccgcctcccaggttcatgccattctcctgcctcagcctcccgagtagctgggactacaggtgcccgccaccgcacccggctaatttttttgtatttttagtagagacggggtttcaccgtgttagccaggatggtctggatctcctgacctcgtaatttgcccacctcggcctcccaaagtgctggggttacaggcatgagccaccgcgcccggccttttctgcctttttctattgtggttctctttccctgagactctgttgttctgtctccaactctgggtgtctgacgctgccctctgggtctctgtccctccctcccccactggctctttttgtttgtttgttgagacgggggctccctctgttgcccaggctggagtgcagtggtgcaatcatggctcaatgcagcctctacctctcagggtcaaggga

SEQ ID NO: 473828 - DNA, 1000 bp, Homo Sapiens; identical to SEQ ID NO: 342765

SEQ ID NO: 473829 - DNA, 1000 bp, Homo Sapiens
tgtttcaaaatttcatgttgtacgtggtaaatacataaaattttatctgccaatttttaacaattgaacacatgtaatcattatcctaagaattccagaaaggtgaatatgaatttcttgtttgatgatacggcctcaggcaaatcatttcatctgtcttcctgacagtttcacacttctttccccctgagaaccgaactgcactgataacgtgaaatcgtaccatttctcaacatgtgaagggcgtctctttacattctcaaagccttgagtcataactatctgttttcaaaagttgacattatcagatcagttattgagtagataaaaggactgactttcagagatcacaatcacagatttatgttttggtagaagtggtctgagaatactggtaaaaatatacagatgttagagtataacagaatgaataatcagtacgtcaataaacattctgagaatctgcagtttactggttgactgcactctccttgacaaaggtcttttttttttttttaagtgacagtatgacttgtcatttatttcaatgaaaatttaaatgtttcttacaaatcctctgaaaataaaaccgatatttttacaaacagaagtatatgcaaacagtcacaatatgcattaggacactgacgctatttcttacatgccaagtcgttcttccattctggagaacacctcttatctgaaagattttttttcttctactataaatttgaatctaagttatttttaaagagtcaaaaacagtgcagagcatttttgaactgataaacaagaatataggctggactcagtggtgcacgcctgtaatcccagcactttgggaagccaaggcaggtggatcacagggtcaggagttccagaccaacttgaccaagatggtgaaaccttgcctctactaaaaatacaaaaaccagccaggcatggtggtgggcacctgtaatcccagctattcatgaggctgaggcagggaattgcttga

SEQ ID NO: 473830 - DNA, 1000 bp, Homo Sapiens; identical to SEQ ID NO: 342766

SEQ ID NO: 473831 - DNA, 1000 bp, Homo Sapiens; identical to SEQ ID NO: 342767

SEQ ID NO: 473832 - DNA, 1000 bp, Homo Sapiens
aaaactcttaaatggagaataagataagataaaaaacagatacgagagtagaactttctgctttcaattggcatctctgtatccaaggccagagcctttctgtggtggaaaagtgacaaaggccttagcgaatggcagagaaaagccacccttgtcagaacaccttggactccaagccttcgcacacagtgtcagaaaaatcaaaaagaaaagaaaaaaaggtaattaaagattctgccctcttccttctgggtttccttttgcttatttaacttaatctacccaagtaaagctgatccagagagagctctgttcgcctgctcacccccattctcactctccagcacagtattgctcgtgtggttggctgcaccttgtccgcgaagcacccgcggagaacgtctggatttggacgcgcgcctgcctcctggcttccgtcaccacagcggcgcgggtccctccgacgccccgtagagctcggccagcttccggaagcggggcccccagtccgtcaggaagtcgaagctctgttccgagtccgacgtggccgactgcagggagctcagcgaccccgccacagagccgtccccctcgaacatatacgtctggagggagtcgaagggcggtgcccacaggtccatgtcggcctcgtagagcttggccagcacgtagctgtggacagtgctgttcactgcgcacgtctgaggcacgtagcgggagaggctctcgatctcgggcagcatgtcctgccgcgtcttgggggcggcccccgcctgcgcctcccgggggttccacatggccgcgatgtcgaaggcctcggtgtcctcctcgccgccgccctcgtcgtcgtagcggacgatgttctcgtggatgttttcctcgtcgtcgatgatgtatggttgtttccggtgccgcctcatggacaaaatgagcaacaccagcactaagaggacaaagatgcaggcgaggatggcaatgagggcgccccggctcaaactga

SEQ ID NO: 473833 - DNA, 1000 bp, Homo Sapiens; identical to SEQ ID NO: 160372

SEQ ID NO: 473834 - DNA, 1000 bp, Homo Sapiens
atacagaacaatgaatttattacctcaaatatcaagaggccctgaggtagggtggctccaggaatgcttaagtgagtgcttctttgacatcactaagcacttggcttccatccatcttccaacctcaccaaaaagggttgtcctcatgactacaagccggctgacatggtgccaggaatctcgtcatgaacatatggtgttctcagcgcaacaagaagacatctcttcttgaactgaagagtgagggtgaagaaaactttccctgaaggcacctccaccaaaagatttttcttcaagattcactggacaaaaatacatcacatattcatgcataaaccaatcactgcaaaggggaatcaaattaccatacctaacataaactaattaggatttattctctgagctagggagatcctttccctgaagaatggagttctcaagataagaggggctctgctaacaaatatggttggtaggcagtcaaccatgacttttacagctcctgtggagagctgcaggctttctctggataccagtggttctgaaattcttcaaattcacccttgaacatacgtggcaaattcttgagacttgtggttttatttatttctgacaatgttacttagctcttctttccatgtgttgggttaaggcagaacgaaatacttctactgcaaaatcaacttctggtttagtgatgcacattgagggcgcaatgcgaaatgtctgagaaaaaatgctgcctctgccaacgaggagtcccatgtgcttgcagtcctcatggatctgatttacttcttcacggggaagaggccgacagcttatcttatcctgcaccatttctatgcctatcatgagacctttgcctcggacgtctccaacaatttcaaattcatcccgcagcttagcaaactttagtaacatgtaggtcccaacttcttgactgttttcctgtagattttcttctttaatcacctcaagcacagcagatccaatggca

SEQ ID NO: 473835 - DNA, 1000 bp, Homo Sapiens
ttttttttttttttttttgaaagctataattatttatttccaaagagtttaaagattaaacttccctcaaaacaaacaaaaggcaaggtaacatcccaagctgtgaggggctgagtctctcctaggtgcagggcagcacaggaactggctgcacaaggccagagaggttacgtggcggctctcttcaaattagaccacacagagcgcttcattccctgtgcagtcttcacatcttcccagtccagtttgacgtctggaacctcatcttctggctctggatccttcctcaagggcccccggggggacgcaaccacaatgggcagagggccacattcctcccggatttccacaacatggaggcccttcttatcagccagctgttgatgggtttcctgtctggagagcccacggaagaggccctgggtgaggctgagcatattaatggacccagagaccttggcatacatgtctttgatgccaatgagccggcagatggtgatgatggccctgtggcagcggaggccgtaacctttgggttgtttcttcatcttgatatgcgtccttttaaatcttaatgaaatatcatggaatattgtatggtcttcatatcgttctatataatgcaaatggtgaactgctctgttctttgctttcctgaaagcatccatccgatcagtagctttcccaatagaaaaacctgcagctccttttccgttccccacagccaccaagacacggatcgatttctttcttccctctttcgcagtcatagtgaaaacgtttcttacctcaagtatcctggtatcaaaatcctcatatgtttctccacagggaccagggtcaggggggccaagactgatgcctccccatgagtttccactccatcctcgctcccgtttaaccttcatcttcttctttcggtcccactcttctctctgctggatcatgtctgcctccaccttctcctgctcttccttgcttctttgggcaatggtctgca

SEQ ID NO: 473836 - DNA, 1000 bp, Homo Sapiens; identical to SEQ ID NO: 342770

SEQ ID NO: 473837 - DNA, 1000 bp, Homo Sapiens; identical to SEQ ID NO: 342771

SEQ ID NO: 473838 - DNA, 1000 bp, Homo Sapiens
tttttttttttttttttttggttttttttgagatagtctcactctgttgcccaggctggagtgcagtggcaggatctcagctaactgcaacctccacctcctgggttcaagcgattctcccgcctcagcctccccagtagctgggattacaggcgcccaacaccacgcctgtctaatttttgtatttttttagacgatgttttgccatgttggtcaggctggtcttgaactcctgacctcaaatgatccgtccacctcagcttcccaaagtcctgggattataggcatgagctaccacatcccgccagcacctggcacttttactgcagcttcttaagcccccagatccctgcatactggcaacacctgtgcttggggtgcgattcatttgcgtgggatccattcctgccatctcagagcagcggttctcagatgcacgtgcatatcctggtgtatctcattcattgagaagcgggcctgcaaaagattaactaataataaagcgctcaagtctgtggccgacttgactcatgcaatgagcagattcaagatgatccgcctatcagtgtcactttgtattctgataagccttcgtgaatggaacgagctctgccatggcctgggacattctgtattatcttccagcctcacgcctcatgcctcccttctcagttcttaccttggcccctccctctttcctgtcaaggtctttgcacttgcagagccttttgctggagacctcttttcgaggcctttgtgttgctctatttccttctttggaactcagctcaaaaatggaaattttccaggtactgacttagaggggtcttaagagagcttttggggaagggaggtgagaagttggaaatagcttgttctttgatctacatggaggtttcagagtgtgcacataagcaaaaattattcactgagttgtcaacttaaaatctggagagtcactgtatgtaagtaaacctaaaaacacaaacttaaaaaaaga

SEQ ID NO: 473839 - DNA, 1000 bp, Homo Sapiens; identical to SEQ ID NO: 342773

SEQ ID NO: 473840 - DNA, 1000 bp, Homo Sapiens; identical to SEQ ID NO: 342774

SEQ ID NO: 473841 - DNA, 1000 bp, Homo Sapiens; identical to SEQ ID NO: 342775

SEQ ID NO: 473842 - DNA, 1000 bp, Homo Sapiens; identical to SEQ ID NO: 342776

SEQ ID NO: 473843 - DNA, 1000 bp, Homo Sapiens; identical to SEQ ID NO: 342777

SEQ ID NO: 473844 - DNA, 1000 bp, Homo Sapiens
ctaggattccagcaaagtgtgccatctgcagatctgctggcctttggtttccttcatctcctcccagtgatcttgttcctcctctccactgctgttctggcccagggcaatccagccaatcatctctttacgcttcatagtacgcctgttataaacggaaatcatcaacgtgacatcagacagctgaaagagggccacctggaaaacaaaggtctccttatagacaggattgggctgaccacgccgaatggacgtcttgcaacgggacatctcttgacccacagaattgaggagaaagagttttccatatgtatcaggtgctcggttaacagcgaggtttcggaaatggctgcctttgatcatttccacagataatcgccccgttgtggcattgtacgagagccccaccaacagctctggcgcccctccatgagacagcgactgcgtggatgaagtactatcactgtgagaaaccgcagatgggctgagcggagaccctccactgcttatattacttcttggctccagaaccagagtcactttcatttccccttctgggtgcaggtggctgagatagaatagtttctctcccatcattctctctcgggtcatcttccgggcagcgtacaggcggaagcggacagcacaggcagccacatctctgggctccagcttggcaaaggtgaccttctccctgaagacggggttgggccctctctgtatgttcgtcctgcccctgtgtttcttaccaggcagcagcactacatgaacttgccaggagttgacaccacttcggtccttatctgggaggccctgtgccctcacaatggtcactgtgagcttctggctggcggctctatattcaaagatgacatctaggtcaccacactttgagatgggctctgagaccccggatggcacctgcaaattggtcctgtcctgttcaaaagctgtctccatctccaagctgccctctgtggattggcgcctgaggctttgg

SEQ ID NO: 473845 - DNA, 1000 bp, Homo Sapiens
cttagttaatatctttaattttttatgtagaatatactatttttttctccaccaaaataacaatatatttgcaggcgggaacatgtatgattttaaatgcacttttgaaatcttagagtagaaccactactctagtaatacttgtaataaaattaaaatagttttaaacacttccataaagaattaggggtgcccagctccttgatttccccctagggataaagatatccatgtacaattccaggagcttccctgtaattcctcaaaaaagcactagtaaaactcttaggaggatattagataaagctcacttagcaatagccctttttccccacatattctggaaggttctacaaaagctattagatactcattcctggttctggaaaattaaataagccaattcttggtaggattttccaaatggcttaccacagaggatttatcctcttttgaaatatttcatcccataaagaatagaagctctgccttcatagcatttcaagcttctgtatttctgggacaaaaaatgtctaaacagaattagatctccaggtctcaaaagcacagagatatatcaagagaaatctggagttaaaccaaacaaaaatctgtaaaatgtgtaaatgtcattctccttccctctcagaccttcttgcccttgtttgctgttttcgtcttcttcatggaaaagcaagtccttcagcactgggctaccagcagatgtcccaaaatgtgtcaccctgaactcggaatgagagaaaatctcattagttgtgcccctgctgatgtgaaagcaaggcttccatcactcccctttcagaggcaccacattatcctatgaggttgggtcagacggtggtgctatgtttgatccttttctcgaacttcttgtaatcgtttttctaggcgatccaatttggcaagattttccttcagcagtttgctgtctggaaccagctgtaaggctctctcataataagctcttgcagacacatat

SEQ ID NO: 473846 - DNA, 1000 bp, Homo Sapiens; identical to SEQ ID NO: 160373

SEQ ID NO: 473847 - DNA, 1000 bp, Homo Sapiens; identical to SEQ ID NO: 160374

SEQ ID NO: 473848 - DNA, 1000 bp, Homo Sapiens; identical to SEQ ID NO: 342781

SEQ ID NO: 473849 - DNA, 1000 bp, Homo Sapiens; identical to SEQ ID NO: 342783

SEQ ID NO: 473850 - DNA, 1000 bp, Homo Sapiens; identical to SEQ ID NO: 342784

SEQ ID NO: 473851 - DNA, 1000 bp, Homo Sapiens
ttttttttttttttttttttttttttttttttttttttctctatacaaggctgtttatttctgtacaaaaccatgtttctattttacacaaagaacaccccaccctttcccctcacaccagcaccctaaccctggggagcatcccccaggaggagggggctgaaggaggccccaccccccaggccctagcttctgcctgccctggctgggccagcctgagtgccactgtaaagaaaataaataaggaggctcaggcagaatctgtgttggaccaggcagaatctgtgttggaccagccagactccagcccagcccagtggccaggcagcttggccctcagagggtgggcaggatgtggaatgtcagttcatgaaccgtgtagttatatggagaccccgccctggaggccttagctgccagggttacaagtaggtgtcctcactctcttgggacgtcaagctctcctgggagcggtggtgggctgagacctggggagccaaatcctgaggggctgagtccttgggggctgagtccttcgggggcacatgctgtgggggacatgcatctcctgcagcggccaccaccatggcttgatttggggctgggggcttctccagctgccctctccccttcatctgtttccgctgctccttctgggcctgcttgggtggcttgggcttggctttggagccagggaggggggcatctaggggcaggcggatggatggtgaaggttgtagggcaggccggggaccaggttctgcatccaagatagccttggcaccatgcagcctgggcggggagcggcactgcagctcaccccgggtctcctgccagcgccgcagctgaatgaggtgttcgcgctcaatctggcgctctgtcacgggcaactccactacctcctggaccagaaaggcctcctgcatgatcttggggctgaggctccgcagtcgctcgatggtctcgtactggccctggcaggctttgaccttctcagggg

SEQ ID NO: 473852 - DNA, 1000 bp, Homo Sapiens; identical to SEQ ID NO: 160376

SEQ ID NO: 473853 - DNA, 1000 bp, Homo Sapiens; identical to SEQ ID NO: 342786

SEQ ID NO: 473854 - DNA, 1000 bp, Homo Sapiens
acctgagtctttcttcattgcctggccacaccccatcaggccctggacacccatgtgcaccagcttccctcacgccaaatgtgccccaacatgccaaatcatgcaacatgacatgatgtcactccaggacagtttatgacatgccacagctgtctggcatgtccagacatggctgggtaaggggcctacagaaaggtgtccccaagctggggaggcgggaggggaggcctgggcttccccagggcccttgcagtggcttcgagcaccgccacctcctcggcctgctgagcctccatgagtgccatctgctgctccaacttccggcgttgctcttcctgcttccggtgggctcctcggaaggccaggaccagggcgctgtgggctttgcataaatccctgttcagctcggcactctgagaccgtctggctcgccccttctgagccacctgttccagctccctgcgcagagactgcagctgctcctgcaggtccagtgtcctggtgagcgatgctgccagttcctgggctaacttctctgggtcccaggctctgcccacctggccaccatcaatgccactggtgccaccagggacagcaggaaggccctgataccactcttcctcgtccccgctgctgccacctccgctgctatgtccgccactgctgtttgccccaccagcctggagctctgcccgttcccaccgcagctgctccagcaggagcacgtgagctggacccagggctcggagggcagcctcccgcagctctaggccccgcttctcacgccgcaccagctgcagccgaagcatcaggtccgccagggcctcccttgcggccaccaggtcctgctgaatttgtgtcttctccagtcggggaagagctgggccagcctgggtccccagaatggcctgcaccatggcttctgcacggggcacagtgggcatgggtgccaaggtggggccaggctctgagagaatcttcattagagaacggcgctcct

SEQ ID NO: 473855 - DNA, 1000 bp, Homo Sapiens; identical to SEQ ID NO: 160377

SEQ ID NO: 473856 - DNA, 1000 bp, Homo Sapiens
tggcacacaggctgggtttttattgggagaaacataaataaaataagggtatttgagaggggaggaaggagcgctatttacaaatgagtctggtggggctcacaggtgcaacagcagcgctgggaggaccagcaggatggtgtgggcgggcaggctgggtgcagagctctgctcaaggggctcctggccccgggggtctcacttctggccgcccaacctcgctggctggaactgcagtttggggatgatccgatggatccagttgtggtgggcggtgacacggatgtagacacctgggcggttctggcgggcacagccctcaccccagctgatcacccccgcctgcagccacgactgacccacgaggcacaccagggggccgcccgagtcgcccttgcaggcatccttcttgccctcctcgaagccggcgcacagcatgtcattcttgatggttttgggttggtagccaaactcggtgtctttgctgtagagcaggttgcacttgggtgtgtcgatgatgggcacagcgagtttctgcaggatccgcggttcgggcaggaggtcttcctcactggggctgccccagccagtgacccagcagttcatgcccgtctcaaagatcaccgaggggtcaggcaggcacacggggaggatgtaattggtgaagggcactggtgcctccagctccaccagggccacgtcagcgctggaggccgtgccctggtacagggggttgctctccacctgcctcacccgggcatacatagcgtgtggtcccggctgcactagctgccttgcccccagcaggacctggtacagggacgtctcagaggtgttgcggaagcagtgcgcagccgtcaggacccactgctccgcgatgaggctgcccccgcagaagtggcttccgttgcgctggatgctgacttgccagggccactcgccctcctgcgtgtcctgcccgcccaccattcggttcagcatcctggggcgaccacaggct

SEQ ID NO: 473857 - DNA, 1000 bp, Homo Sapiens
tttttttttttttttttttttttttttttttttttttttttttttttttttttttttttttttatttctgaaatcattcttttattttgcacacacatagctgctatttactgaacactggaaattcatgaatgcgttacatatttaaactttcatagaaggctcagatcaacaaagcaaaacttctacagataataagtagttgtgtatgcttgtcactcttgggcccatcagcacctgttccctatcatattgctgaactctgcaaactccagaaaggaaggtttcttttccaaacttcagagaagctgcagatcaagaatttgggccgttgcatctgattagaaactctcttcttccagtgtgagaacgttggattgaaagcggcataatataaaaagagatggttgtctgtcagggagaggtcagatctgtaggggtctttcacctgtcaccctcggaagaagctgatgagaaaggcgcacagggcctggaagggtttccaacaatgttcccaggccttcttctttgcttcctcattccctccgggcctgggtccaggctgggtaggtttggctgtgggtcgggtggtgggtttggcttttcccagctcttccatcgagtcctttcccagctgtgttgcttctgtgagtttcactgtggccttgggcctcagagatggcgtcccagcctcaggctgctggttgggctctgggctgcccttgaggctggaagtcacctgctgcatatgggcctggggtccagcctccctgcacacggatggcctaagcaccggggccccctggcacgcatggtgaaggcgcctcagctcctgcagggcttgattccagtaaggtttggggtcagcagcaaaagcctggcacatgctgggctgccccctgtactcacaccagtaggtctggtctgtgttgcggcagtcgacgcgaagccagacttctccagcaccttgccccaagctgctgggacgcatagtgcagga

SEQ ID NO: 473858 - DNA, 1000 bp, Homo Sapiens; identical to SEQ ID NO: 160378

SEQ ID NO: 473859 - DNA, 1000 bp, Homo Sapiens; identical to SEQ ID NO: 342790

SEQ ID NO: 473860 - DNA, 1000 bp, Homo Sapiens
ttttttttttttttttttcgagtccaacttgctgagaatatttattgctgccagttgagattaatgaaacatagagtgtctttggtaaagatgaactgaggggaataccacctctttcttttggtgacaagcttttgttatccagcttcacagtactaggtgggcattggagtggatgcccttgcctcttcttctgggatatcttagtggtagtgcctgctccctaatgactacctttgctgaacagtttgaagtcgcttcatttttgttttttgccttcgagcagttctcagttttttagtttttaagaaactgtcctctaattggtatagaaaatcttcaatttgtccaaccttttggatcatattccacacacgttcattattgtttcttcttccttcaagggtgtccatagcatctgccattagtgactgcagcaattctgcctcctgttgactgatgtcctgtaggtagggaatggttgctagctctgccattgcttgattaatcacctgggactgctcctttactctctgcagctggctgaggaggctggcatattgcaacttctccatcacacctgaggatgcaggaaaactcccattcaattgggtgcttctaataaaatccaatattggcaagattcgcttccccattgtctccatttgcctcactgtatcttctctggtcagaccgaaaggtgttttatgctctgtgaatatcggcagcttcctgcttgatattttttccaaaaattttccatcatctttgtttttgaacccaagagtcaagagatattgttggggaggaaaagatgaccagtcaactgtctgaggcaacatgtggagtgcttgaagatctgtgtacatatactctgcatatgcaggatgagtttttgtgaaagcatcttttactttttctattttatcagctcttatttttgtcgcaaatggtgtgtacataaccgagaaagattcagctctggtgatggcttcctcaa

SEQ ID NO: 473861 - DNA, 1000 bp, Homo Sapiens
tttttttttttttttttttttgaaaagagtcatagtccgttttattataactctatattatctgtaacatgctcctattacaagtattgaagtctaaggtgacatgatggatttcttcttgctttgatgttaagtgaaaagctgctttaagtttcatttttttgatcacctggaaacctacctactgagttcttccaaacgttctgagttttgagatacagcttccactgtggatcctctaaactcttcagtaactggatcaggttcaatgttacctctgctctccttccatgacagcaggtagttgaggctggtgagatctgcagactctatatagttgttcactgtaagcatcatctgatgagcttttgctattccatagtgaacttttgtctcatccatcagaggcatgctcattagctctactgttgtgtcaaaagcttgctgaaagcattcagaagctttgttgtagtatcctttttcattgtagatgtccccaagcattgtacttgctctcaccaaatctaggctttgaaaattgtttcttgcaattttcacaaattttttcaagtatttaattgcttctgtcatctctccttggctctgcaggaccttggctatggcttcatagcctctccccagactgagatcatcatccaggtctgtggagattttacagtaagtgtcaaggactgttaatgctgtttcatattcctcagcagctaagtgtgctaagcccaagtagtaagaggtttccgcttccatctttttgtcacttccttctttggctatttcagaagcttttattagaattttgatggcctgtttgtattctttattttctagcattttgtctgagagtaatctgtaagtcctcaggagactctcacaggccaacaagttgagagagcggcctgtctcatccttccatatccgcccctgtgtcaattgatggaatgcttcataatgctcagcagcttccagaagctgaccatcttcc

SEQ ID NO: 473862 - DNA, 1000 bp, Homo Sapiens; identical to SEQ ID NO: 342792

SEQ ID NO: 473863 - DNA, 1000 bp, Homo Sapiens; identical to SEQ ID NO: 337094

SEQ ID NO: 473864 - DNA, 1000 bp, Homo Sapiens; identical to SEQ ID NO: 158045

SEQ ID NO: 473865 - DNA, 1000 bp, Homo Sapiens
tcaagaattatttttctctagatagctgatacattcatcacaaaagtttacctgagaaaatggttcctttttgtcttcaagtaaagactggggtgctgatagaaaaccctttttctcacagctctcctggctgatgagtgtgtccgcatagttgggctgggggaaaatcaggtggctcttccgcgagtccgcagtgagggagacctcgtgggaataggtctgcaggaaagcccgaaccccgtccacgcccacaaagtgcgaaccgggcatgctcgctaagccgcctcccgaagcctgtagcagacgtgacttgtgccagcgccgcagcctgtgcgccagcagcacgatgacgaaggccaggaagacgcaggagaccgcggccgccgccaccaccaggtacagagtgaggtccgaatcgttgggtttggcggagggctcgaggctgcccaggtcggccaggatgtcggagatcctgtcggccacggccacggtgagcgtgacagtggcggagagcgggggctggccgtggtcctggacggccaccacgagactctgcttgagcgcgtctctgtccagcagggctcgcgccgtgcgcacctcgcccgtgtgcagacccaccgagaagagtcccggctcgctggccttgagcaggcggtaggacagccaggcgttctggcccgagtctctgtccaccgccaccaccttggtcaccaggtagccgggctctgcggagaggggcgccagctccacgccggtagaaccatctgtggggagggcggggtacaggatctcgggcgcgttgtcgttctggtccagcaggaataggctgagagacacgttgctgctgaggggcggatccccactgtcccgcgccatcactttcagttgcatgtcccggaactgctcatagtcgaaggatcgcagcgcatacaggaccccagtgtcggagttgatggagaggtaggcagataggggtgccccctggatagtgtcctctatt

SEQ ID NO: 473866 - DNA, 1000 bp, Homo Sapiens; identical to SEQ ID NO: 342795

SEQ ID NO: 473867 - DNA, 1000 bp, Homo Sapiens
ttttttttttttttttttttttttttttttaatttagttcattttaattgaaattggctgaacgcaaaggaaacatgatatgaatggtttaagtcattttgtgcattcaaaataagagtatttagaacatttcagaacaatcagagaaaaacatgatttcatgataaaaataatacaaatgtctggtgacattttacatgtattcgcaattcctttcttccccttttgcaagtccaacacttcaggccatacacataatgcaaaacaagaaaaataaaactagccacattgacatgtcagattttattacactttttaaaactgtacaaagagcacatgtgcatgagttaaaaaacaagggaaatgtagagtgttaaaaaagaaatacaaaataaatctgagacatgaaacaaaaaaattccattctgtgaattgaaataaaaaggtatcttgcttactaaaaaagtgttacttcaatatattaagtcttttgattaggaatacagcacaagactttcttcacctatttgttaacacatcaggctcagtctcactgaagagaggatgaatcatgacattaccttaccagccacaggcaggcaactaaatgtgcatggatatggtacaacgtctgtgaggtattacaataaataaatctttattagctgttcaataaagccagcagtggacgtcaccatttcaactttactgtcgacagggagactccactgcctgcctctttttgcctcgatgactttctgtgagggtttttcacatttaacaaaagtagtactcatagttctaaaagtggtttctcactgtcctgtttttcttcagcttcttcagatcctgcttcggattcaggaggggaataaaactgaccatcagaaagaccaccaggtataagtgctgccctctctgaagcatcctgaactatcaggagtctgttttcttcttctgcttcttgaggtaacactttgaaatccaggaaccacgtctc

SEQ ID NO: 473868 - DNA, 1000 bp, Homo Sapiens; identical to SEQ ID NO: 342797

SEQ ID NO: 473869 - DNA, 1000 bp, Homo Sapiens; identical to SEQ ID NO: 160379

SEQ ID NO: 473870 - DNA, 1000 bp, Homo Sapiens; identical to SEQ ID NO: 342799

SEQ ID NO: 473871 - DNA, 902 bp, Homo Sapiens
tttttttttttctttagcgttttctttatttttgatttcccttttgattttattttcatgaaatgggtgaaggtatacagaagttggcttcagagctggtcatctcggataaacctgttgccctctgagtttttcccatagtaaacgtagcgacacttccccaggacaccttggtgactggtgagttccctggaagcagaaggcaagggcgtgtagtggcgctccggggagctggcaacgtcctcactagaagccttgggcttcaccaccttcatgaagactcctctgaccaacgcctcctctcgttcttgtctggttactttctgggcatccagaaatttcaagttgggcagcttgtacagaacaaagcatctgtatctcttgtagtcttcctcatccttttccaagctgaccagctcgttgggacaggccacgttgcccagcagactgaggtactccagagctggtgtcacttctgccaagtgatccagcaggttctccaaatcagtgattcggttcttgttgagggttaaggtatgcagtctgggtaaccctggcaacacaaggtcgtcccccagctgattgttgtccaagatgagttcctccaggctcctgaatgcgctcagtccttccagtgaccttttatttgaagaatgattgccgctgagtgacaaatacttttccattcatttcaaggcaaagatattgacattcaaattcttgatggctacactgagcagatgccactgttggcaagaggcatgagagcaacagcaggtactccacggctttgggggcaagggaaaaagaataaaactaaaacacatgcacgccggcgctggctaaaggttctcaacaagtgaaagttgcgggtctttcagccagatcctctttcttcaacc

SEQ ID NO: 473872 - DNA, 1000 bp, Homo Sapiens; identical to SEQ ID NO: 160381

SEQ ID NO: 473873 - DNA, 1000 bp, Homo Sapiens
tttttttttttttttttttttttttttttttttttttttttttttaggagcctagaaacaggagctttattctttaatgtgcgtccagcaagttccttacacaatcaaggaaatggtttctctttcaggcatcgactcttttatcaaaagaaaatccatcctgctcagtcccacccaccctgggcagaagctgccctgagcaacgctcttggcctaaagctaaaggataatgggagaggggtgggcacataccactgcacccctacaatgcccagatgccccaggcctgagtcagccatgagaaggcgcagcacagagcagtcacccacacacctacacctcccctcacagctccagagccagcctgggaggacgtggagggctggcgaatggggcgtgggcagggtctgccagtcaaggcctgtgctcagcgtccatgacatccaagtacttggcttcaatgattcggggcagcaggatatagcggatggggatcatggcgatcatgatgaggggaaagatcatcttcatgtagggcagggagctcatgccgaaggcacacagcagcagcagctgaagcacctgcaggcccgtgaagtagtggatcttcctctggggcaccctccggatgtagtgtgtcggggggtacgcagtctgctccttgagcagcagggccacgcgctggacgagctggttgccatcgagggaggtgagcgcgatgtagaggaagaggccatagagcacgggcttggggatccactgaagcgggaccggcagcagcaacagggacaggcccaccaggacgctggcgcccagcgaggtcagccgcgtctccttcacgttcacaatcgtgtcatagatgtgtccgttctccacacgctcctccactaaggccagggctcgcacgtgcagcggggagtgggggtaggcggcatggatccaaggcagcccaaacagagacagccctgtgttgatgatggcgaggagcaggaggtcccag

SEQ ID NO: 473874 - DNA, 1000 bp, Homo Sapiens
tgcgaggaacagcgagtttattgcaggttccaaccgggaacctggcacccacggctggttgggaagggacgccctccgcgcagaggctgagagttccgcgcaggcgcaatgcttccgtcccctctggtctcgccctctcggggcctggtcgcagggaatcgcggatgcgcatgcgcctccagctcccgggatcgcggggaacgtggattccgaacaagggcaactgcggactcccccgtgggaagaaagggagggaagcggaagggaaaaagcgcatgtgcagcagcacgcggcagcttcgcatattccctcgaagcgcgcctcttgcgcgtgcgccgccctggcccagtgcccttggctgcaggaatggctggaaccacccggcttctagccggagtccccggcgcgcagccagcagttgcgcgctacctggcccgcggagggcctggcggacgggctgaactgcagcagctcggcgatcagggccttgcagcgctcggacagctcgaggccttcgggatagagcacgccgcgtttctggcgccggggcaggccggcgatgtccgagtcgtcgaagggcatgcacccggtgaccatgacgtagagcacgacgcccatgctccacacatcgtacttcttggggtcgtaggggatgcccaggagcacctcgggtgacgcgtaggcggctgagccgcagtaggtggtgctcaggtctgggtagccatgggcctggcggccgaagccgaagtcggtgagcttgacgcggcgctcgtccgggctcagcagcacgttttcgcacttgaggtcgcggtgcaccaggtgatgatcgtgcaggtagcgcacggcgccggcgatctgcgcaaagaggtcgcgcgcctgaactccggggatgcgcccgttgcgctgcacggcttgcagcaggtcggtggcggccgcttccatcacgatgtacagtttcccgttgcacacctcgatgaactcgaagacgtgcacgatgtgc

SEQ ID NO: 473875 - DNA, 1000 bp, Homo Sapiens; identical to SEQ ID NO: 160384

SEQ ID NO: 473876 - DNA, 1000 bp, Homo Sapiens; identical to SEQ ID NO: 342805

SEQ ID NO: 473877 - DNA, 1000 bp, Homo Sapiens; identical to SEQ ID NO: 342806

SEQ ID NO: 473878 - DNA, 1000 bp, Homo Sapiens; identical to SEQ ID NO: 342807

SEQ ID NO: 473879 - DNA, 1000 bp, Homo Sapiens; identical to SEQ ID NO: 342808

SEQ ID NO: 473880 - DNA, 1000 bp, Homo Sapiens; identical to SEQ ID NO: 342809

SEQ ID NO: 473881 - DNA, 1000 bp, Homo Sapiens; identical to SEQ ID NO: 342810

SEQ ID NO: 473882 - DNA, 1000 bp, Homo Sapiens; identical to SEQ ID NO: 342811

SEQ ID NO: 473883 - DNA, 1000 bp, Homo Sapiens; identical to SEQ ID NO: 342813

SEQ ID NO: 473884 - DNA, 1000 bp, Homo Sapiens
aatgtataaaatatatgagttaagaaagtaggttggaacatagattggaaagtaggtggaaattataaaatgtgatagtccacatattcataatcttgtccataggctttcactaaagaaatactatatcctatgtgttctatattaaagtgtcaccactgaaggaaactggtaaactcatttttacctctataaagttttttaaatccctattttcaaaacatttgttttgcaaaataatagagaaatatcatgcaaataaattcctcatggaaataaaggaagggctgggctcacctgaatacttggcaggttttctttacattcctgaaaatctacggatgttagcaaagaatcatttttctcacagctctcctggctgatgagcatgtctacatagttgggctgggggaagatcaggtgactcttccgagagtccgcggtgagggagacctcatgggaataggtctgcaggaaagcctgcaccccgtccatgcccacaaagtgcgaggtgggcacgttcgccaagccaccttctgaagcctgcagcaggcgtgacttgtgccagcgccgcagcctgagcgccagcagtacgaggacgaaggctaggaagacgcaggagactgtggccaccgccaccaccaggtacaacgtgaggtcatagttgtaaggaccgtcggagggctcaaggctgcccaggtcggccaagacttcggggatgctgtcagccacagccacggtgagtgtgacggtggctgacagaggaggctgaccgtggtcctggacggccaccacgaggctctgcttgagggcatctctgtccagcagggcccgagccgtgcgcacctcgcccgtgtacagcccaaccgcaaagagtcctggctcgctggccttaagcaggaggtatgacagccaggcgttctggcctgaatctttgtccaccgccaccaccttggtcaccaggtagccgggctctgcggagcggggtgccagctccatg

SEQ ID NO: 473885 - DNA, 1000 bp, Homo Sapiens
aatggtggaatataactacaaatcagtgaaggcacagcaaaattgaaatggaaataaaaagtgtttgtgaatcattaatttgtatctatatataataaattgagagcctcatacactgataatagaaaaataatactaaaattcaacttacttcaaaccaaaccagcatagttgaatggcccctttgaaatcaaaagaaaatatgccaagattgaaaaatgactttcacaaaaacgttctgaaagattatcgtaatctcatgaaaggcaaagtaaaactcacatgtattgctctaaatatatatgaactaaatatatgccgccccaccccccccccaaacagttttcataacaggctcaaaaaacatctccttaaaagacttgtgccaagacaccaacaattaggaggcagagaaataaatctcacctgattacttgtcgggtcacatttgcctaaaatgatagctgagtcttcagctatcaagagtggctcgcttttctcacagctctcctggctgatgagcgtgtccccatagttgggctgggggaaaatcaggtgactcttctgcgagtccgcaatgagagagacctcgtgggaataggtttgcaggaaagcctgtaccccgtccacgcctacaaaatgtgacgtgggcatacctgccaacccgccttcagaagcctgcagcaggcgtgacttatgccagcgccacagcctgagtgccagcagcacgatgacaaagaccaggaagatgcaggagactgcggccaccgccaccaccaagtacagcgagaggtctgaggtttcagagttagccagagactcgaggctgccgaggtccgccaggacttcggggatgctgtcggccacagccacggtgagcgtgacggtggccgagagagggggctggccgtggtcctggacggccaccacgaggctctgcttgagcgcgtctctgtccagcagtgcccgcgctgtacgcacctcgcccgtgtgctccccc

SEQ ID NO: 473886 - DNA, 1000 bp, Homo Sapiens
taaacttttgttttaataatgataaccataaatttgacctatattttgcgaactctatgaagaagttatctagaatcttaaaataataccactatattggaatatattggcatattgtaatataaaaaggattaaatacatttttaaatacttacctgtttaagaatcttcttatctgcttcaacgctgggagttaaaatgctagccagtagcatgctatctttgttgaggttatcttgtgtggctggacaatgatcaacagatgtgaaaaaattaaattctggattcatttgatccccaggcacacaaaaattataggcatagggcaacgttccctcactgtagttggggggacccacaggtccggacttggagcagagaactgactcaaagcagtctcctgcagtagggctgaaagactgtcgcaggcgtagagcaatagctagaatcaccgcgaggagaaagagcacagaaatcaaggccaaggccaccaccaggtaaaactgcatctcagcctgggagtcagagggtgtgggatggtcgctgaaatccggcagtacctcttgcaagctatctgcgaacaccaggtgcagcgtggcagtggctgaaaggggtggctgtcctccatctcttacagcgactagcaggcgctggcggaccgagtccttgtcacccaaagcacgcaccatgcgcacctcgcctgttcgcagccccaggctgaagagcccgggctcactggcctgcaccacgtggtaggacagccaggcattgtgccccgagtccgcgtccacggccaccaccttggtcaccaggtagcctggctgcgcggcccgcggcactgtgtcgaagagcgcggagccgtcgggacccagcgcagggtacagcacccgcggtgcgttgtcgttacggtcgcccaccaacacgcgcaggctcacattggcgctgagcgcgggcgagccctggtcgcgggcctgcagcgtgagctcgaaggtgcgcagct

SEQ ID NO: 473887 - DNA, 1000 bp, Homo Sapiens; identical to SEQ ID NO: 160386

SEQ ID NO: 473888 - DNA, 1000 bp, Homo Sapiens; identical to SEQ ID NO: 342815

SEQ ID NO: 473889 - DNA, 1000 bp, Homo Sapiens; identical to SEQ ID NO: 336952

SEQ ID NO: 473890 - DNA, 1000 bp, Homo Sapiens
tttttttttttttttttttttttttcacatactgaaaatgattttattttatccatttacatttaacttgatataaacttgtccggaaaagtcaaataatatgctttatattagctcaaacatttattaagaaaaccgaattccataaataaacacagacattaagttaaaacatatcacaaattgaccagtatgtaacaagaatgctttatctacacaaaacatcctatttcacatatttgttcattcttagaaagcgcttctgttctctgggtttggatttgaccagcacatgcagaaagagctgattgtgtttctctgtacaaagttgcagggttgtagatgtccgagtgcccccatcggctgccagcaggtggccgaggggcacgagggacgacaggaccaccacaaaacaaccaagggcacagagcagcgagaagacagaaacagaaaaggaagcaaacaaaccccagtcctgaaggatccagaaaagagatgtggcttttgcttttacaaaagaaaattttgcttacacgtttattttattcttccttataaagacttatcaaaatgggtcagatcacctcttcctcgtcacatgactgctttagtctactccagccacccaatccactgtcacgttcctcctgagaagccttcccttctacactctcacacagttgtgcttaagaaaatgaaaataagataaaataaaaataaaagcgttatcttgcaagccaagagagggctgcacggatgtgactgggtggactgggcaagggtagcgtggtgggagaggaaagaaagacaggagcttggagagtacaaggataaatcaaatcatatcagttgggccctcagatgaggcggttggtagcaatgcttgtcctcctttaagacaaaaatccctaacattgtgctgtcccttgaacacgtccgtgtgtgacctaggtgcaccgtgtctgtgcgcgcgcgtgtgtagcgtctgagcgtgagcgag

SEQ ID NO: 473891 - DNA, 941 bp, Homo Sapiens; identical to SEQ ID NO: 342820

SEQ ID NO: 473892 - DNA, 1000 bp, Homo Sapiens; identical to SEQ ID NO: 160388

SEQ ID NO: 473893 - DNA, 1000 bp, Homo Sapiens; identical to SEQ ID NO: 342822

SEQ ID NO: 473894 - DNA, 1000 bp, Homo Sapiens; identical to SEQ ID NO: 160389

SEQ ID NO: 473895 - DNA, 1000 bp, Homo Sapiens; identical to SEQ ID NO: 342824

SEQ ID NO: 473896 - DNA, 1000 bp, Homo Sapiens
tttttttttttttttttttttttaacttggccaattatttattagatggtagaagcagccagcttagcaaagagatgaaacaaggaggaactggtgtgaaataaaatatgaaatcccatcattcctcctccttcaaattgaagccaaagaatcacacccagggcaggacagtttctgaaacactgtttgctctgtatcttctttactctcatttcaagctggcagttaagcttcaccttccctcagtctgggactttggggcaggcacagcgtggcccacagaaggttgggtggtcactggctcctctccacctttgtaaaggcctgaggcctctgaaggaatgttcccccgattgtagttgttctttagagcacacaacaaacatttctcgcagcaggtcccacagtgatgaaggggatccagtgagccctgttttgttttttgtggtgccatcgtcttcttgtgaagagcacagggtgctccattgactccactggctccatccattttcttgggcctgagctgtggttctctgtgagtctttcccatcagcctgagttcctgctgctcctttggtgctcttctaaggggaagcttatagttcttctgtgtatttattaaaatgtccatcttctcatccatatctttctgcatttccttcataatttccacaaattcgtgaagtttatcaaaatccttgtccattagatcctttatctgttttatctcctccattttctccttgagctcttctctcacttccctgagttcattctttaggtcctgtgtcactcctgctttggtaaaccgcccttcttgtttaactgctttgtaatcaaatgttttggtcggctctggcttcaattccaggcaaactgccttgtagttcttgcacagatgtgttttcttcaattctgccctcttggccgacatgatggaggaggccagggtgttcttcaactccccacaacagcccctgggaccaggccactgtcctag

SEQ ID NO: 473897 - DNA, 1000 bp, Homo Sapiens; identical to SEQ ID NO: 342827

SEQ ID NO: 473898 - DNA, 1000 bp, Homo Sapiens; identical to SEQ ID NO: 160390

SEQ ID NO: 473899 - DNA, 1000 bp, Homo Sapiens
ttttttttttttttttatttttttttttttttttttttcctaatgagagcatttattatttgacatagtaagaattagtacagatcctatgttgtaacgtgttccactcatgttgcctacccttctttctatataatctaacagccttcattgcacagttcatttaacttatgaacacttcaattccaaaattgttaaatcaagattttaagactagaactaaattgtttaatagagaatagaagaaaaagtcatttacttgaaaatgcacatattttcatcttacatttctctcaacaggaaatataatgtgtatattcatttttccataatacctaacaagaagaaatgcttaattttaaaaaatacttcagctactcactaaaaccagttcttgaaaaactttccacatttgttaatgctgaaaaaaatgttcacgtttgttaccagttcttaagaatgagggagacgtgagttctcgtttctactgttaatctgcatcatgttagaaagagggaatgggcaggggttccaggaaggtgtgatgtctctgaattcggtttagaagctgctgtgccacaggtttgaattctgtttcccaatggagtttgtgatagttttttaggtctggatcaaaactgccatccagtgctagttcttcatctaaaaatgatgagagcaagagtaagagtgtgttggtgtcttcatttccaaaacatgacgaagcattagtgatgttttcactgaagttccataaagttttacaaaccaagcaggccagctgccaatcagtaggacccaaatctcttaaacagtccactaactttttaatgccacctccttctttcaagatgacacgcttgtctttatccacagtgagattgaggagaacaccacaggcagaaaagcagatatcctgatgctgagcatccagcagcgccatcatgaacctgtggacattgttctgcacaatgaaatcgcagacatcatggtcctggga

SEQ ID NO: 473900 - DNA, 1000 bp, Homo Sapiens
ttttttttttttttttttttttttttttttttttttttttttttttttttttttttttttttttttttttttttttttttttttttttttagtagaaacttgaaggttctttattgatttatttattaacccgttttccagaaggttgcttgggcccgagagtcacctgcagaggcgcaaagcctcctcgacattctttatggggctgagctcatcagccaggaccatcaggtcagtcaccagggtgtccagcagcccacggacctcactgtgcaggctctgggtgtatttccccatgaccagggggtctatgggttcttgagaagagaggatgatgtcaggggtagggtcttccaaagaaaacctgtcctgacttgcagattttatgactttcttgtcatcctttgccttgtgcttcttgctgttgggacggtcctctttcccgagcagcttggctcctttcttgtcttctttgtctttgatccccagttgcttcttttcctgggctgctcctttccgctcctccttcccagctttccccacaggtaccttcacttccatgataggaggtgatttttgatcttgctcttcaggcacattcaaatagatggtctccttctcaggcaggcccagcacagacctcagccacatggaatggcccaccaggctgtcaatcacatctcgccacagctgcaaacacatctggtgcaggaggttggactgcaatggccttggcttctggcacagctccagggctgctttgttgagcctcatcaacgcatcctctctgtggttctcatcagggagcaccatcactgcctttctgaagtcctccaagcagaggttccactccagcaggggaaggccatccggctcccaggggctcttggtgctgtccacatctgggctttcctccaccaggatctcctccatgatgctcttccgctgaggactcttggtccccactctggccttctgggacccggattccctgagggcc

SEQ ID NO: 473901 - DNA, 1000 bp, Homo Sapiens; identical to SEQ ID NO: 342829

SEQ ID NO: 473902 - DNA, 1000 bp, Homo Sapiens
tttttttttttttttttttttttttttttttttttttttttttttttttttttttttttttttttttttttttttttttttttttttttttttttatgctgctacagtttttattgttcattttccaacctgtattccaagtcttggggtcccctttaatttgccttattgacaaagctacttcccgctgcccacccttttctaaagtatgttcttccaaaaccatgtagcttctgattgctagcttaggtacaacctgactacagttcaggaggacgttgttttaattctatatgaaaaacactttctatttcaagagtgggagcctgtccatcattggtattagacaaatctttaaggacagaattgatttttgaaacctcttcaaattttgcttcaccttccaaaacaaccgatcctaattttactgctggaattcctgccacctgcggtgactgaaattctgtagacacattctctaccagagcctcatcttcaggggtttgttcagatggtggaggtgaaacttcagcagaggcctctcctataggaaactcctcagtcagaagcaaatcagctggtggggaatgtttgtcaacggaggcctcttctgcagggacatcatcagctgggggagagtgtactgcagcaagggtctcttctataggagtctcctcagctggtagagactgaacttcagcaggggcctcctcagctggtggaggctgaacttcagcgggggcctcctcagctggtggaggctgaacttcagcgggggcctcctcagctggtggaggctgaacttcagcgggggtctcctcagctggtggaggctgaacttcagcgggggcctcctcagctggtggaggctgaacttcagcgggggcctcctcagctggtggaggctgaacttcagcaggagcctcttctgcagaagcctctgtagctgctagaagctgaattgcagcagaggcctcttctgcagtggtctcttcacctg

SEQ ID NO: 473903 - DNA, 1000 bp, Homo Sapiens
ttttttttttttttttctttttttttttttttgatttttaaatgctttattacattaactttagtatcattagcagatgaatataatcagattaacaaactggtttggccacaaggaaaagaaaaaacatttctgaagcttcacaaaactatgtgtgtagtgtgcaaactagaaccagttatactttcatcacttcacacaacacaagtagtgtggtgcatcaagagatgttccactgctgcaccatcacctccaaactgtagaggagagatgaaggcaaactttggaggaatttccaaggcaactgcagtcaaacattatctgtaaaactgcaggtataaatggcattatacaaaagctcaaacatccttcaaaacttggactattgaagtctacaattaaatttcaatttttttaacttacaaggaaatcatactcatttaagatacagttacctctactttaatccccagctcagtaagatatttgtagtcttatcagaaatatttgtattaggtagttgttttatttcctattctattgcttacaattttaaaatccacattaataactcagagtaacatttatacatagattaacagaaaggtaaactttaatttccaaattaggaatgaagaaagatgttaaatggctttgctttaaaagaaacagtacaactgtataggtataaataatggttttgtgacaataaacatgaatttaatacaaagataccagtgcttttgggccaaagccaatagacttgactttttagaaataagcctagtttacttcattaaagtaagtgttacggctgctataatgtgtctggtactgattccaaacatatccagcaattcactagttttcccacgttgaggcactcctgacactgccagttgatgaacaaggatatcaggctccctggagacagctgcacaaacagcttctccaatgccaccttccctgtagtgatcctccactgtgataactcggccgc

SEQ ID NO: 473904 - DNA, 1000 bp, Homo Sapiens
tttttttttttttttttttttttgtccttccccagagcctcaccccaatgctggaggcccgctggtttattatagaagcttggaggacagggtgggagaccggggaggcagggctgggctggcaagaagccccagcaccccgggccggggcctggctcacttggctgctgccaggatggcgctacttcttggaggcctgcttcttccaactagttatcttgctgtccctgctgagaggatgtagctccacttcaggctctcttgtcttctcagcctccagagataactccttctccacatagtcttccagggccaatgaggagctgcttccttggatatcttctgactcggctttcttgactgattcagaatcctccaggctcaggacagagttgggaacactgaatttgtagtcatccggcaggaagtagcccatcttgtaatcctgttgagaccggaagatctgtttcagcagattctgcttgctgaggccatatccattcaaaacacggcccccaaaaatgagcttccccccggcaaacatcagaatcatcccctgcaccacagagttcttcttcaccatcaggggagggtcctcctgcagggggctgtccaggtcatactgcagcaggcggtaggagtcataccggcactggatgcagggggagccacggccccgctgctggtggttgtagagagtgttcagcagccactggagctgcccagtgctggtgtagttctggcttgagatgatcccaaacaccagcacttggctggggtctcggggcgccaacaggaagcgctccagctccacgtcagagaccaggggcgccttcaccaggcacttgcagccagcacgggtgtcttccttgagcatgagcttccgcagcaccagcgggcagtctgagggcaaggccgcccacctggtggggctgcgcccctcgcgggccttccctctggatgtgaccttggctttggtgtggattttggtggtcttccg

SEQ ID NO: 473905 - DNA, 1000 bp, Homo Sapiens; identical to SEQ ID NO: 342830

SEQ ID NO: 473906 - DNA, 1000 bp, Homo Sapiens; identical to SEQ ID NO: 342831

SEQ ID NO: 473907 - DNA, 1000 bp, Homo Sapiens; identical to SEQ ID NO: 342833

SEQ ID NO: 473908 - DNA, 1000 bp, Homo Sapiens; identical to SEQ ID NO: 342835

SEQ ID NO: 473909 - DNA, 1000 bp, Homo Sapiens
ttttttttttttttttagatggaggtaaaagtgagtttatcttatgctcagcaaaacatatttaggtcagtttaaatatgagcaactggtaaatttatcctcagctagcatagaggtgggcattgttaatacgattcaaagcttggttgggcactcttcgttttatagtatgcctgggatacagcacatctgtgagacaagaaaggctaaactagagctctgcttcttctaatcctgcattacaaatttaataataaagtacatttctgctatgtttgtggttttaaaattattcactgtaaacatcctatattctttcctaattaatttcagagctggaacttatatctatgtctatgtcaaattatcatttattctatgaaaagcagcacgaatactcttcattctggttttgacacaaattccttaaaaaaaaattaaggccatttaattgaatcagggccaactgaagattaccctggcaaaagtcaaactactgatttaagagttttgaaaaagagccataagtggttgtcgtgtattttcttccttggtaacttgagagcagtttgtagaatttattagtctccaacatctccatctcgatctccaataagccaaagaaaatgaaaacttaaggctaacagagctgtcccgagcagatcacccaatgctgttaggtaggggatggagaaactatccgggtcctttcctttcctccagaagtgatggaccatccagtcagcaatccacagcaaggtaaatacctgtaacacagcgccaaataaatacactactatgaagattatagttaaagaagtatgaccacttttcatcaaatgaatagtgtagaggaaaattaaatgtccaggaatcactaaaagcagtagaacttgagcagacttattatttactcctggaccaaagaaagttctaaatgggtagtaacaacctttgggttcatcaggcaattctcctggaatgctatgtaaatggaggt

SEQ ID NO: 473910 - DNA, 1000 bp, Homo Sapiens; identical to SEQ ID NO: 342836

SEQ ID NO: 473911 - DNA, 1000 bp, Homo Sapiens
tttttttttttttttttttttttttttgctttaaactggggctttatgtggccaggtacaagcccaggcagctctgtgactttcccgcgccgggatccagggctcctgggtgagcgggcgctgggctggctggctgtcctggccccacgcctaccggtcttaccgtcccagggggagtggttggttttccaggggatcgcagaagtcgacatcatcgtacacctccgtctccaggggcaggagcgctgttctgggcacgtagccatatttgcctttggggtcccggcacagcatctcctcattgctggtgaactcgatcacctccaggatctccccgcgccggatcccgaggtgcttgccacccccgcgacgtgtcttagcgttggggtcgatcatcatcttcgtgtgaaccacgatctccccttcaaacttgaacttcttccggaactccctctcggccttctctgccttcctcagctgcttcagcaactttgggtccatgggtggcaactgctgtggctggggatccttctccttcctgagcgctgggtcttgtggtggcctcctggcggcttgctgaactgagggcgcttcatctctgcccttggggctggggctggagtcatctctgggttccacatcgtcatacagctcgtagatctcatctgggaccgggatgtcttcaggctgtcggtcctggaagtggagcccagcggccgagcgggtcctccgtagatctatggatgctgcagagggtctccgaaagctctgcatatccacgggccccgggggcagcgggggcttggctggagggtgtcccaggctgctggcagggggcagaggcctccgccggggtggatggctgggtctgaggcctggcctggcccctccactgtgaaccaggcctcctgacctccagcggggtgtcccagccgctccaaacccagggctgagcgggtgccgggagctgaagccggccacggccgcaggcagtgagctc

SEQ ID NO: 473912 - DNA, 1000 bp, Homo Sapiens
aaagaggaagagaaacatcacattatttatttccaaagaaaatagccaaatgcagcgccatgtacacaaaagcctttggagggaaaaggaatcacagatttaatatcatttacatttatatatttacaagatcaagccatggctttcaactttgttgttcattcaacaatcactttcagtcaaacaacttttattttcaagttagttcataatttaactgacactaaagagacagatgataaatcacaaacagtgtgggtagagagggtacaaatagtctaaagatttcagccaggcttttgtgtatatgtgaattatgattacaaaatgtttgcctgtctgtataattcacattcattgcaattattacattttctcataaattagcaatataaacaaacatatggagaccttcagttaacaaataaaatcaatatcaggaagaacattttgcagcaactataataacagcatgggttacagcttggaaaaacttctttacaagccatttattcagcacacacagagtagggggaccagcacatccttatttatttaaaccacctttaaaaccaccacaggagttttggggaaacctgaactgggtgaaagtttctttgctgggcacaatataaaatgaacaacttcacacgtgaatgaagggaaggatgggcatttacatgcattttcgatcactgtgttgtagaccaaaccttctaaacttcaattgccaagattctgaaggaaacaggaaattaataaaatatctctctccttcagctattctccttcttattaacggcagaaagggcttgttgattgctgctagtgagaagaaacacacaatgggtctatttttagcagaggtggctttgaaggagcaggagatattaacaattgcttggctgcattcttaagttccaaggatcctgggcaagaatattaggagcctgaggggtacccaaaggaaacccatctatgtgacccaacttgggctgat

SEQ ID NO: 473913 - DNA, 1000 bp, Homo Sapiens; identical to SEQ ID NO: 342837

SEQ ID NO: 473914 - DNA, 1000 bp, Homo Sapiens; identical to SEQ ID NO: 342838

SEQ ID NO: 473915 - DNA, 1000 bp, Homo Sapiens; identical to SEQ ID NO: 342839

SEQ ID NO: 473916 - DNA, 1000 bp, Homo Sapiens; identical to SEQ ID NO: 342840

SEQ ID NO: 473917 - DNA, 1000 bp, Homo Sapiens; identical to SEQ ID NO: 342841

SEQ ID NO: 473918 - DNA, 1000 bp, Homo Sapiens
tttttttttttttttttttttttttttttttttaatttgtatcctagtccatttattcattccataaatatttattatatatgcttggagtacataagaccctaaggatccccaaatgacaggtgcagcccttgacttcatcaactcacagttgattgatagagtcaaaaagaaacagtcagttgttctgcaatgtgataagtgctgtcacaaatttgtgtacagaggtgtagatctattaggctcacagaggtgatctgctctacccaggcctgaaggaccaagaggatcaggaggatcgaggaggagggtttgaaagtaagggtgtgtgacgtgattccaaccagagggaacaacaagggcagttgttcagaggtgagtgagcacagcttgttcagggaactctaaatgcctaagcacatctagagccaaagtgtgatgtgctaggtcaggggagggaagtggggacagaatagatgaggccagagtgattaaataggggccagatcacaaaggactttgtgtgacatgctaaagagattggattttattgtgaaggtgatggaaagcaaatgaagaattttaagcagaggagagacatgatcaaatttgcattttagaaatagcaacagcatggaggatgggttggaaggagatgaggctgggagcagggagaataattgaatagtctactgcagcagtaagtgaaaaatgatgagggcctaaactcagctaagaggtagtgggcatgtagaggtcagaagataggaatgacaggtcatggcatttggtcatttatagggagtgagggagagaaaggagactaggtgactcaccagtttctggttttgtatctcactagtccaacttctccagactaacgcagacttttctcttcccttggcctttcctctcctcgccattgggccaattccttcgatttctcatttcccttgaagttagggccattcacagtttcatggtcaaagccagttccagg

SEQ ID NO: 473919 - DNA, 1000 bp, Homo Sapiens; identical to SEQ ID NO: 342842

SEQ ID NO: 473920 - DNA, 1000 bp, Homo Sapiens; identical to SEQ ID NO: 342843

SEQ ID NO: 473921 - DNA, 1000 bp, Homo Sapiens
ccatgttcaaagctagattttactaaacacatgtatcacattcatatatattgtttcttggccccactgccaaaggaagtcagtcagtaatttcacaaccgttatcagagtttggaagcagaaatagctgttaactaaaatctcccactgctcagactactttctgccctaatggccattactatccagtctgtattgctacaagggacccactggtaccccttttagattctatcaaaaggaacagggttttcctagaggcaggcagcctggtggtatggcacagcagaagcttactgctaatgaaatgggaacctccccctcccttgtggtttcagcacagaacctgaatgccaggaaaaattcctgggccaagaagctaaagctaaagaaaccttccttttttcaacgtttttttttctttcaaactgtagggtcacttttgattgaggcaaaggggtcctactgtaagtggaaaagactcactcccctaacataagttttcactgtggtgggatggtgccgcccgatatgcttgatatgcttttccttccacatgttaagctaggaaacctaacaggatgtcagcagggcagttaactctggactcagagccctcaagggcatgtggcagaacctcatggacatcacaagaccatcagtctgaatccaggtcgtgggggctgtcatagccgaactccttctgcacatccagagggtacttgctccacatccgctgtctgctgctgcctctttcctcctcactcaggctgttgtagtcagcagagcctctggaatcctcatctccatcactgctctcctcctctgggtactcattgcgccagttattctcactgttctcgtcatcttcatcgtcgtaaatgtcctctggttcttgatcatcattcaccagctcccattcttggctgtagggctgcacggagaggatgttctcaatccagcctggagtggccgtctccaagtagtaaatgtcatacac

SEQ ID NO: 473922 - DNA, 1000 bp, Homo Sapiens; identical to SEQ ID NO: 342844

SEQ ID NO: 473923 - DNA, 1000 bp, Homo Sapiens; identical to SEQ ID NO: 160392

SEQ ID NO: 473924 - DNA, 1000 bp, Homo Sapiens; identical to SEQ ID NO: 160393

SEQ ID NO: 473925 - DNA, 1000 bp, Homo Sapiens; identical to SEQ ID NO: 342848

SEQ ID NO: 473926 - DNA, 1000 bp, Homo Sapiens; identical to SEQ ID NO: 160394

SEQ ID NO: 473927 - DNA, 1000 bp, Homo Sapiens; identical to SEQ ID NO: 160395

SEQ ID NO: 473928 - DNA, 1000 bp, Homo Sapiens; identical to SEQ ID NO: 160396

SEQ ID NO: 473929 - DNA, 1000 bp, Homo Sapiens; identical to SEQ ID NO: 160398

SEQ ID NO: 473930 - DNA, 1000 bp, Homo Sapiens; identical to SEQ ID NO: 342853

SEQ ID NO: 473931 - DNA, 1000 bp, Homo Sapiens; identical to SEQ ID NO: 342854

SEQ ID NO: 473932 - DNA, 1000 bp, Homo Sapiens; identical to SEQ ID NO: 342856

SEQ ID NO: 473933 - DNA, 1000 bp, Homo Sapiens; identical to SEQ ID NO: 342857

SEQ ID NO: 473934 - DNA, 1000 bp, Homo Sapiens
ttttttttttttttttttgggtttgacccatttttatagaaagccagctaccagaagtaatgagtccccagggccaaccacattggaggcctgggtgagggaccacccagcagggagcaagggagggatgcagacaaaggtagcagagaccctggcaacctccttccagtactcagcagtcacagctcagctgggaggggacccagcaacacactgggtccccagcacagtcttgggtgggcccttcatggaaggggcagggaggctctggatgcttctgcagtcatgctgacccaggttggggtacatgagacctgccccagaggcttggggttcagctgtcatcctcggtgatgaggtgatgagtggtggaccacagggtttacccacatccaacggtcacaggatggggtctgagccgttccagttcactgatgcccccttccacttggttctgatgcagagctcgaggggtgggacaaggtcgttgtctgtgtcctcagagatggtttgggtggtgtcaatggtcagccggatctgctcctgctggttggccaggccatcgtagtagtacaagtmaaagagcctctcagtcctccagtcacgcaggagccccggctgcaggctaaagaggatgctgaagtggctctcactgcaaaccacccagatggggaacctcggggtcttcaggaagcagccaacctggcacatgttgtaatgctcaaagagagaaaagaagccaatatcactgcgtgcagcaatgcctctgagaagtgtgaagttcccatccccagaatccagctcaaccacatcgttgaaaacgtttggacacagctttcccagttaggagcagattgacaagttcctgtgtacagtagccatgtgctccaatcaggtggctggtggggacatcaaagtcctggcggatgagctctgtagacctggacaggatggcagaaagggtgagcaggatgcagccataggggcccacttcaaactg

SEQ ID NO: 473935 - DNA, 1000 bp, Homo Sapiens; identical to SEQ ID NO: 160400

SEQ ID NO: 473936 - DNA, 1000 bp, Homo Sapiens; identical to SEQ ID NO: 342859

SEQ ID NO: 473937 - DNA, 1000 bp, Homo Sapiens; identical to SEQ ID NO: 160401

SEQ ID NO: 473938 - DNA, 1000 bp, Homo Sapiens; identical to SEQ ID NO: 342861

SEQ ID NO: 473939 - DNA, 1000 bp, Homo Sapiens; identical to SEQ ID NO: 342862

SEQ ID NO: 473940 - DNA, 1000 bp, Homo Sapiens; identical to SEQ ID NO: 246564

SEQ ID NO: 473941 - DNA, 1000 bp, Homo Sapiens; identical to SEQ ID NO: 160404

SEQ ID NO: 473942 - DNA, 1000 bp, Homo Sapiens; identical to SEQ ID NO: 342865

SEQ ID NO: 473943 - DNA, 1000 bp, Homo Sapiens; identical to SEQ ID NO: 342866

SEQ ID NO: 473944 - DNA, 1000 bp, Homo Sapiens; identical to SEQ ID NO: 342867

SEQ ID NO: 473945 - DNA, 1000 bp, Homo Sapiens; identical to SEQ ID NO: 342868

SEQ ID NO: 473946 - DNA, 1000 bp, Homo Sapiens
cttttttttttttttttttttttttttttttttttttttttttttcaagaacccaatttaatcagatttacgagttgacatgtacaaaaaacaccgaacaatgcagaattcatcgcaagactagggactgaatctggaaggtagagtccccgccccagggaggggcccagcgtgttggagatctcaaggttttttcccactgattctctaagtcttggccttatctaacacatgaaaccaaaccccacaactgaggctaagatttaagagctacccagagctaaattttcccctccccaagcctccctgctctagaagtggaagggaaagaaggggagagactatgaacctaaggagagtggagcctccagcaccaccggacagggactgcatagctgtccgacaactgagctcctcctgcctatctgtggccaaatgccctccatgtttgcaggcaggttggccaacaggggacagggagggtggggggaggcagaggggtgccccaaacgccctggagaggccgaagggaggaggggcagcactggaggccccattcggacttgctgccacgggagtcaccactgcagggggccgatgtcagctcccagctcctcttcctttagctggaagggcttcactggccacttcaccctgatgatgggctccacgtggtcctgaaggcggtgccgcttcatatgggcatttcgactcttgatcttgtcaaacaccctttcacactctctgcatggaaaaatgccctggctctctgcacttcccaacagctcgggggtccgcttggagcctgcatttgggctggagctgaggatggactccctcctataactcttggtctttaacttgggagttggatggtggctgggtctctcccgagggctgcatgggaccttttcctctgtcctttccacttcctccggctctctcttgaccctcttttctagccctggggctcggccacagtcaaacttgatcatttttt

SEQ ID NO: 473947 - DNA, 1000 bp, Homo Sapiens; identical to SEQ ID NO: 342869

SEQ ID NO: 473948 - DNA, 1000 bp, Homo Sapiens
ttttttttttcatttcaacaggaaacatttatttcaaaacatgaaggtggttatccttccatgagtttgaagtacaaaggcaggctcacggtgtcgtcagaattcagaacgatggtcgtggggctgggggtgctgggaggggctgggcatggttggctttgtgatctggggtctggtgtgttccatctctgaatctctctcgagctgcactctttcttaatacattttcataagtttaaccaaaaataaaacgaggatgcgaagcttgcttgggttgttaagcctagggaaattatccagccatgagccctggcccagatgcttctagaagcctggagggaactgagaactttccaagtggaggccgcagaggcaaggccctgaggtgggagcacactgctgttcgtccctagctctgaagggggtgccctggtcggaatcagtgctgggtgcagcgaaagccgatctcacccgctccgcagggtgttcagcctgccagcagggggccagctggtcctcctgggatatggcacggacccagcagctctgtctgaaatcataatggcggaaccaagggccctctacgtccaggtccgttgggaggcggggcatggagttccactgcaggaatctccaggaaccctgaggtcctccctgagccagggccgggctgggcacaccctgagtgcccacagggtaggtgtcttcccggacagccccaccaggacagggtgtggaagaacgaggtgcccgtggcggggaagctgaccaaatgggccgcgggaaccgggctggtgggcctggaggggcctgcctgtcccccttgcagagggtcttcccgccacgtgaagccggcacaggcctggatgccgacgacccttgctcgggtttggctgggggtggcaggtcccccttctttcttgttagtttcttcatagaggccctaagatgcttgagcacagtgtcctcatccctggcccaggtatcaacgaaccggttg

SEQ ID NO: 473949 - DNA, 1000 bp, Homo Sapiens
tttttttttttttttttttttttgatatatgtttacttttattaaggaaaaagaatctatgaacacaggaacagaaatcaggagatcttggctctcgccctttcagtgccacaaagctgttttgtgaacctgtaaataatccatttggagtctccatgtttctcaattgtaaaatgacgatgtgctgcttctgttagtggagccccatgaaatgtctgtgacccctgatatccatcaggcaccgagtctggtccataattctctgtgggccaacgatgacgggatgctgacttactgctatttagtttcaactcctgcatttctttcttaatggcctctacttgttggcaaatcatattcagtaaagaattccgatcttctgtccatcgaggtggtgtttcgggagaatacttgtaacttttacttggtgatagtgaatatttggtaggagacggtgtagaatgttttatttctgaatctgcatttcgcaaagaaccatttttatagagaggacctccttcactatagtcttcgagttcctgcatgactgaattaagcatctgttttacagactccaggggcacaggcaatttcttgaccactgaaagatttgaatcaccgtcatctataatctttattaggtagtccctggtctttgtcagataatttctgcattcttcttgttcttcaggagaaagggcatcattttcaatgtcttctgccttcctgtgaaaaatcagtgcaagattccaataagaaacaacactttttatagattcaaaagcagtcacagcatcttctatatttccatttactgcatccaacatagcaaaagttatgtgtgcgtcttcttcatattcaacaatttctgatgcctgaatgtctacactatgaaaatgtttaaacagaggatcaataggttcaggaatactgttcttctttattatcttcaacaatggcaaaactttcttccaataatgaacacttctccctatgtatt

SEQ ID NO: 473950 - DNA, 1000 bp, Homo Sapiens; identical to SEQ ID NO: 160406

SEQ ID NO: 473951 - DNA, 1000 bp, Homo Sapiens; identical to SEQ ID NO: 160408

SEQ ID NO: 473952 - DNA, 1000 bp, Homo Sapiens
tttttttttttttttttttatttactgcccctttattcatcttagagaaattacagacccattctcacccgcctcccccccggtagagagaaatggaagcctttccacgctgggggcgcaggaattggaggcagtggctgagcaggaaagaagcctggaaagggcagcacgatgaagacttaggacaatgaataataggggcggacctcgcctcatcgagtagcttcaggcctccacacttgccctgctttgggatttttatgtgtggtcccgaggagagttgtttgattcttgaaatctctagacaaactatggctgggcctctctccagggaaactgtacttgagtccctccttaaggggactgcgtcggctcctctcagagggactgcaatggttcctcccagagggcctccctggcctcatctcagagggactgtgacgggttctctcacaggaactgcgatggctcctctcagaggtcctcccttgcctcatcccggagggactgcgatggcttctctcagagggactgtgacaggttttcccagaggaactgtgtcctctcctctcagagggactgcaacggcttctttccaagggactgaggtggctcttctctgagggactgtgacttctctcagaaatcctacgatggctcctctcaaaggacctgtgagatctcctctcagagggactgcgatggctcctctccaagagactgtgacggctcctctccaagggactgtgacgtcttctctcagagggactgtgatggcttctctcagagggactgtgatggcttttctctgagggactgtgatgtcttctctcagagggactgcgatgtcttctctcagagggactgcaatggcttctctcagagggactgcaatggcttctctcagagggactgtgatgtcttctctcagagggactgtgatggcttctctcagagggactgtgatggcttctctctgagggactgcgatggctcctcc

SEQ ID NO: 473953 - DNA, 1000 bp, Homo Sapiens
cttttttttttttttttttttttttgagacggagtctcgctctgtcgcccaggctggcgtgcagtggcgggatctcggctcactgcaagctccgcctcccgggttcacaccattctcctgcctcagcctcccaagtagctgggactacaggcgcccgccactacgcccggctaattttttgtatttttagtagagacggggtttcaccaaagtcatcttatgcactgagtccttttccttgagaggtttagctttagaacaacagggaccatgctgatctttggttgactctaggaaaaataacaatttcatttactttaacacataacccttttaaaacagtaattactctttcttcttccctcatcctcatgattccttcctaacccaaagtccttcctaccgtaaaaaggagaaaccagtagtcctcttcatctagaaactcatcataccagggactgagcatcttgcaaatctccttctgggctttgggaatccaggggatcacatccccagagggcaatagttccttcaggccctgaatggtttgggatttgagtggtaagcacggaccaatctgctcattcaggtagagctcgcagattctgtcacccagcaagtgacgaaagattgcattcccattctttttgttattcagaaggacactgaggaaatgctgcaagtcctgccagaggtcaagaagttggatctccactttcaaattcagcttcttcaggtggtcccggaaagggttccctgcacaggcatcagcacacaaggccaagtggatgtatcctaaggagaagctttgcttgatggccttctgaattgtcatcttggaggagtgattgacaatggggatgacagtcctcaggtgggtagagacctttgtctcaaagggggcttccatgtggaggtggctcttggctttattctccatgctggatatttttgcataatgcatatccttttccagggaactgattcttgtttcctttga

SEQ ID NO: 473954 - DNA, 1000 bp, Homo Sapiens; identical to SEQ ID NO: 342873

SEQ ID NO: 473955 - DNA, 1000 bp, Homo Sapiens; identical to SEQ ID NO: 342874

SEQ ID NO: 473956 - DNA, 1000 bp, Homo Sapiens; identical to SEQ ID NO: 342875

SEQ ID NO: 473957 - DNA, 1000 bp, Homo Sapiens; identical to SEQ ID NO: 345732

SEQ ID NO: 473958 - DNA, 1000 bp, Homo Sapiens; identical to SEQ ID NO: 160409

SEQ ID NO: 473959 - DNA, 1000 bp, Homo Sapiens
ttttttttatctgagagttgttttttattgcagcataggctaagcttatccttaacaatatgttgggtaaggccagaaacagaagaaaaagcctcaaatctgaaaagtactacagagaaaaggaacccagacagtaaagattggtgtaatgtttcccacgcattagtttttccatcgatgaagtaaaaattcaaaaattacaactccgtgagtatacacagtactacttcccctcaactcatttttataaaaaggaaagtattgtcctgtcctaagaggaaagatcacatatttttcccctttagcctgcttgtctcttggcccatagaaattcttggcccattcttgccttcactgaatgcctctaataccttcagaagccaagaggaaagcactcttctgggtcaatgttcttctctgtagacagtattttatcaaacagactttagtttgtcaccatgatttgataggtagccccaaaactccagctgatgttacaagagtctcatttcttaaaatcaatgaaactggtcccttttgtcattgtttctctgtaatatcaacttggatatcacatgtccttcagagttgttcttcattgctctcaaatactggattgctgtaagacactcctctgccacactccggcatgtcagagtgggaggtttggtttagcgggggccaactagggtcatttgccaagtccctctgccatatccgatactggctttttgactgatagccgaaacatcttttaatcatcatccacagggctcgattttcaataacagcctcctcggccacaagggacacaatgaaattcaagctgagcatgatgacaatggaggccctccacaggacgggagtgcagagcagatccaaacgtctatataattctggtatatcagcaaatagaatgaatagacatacaccaagctgtattatcagcacaaggacaaatatatagtttgtataagttggctgtctaaatggttttcct

SEQ ID NO: 473960 - DNA, 1000 bp, Homo Sapiens; identical to SEQ ID NO: 160410

SEQ ID NO: 473961 - DNA, 1000 bp, Homo Sapiens; identical to SEQ ID NO: 342880

SEQ ID NO: 473962 - DNA, 1000 bp, Homo Sapiens; identical to SEQ ID NO: 160411

SEQ ID NO: 473963 - DNA, 1000 bp, Homo Sapiens; identical to SEQ ID NO: 160412

SEQ ID NO: 473964 - DNA, 1000 bp, Homo Sapiens
tttttttttttttttttttttttttttttttgctgtagcaaatatgacacacaccaggttaatatctttaatatataccgagctcatacaaatttatctgaccccagaagatagagcaaaggacactgacaatccacaaaggaggaaatacaatcgctccacatgaaagatgttcaaccgtgctagaagtcagtgaaatgccaactgaaacacgatgctattttttcattatcaaattagcaaatatttagccagatgataattcccaatacgggcaagatggacatgtttatccttgctggtggcagtgtaaggggatacaaatatttccggaaaccattttgtcaatatgtagtaaaagcctcaaaggttttcatattctttagttgaagaatcccacctcctggagtctaccctaataacttgacattgggaaacagcctgtgcacaaagatattcatcaatttataactgaaaagttagtaacagcattagtgattggcaactggcacaatggtccatctagtcaatgggagagtacacagccactccaaaataaaatatttagtaatcataaggggagatgcccacgatatgctaagtgaaaacagctgcacaaaactgtatcattacagaagacagcaacaaaactatgttaaaacaaaaagcaaagaaaccatagttgggggggaaagcctgagagacaccaaaatgtgatgttttatttccttctttcctctacttgcaaaaatttatctaacatgtggtttacatgggtaatgagaagacctagtaggtttggtgcttgtgtatgcaaaggcatgaggcacacggaagtgaggagctgggtttcctcccatctctaccgcatctgcgctgtgccaactgccaccccacccaaactcaggtccccaagagacagagacacaggggctgtctgttccacgtggaaggccctacaccccaaccttctcccctactctggggagcttctcctgtt

SEQ ID NO: 473965 - DNA, 1000 bp, Homo Sapiens; identical to SEQ ID NO: 342884

SEQ ID NO: 473966 - DNA, 1000 bp, Homo Sapiens
tttttttttttttttgtttttttttttactgtaaattttagaaatgtttattttagaaacacacaaagctaaaatgcatatttcagtccaacaacctagagagaagaaatagggagctacatgtttttgtttagtcttgttttttcctcaaaatccatccctaagagtcaggagctacaagtttataggtacgcatttgtatgaatatgcttgccatgattctaagacctagaacatctagaatacaggacattacatttttatttgaaaaaatatttaaattaattttacatgtacaatataatatcactttcagaacaaaaaaacattaatgaaagtagaatatactaaaacaaaattatttttacttttgagtcaaattctacaccctggaaaaagtcagaagcccatactagagttttgtagaagtttttttaaaaatgcttttaaaatttagcaaggctgcaaagtctgtcaataaataaatcaaattactatctgtcagtaagctatgaagtccacagtaagtaccaatgcaaactgaacagatttagaaagtcaatccatactttctagcatcatcatgaaaactccatgactgaccgacacatcatttccaatgttatcatcaaggcctcagtgtgtaccccaggacacactttcaaattctcaggcagttccttaagaatgtgtgggagtttctgcaatgtctttatatttccagcataaagatccagtaaccagtcagtatgaacactggtggtttctttatgacttttacaagccataagcagttcatttagatgagttaaccctttggaagctaaaatgaactctgaagataaatcaaaaattgaacaaaaatttagcaacatcctactaagtaaaaaggagccaaattcaagttgctggtaatgaaaatgtttctctgcttgtgcatgaaagttctccactgtatcttctatttttgtaatagcaaacagttcttctttgatttgag

SEQ ID NO: 473967 - DNA, 1000 bp, Homo Sapiens; identical to SEQ ID NO: 342885

SEQ ID NO: 473968 - DNA, 1000 bp, Homo Sapiens; identical to SEQ ID NO: 160413

SEQ ID NO: 473969 - DNA, 1000 bp, Homo Sapiens; identical to SEQ ID NO: 342887

SEQ ID NO: 473970 - DNA, 1000 bp, Homo Sapiens; identical to SEQ ID NO: 342888

SEQ ID NO: 473971 - DNA, 1000 bp, Homo Sapiens; identical to SEQ ID NO: 160414

SEQ ID NO: 473972 - DNA, 1000 bp, Homo Sapiens; identical to SEQ ID NO: 342889

SEQ ID NO: 473973 - DNA, 1000 bp, Homo Sapiens; identical to SEQ ID NO: 160415

SEQ ID NO: 473974 - DNA, 1000 bp, Homo Sapiens; identical to SEQ ID NO: 342890

SEQ ID NO: 473975 - DNA, 1000 bp, Homo Sapiens; identical to SEQ ID NO: 342891

SEQ ID NO: 473976 - DNA, 1000 bp, Homo Sapiens; identical to SEQ ID NO: 342892

SEQ ID NO: 473977 - DNA, 1000 bp, Homo Sapiens; identical to SEQ ID NO: 342893

SEQ ID NO: 473978 - DNA, 1000 bp, Homo Sapiens; identical to SEQ ID NO: 160416

SEQ ID NO: 473979 - DNA, 1000 bp, Homo Sapiens; identical to SEQ ID NO: 342896

SEQ ID NO: 473980 - DNA, 1000 bp, Homo Sapiens; identical to SEQ ID NO: 342897

SEQ ID NO: 473981 - DNA, 1000 bp, Homo Sapiens; identical to SEQ ID NO: 160418

SEQ ID NO: 473982 - DNA, 1000 bp, Homo Sapiens; identical to SEQ ID NO: 342900

SEQ ID NO: 473983 - DNA, 1000 bp, Homo Sapiens
ttttttttttttttttttttttttttttttttttttttttttttttttttttttttttttttttttttttttttttttttttttttttttttttttttgcattccacaagtatttattgatcttattgcataccaggccctcagatggggacacagccacgaatgaagcatggtccctgctaccacaaggtcctcttcacttacacacacactgaggactactgcttcgtcacgctttccgaagcagctgagtggggctatgtaagtgaccttgcagatgaagtcgccacctgcaagaactcacaggtgagaacagagggtggccaccaaaaggtcactgaactcccccgagaaaactgttgagccacacacatgtccaactttccaggtccaagacatactgcagtactgctttgtaatagccaccaggtgcaaagccaggaagaaccagagggaaacaggtttttctcacatgagggaagagcagcctgcatcacttaatggttggactgagttaatgcaggacttaggcctcttaaaaggcaacaatgagaacccttacttggacccactccccaccacggttgatctctcattatgctgagcatatctcttggaaaggggcaggccgggcgcggtggctcacgcctgcaatcccagttcttatgctcaggccctggttttgctagagacacgtgcccaggccctatgggcacacccacttgaacatatattcaggagccagctcagaaaccaagagactcaggctgcccaaatcttcaggtttccttcctaggcaggcagcagaagagttcagacaggaaatttctctctgtggcataacacaaatggaaagaaaaccactaggggacacacaggaagaaataaggtttctgtttcttcctcaagtgtcccaagtgccatggcagcaatggccttccaggtccatacatggagcaggttttagtaggtcagcccagcccaactgcactgacatgag

SEQ ID NO: 473984 - DNA, 1000 bp, Homo Sapiens; identical to SEQ ID NO: 160420

SEQ ID NO: 473985 - DNA, 802 bp, Homo Sapiens
ttttttttttttttttttgaaaagagaaaatcaatacaatttaatttttttttttttttgagatggagtctcaccatgcctaggctggagtgcaatggtgtgatcttggctcactgcaacctccgcttcctgggttcaagccattctcctgccacaggtagctgggactacaggtgcacgccaccacacccggcatgggctgatcctcatcagtgggattgggaagcaggtaaagaatacagtgccgaggagaaagggcttcctcccccacacatcagacagggcaccaatgagtggggcactcaaaaaagagagcaggccctttacaccttgaatgagaccattcatgaggaatgtgtgttgagaaaatgtttcatgtagaacagtcaacattggagttgtcaaaaggccccacgcaaagaattcaaggaagatgacaatagcagcatggtacacacttggtgggccaaagccttgtagccaggtgctccccgcggcctgcgcgcccgcgcgcttctccggcatggctcccgcctcgggctccgacgccgccttctcctccagctccggcggcggctccacgctcatgccgcggccatgcccgcgccagctcggggcgctccgggacgacggcgacgccgcggaggcggcggcggtgcccgcgccctcatgggctctgcggcccgcggcggcctgcgggtcaggcggcggcgccgagggctgaggaggcggcggaggctgaagctgcggatcaggctagcagaagaccgcagctccaggaaccgaccacttagcaaaccgc

SEQ ID NO: 473986 - DNA, 1000 bp, Homo Sapiens; identical to SEQ ID NO: 160421

SEQ ID NO: 473987 - DNA, 1000 bp, Homo Sapiens; identical to SEQ ID NO: 342903

SEQ ID NO: 473988 - DNA, 1000 bp, Homo Sapiens
tttttttttttttttttttttttttttttttttttttttttttttttttgactggtagtaatttattgttacacacacacacacacacacacacacacacactaggttaacatcaaccaccgcaccatccaggcactccccagccaccacgtgtgggcacaaagacacacacacccctcttggtaggcagatttccctgtctgctcccctcttcctgtgggagaggcatgccttctgggcagtttaaaggtgggaagttacaggggcctaaaaaggtaaaagagcagcagctctgcactggccagctgtaaacagtaaataggccagtcatggagggtcctgaatccagatcctcaggaaggttttcaccaaacaccacagtcccatttgatgtgatgcccagcctctatccttaaggcatttccagcgtccctgaggcgctctgcttagacaactggcacagaagtggtcagggccttggctgtggctctgcctcctgcctcacgggaagccggggagtggagcagagaccagcattagggagccttgtggcagtggtgagaggctgctcaggaaggagctgtgcctctcccctggtcctggccccatgccctcagcatccttaagaaacacggctgtccacctttttccctgcaagaaaactaagtccatcccttatgactgtctcgggccccaaaggtgaagggcagctccggcaaggggagaactccgattgattggagtccctgttggggcagtagcagggttccacccaccgcggtcctaggcctgggggcgaagtccaggcctggccacaaggttcaaagatgtgtcagacccaagccgctaccccctactccgagggcgagggcggagaggctcagccccaggggcggggcctgtagtcggaggccgagcgggcgtggtccgggtagtccaggcggctctcggtggcagtgagcatgcgctccggctccaccacgaacatgtagtagaggtt

SEQ ID NO: 473989 - DNA, 926 bp, Homo Sapiens; identical to SEQ ID NO: 160422

SEQ ID NO: 473990 - DNA, 1000 bp, Homo Sapiens; identical to SEQ ID NO: 160423

SEQ ID NO: 473991 - DNA, 1000 bp, Homo Sapiens; identical to SEQ ID NO: 160424

SEQ ID NO: 473992 - DNA, 1000 bp, Homo Sapiens; identical to SEQ ID NO: 160426

SEQ ID NO: 473993 - DNA, 1000 bp, Homo Sapiens
ttttttttttttttttttttttttttttttatgaaatatctgttttaattcagcagtaaaaggcagcacatgatcagaaatatgtagggttgtgaaagagcttgccaggaaatgagagctgttgcacagggtatcagcaactgtgtacagcttggcaaggttttcagtcctgtcctccagggaggatcttgacttctcagttcccacttcaggaatacatggtcaactgcagccattctttgatagacacttgaatcaggccatctctatctctatccagagacttgaaggcacgaaacatggcatccaggcggaccaagcagctgatgaaattgttaaaatccatatctccatcttcattagcataccggcggacaatcatttggtaaagttgttcatttagctggaagcctgcggcctgcagagctccccgcagctgagaacttcccagagacccagaatggtccctgtcatactgcttataaacacactgccatttcttgatgttgttccacagatacttaaattcttcaaagcccagcttaccagtcgtgtcactgtccatgacagacacaatgctccggcaggtgtcaagactaaaaccgtcagtcttaagatctttgtgcttagaaaggactttgttgagaatattcatcagatcagtggcacccacctccatgtctggtccagccagctgtgtaaattgttgccgaaatcgcctaacttcctcactttctgaggcctccacactggtgaaatgctgctgagtgggaggcggttctggagtatactgagctgctgcagcctcactgataaaattcacaattcctccaactatccctccaatatttcttcctcctccttctcttctctgaccacctcctccaaagaggcctccaagagcttctccaagacctcgatctgctccttccaatagagcctttgcaagaaacatgctttcagtttaacaagcaaatgcggcagcaatcttagagatggt

SEQ ID NO: 473994 - DNA, 1000 bp, Homo Sapiens; identical to SEQ ID NO: 342907

SEQ ID NO: 473995 - DNA, 1000 bp, Homo Sapiens; identical to SEQ ID NO: 342908

SEQ ID NO: 473996 - DNA, 1000 bp, Homo Sapiens
ttttttttttttttttttttttttttttgtgacaaagtctcactgtcacccaggctggagtgcaatggcacgacctcggctcactgcaacctcctgctcccaggttcaagcgattctcctgccccggccccccgagtagccgggattacaggtgcacaccaccaacacccggctaattattttgtattttcagtaaagatggggtttcaccatgttggtcggttggtctcgaactcctgacctcatgatccgcccgcctcggcctcccaaagtgctgggattacaggcctgagtcaccatgcctggctgtttatgcctagttttaaattagctggacagctccagatgcaaccagaggtgcaatggttttgtatcggatcaagtgctgtgagcccttctccaggtcaatcacgtagtccctctgctcatctgtgtctggttctaccagtatgttttcttgtcgttctctcactctcagaaacacgtaagaatctagatctggtttgggaactgcccgaaagaggtccaccttctgtaagttagggggcatgtgcttcaaggcgacatttttcagataggactctgtgttcgccatgaactctctggcaaaggccaactcttccggcgagaggctggaaggctccccctcaggacgtgttttttccttctcaaggacatgagggaaaaacttctctatcttcatgaggcgacaccgcaagtagctgctgaggacgtagcggatcctctccatctccatttggtggatgctgaccttcaggtcctcccttttggctctcctgagattttcttccatgtgctccagctgttccatgacacattctacaatctcaggcttgctctccagcagctcaggggcaaacttttcattcatccaggcctgctccaatctttcaatgagctctgcaggagttaggaccacttcctcactacccccatcagagtcctgtcccaggaaatccacttcttcggtcatcttctc

SEQ ID NO: 473997 - DNA, 1000 bp, Homo Sapiens
gaagatctacacacaaaatatcttttattctgtggaatcaaagctccacacaagtactttataagatccattaatattattttttttttttttgagacagagtcctactccattgcccagggtggagtgcagtggggcaatcttggctcactgcaacctccatctcctgggttcaagcaattatcctgcctcagcctcccgagtagctggaactacaggtgcgcgcccccatgcccggctaattttgtatttttagtagagatggggtttcactgtattagccaggctagtctcgaactgacctcgtgatccacctgcctcggcctcccaaagtgctgggattacaggtgtgagccaccatgcccagccctaatgtagtatttttaaatgatatgattatacaacaactttctttaaaatctaagttcacaaaaatttgtcagtacatcatctgttttatctctattgactataattaccagttgtaagaacaattctaaccatattaatacctgacagaacgttgaggcctgattataactggatattgggtagcatccagttaaagtatcagtagagcttggatgtatcaaagaaaatattttattcaagttcccaaaacaaacttgaggagttatgctgggtttgaattgaagaaaaaaggccaagttaaaataggaaaacaaatggttttcatttggtggcagttgaaatcaaagtatacatgtgtatacattctaatccgtcatctatcccatgtggcattttccaaggttttaagagtctaccaggccaaaccctttgccactttcactgcttttgctttgcttttcccctttcttttctctcgctttgccttcagcctttttctttgcctttggttcatccatattgggtactgtccatgctggtctagaagagtctttttgtttctcttaatatcagtctccattttcatgtcatctttttcatcttttacctcacattgcattttctcttg

SEQ ID NO: 473998 - DNA, 1000 bp, Homo Sapiens
gtcttgtatggagatgaaatttgaggccctgggtgcttctttcagcagatttctccagattacctgcaacagttatttcttcggatgaattctgcataggcatagctggactctggtctgttggagcatggtctgctgaggaagcatgatcagaaagatcttgtaaagaaagatgttctttcttttcagagtttagctggaattcagctgaagccttcaaagccttcacagctttaggttcaatgcgatctgagtcactgggcttgatagggcagactgaagcagagacagagcgagcaagactcataggattaccaacatcaggactctgtcctgaagaacgggcgggatggttaaacccatctgaagttggtaatgatgacattcccagtgaggtagattctttaccacttttctctggtctggggcccactccagctgcagtacacacacactacatgcatcatggcttctgacgctctgcatcctctgctgatttttgaagggcttctgctaattcttggtctgcaatctcctctggccgtacatcctctcttccagccccatatgccaaccgggcacactctggtagctctccctcaggaagaaaggtggtctgggagcctgtggtgccgatcacgagtacatttttcttcaggtcgatggaacactggtgccgtttaagcatgtccagtcccagaagcatgtccatgggctgttcctcaagtatagagaaggaacatggcaaaaaatctccttcaatctgaacctgagctagatgtacccttccaataatcttctgggtgcccactcctttggcaatccctgcccaccgacggtccaccagtctcattatgttacacctttctgcacaagcttggctcatgatagtcatctgggcacctgagtcaacaaaggctttcacaggatgtccattcactttgcagttaatataaagcatcactacttggccaaaactttccggagcctcttccatagc

SEQ ID NO: 473999 - DNA, 1000 bp, Homo Sapiens; identical to SEQ ID NO: 160428

SEQ ID NO: 474000 - DNA, 1000 bp, Homo Sapiens
ttttttttttttttttttttttttttttttttccaagaataaagtcgtttattattttcagagcggcgggagtagggctggggaccctagggccgctccagtgggacttccctgaacccggttgtagaggatgatggcgcctttggccgaggggcagagttcagcccacatctccgtctcgggcaatctccgcacgttctgtgtctccacaaagaagattcctgtagactcgtgggcctcgggtcccccactcaggtagtgcttcctcacctgctcagaagtcaggctgcactggacatagaactcggcactggctcggccagcactggtctcatttcgggcgatgcccaacagcaggggctggctcagggtgagcagcggcaggttcacctcatcacagatctcctgaaggacactggaaaagagttcatgtaccaccagctgcccagcgaggtcctggtgctgggggctgccaccagggcacagggcctgaggctcagggtgcccaccaggtacgtccaccagcccaggggcctcagccacctgccgggagcggcgcaggaagacaaggaagtcatcggctgtggctagtgcagcgcccacccccagtgggtccgccagataggcctgcgtgtcaccccagtcggtggcaccctgctgtcgcagccaggcagctgagctggaccagttggtgcccaggaagtctcggtaggaagtaaggcccaggcgcaggagcagctgtggcccccgagagccaataggcgccagggtggctgagtgcaggcggaacttgggggcgtcgaagagccagggttgggcctttagccgggtctcccagatggcagtgatggcctcgtccccacctggcagtgggcgacggtcatgggcggggctcagctcggcctgtatctgctcctggggcaggcccccgccagggcactgcagcagcaaggtcacctcaggatccatggtctgaacggggcagctcatccagaggtct

SEQ ID NO: 474001 - DNA, 1000 bp, Homo Sapiens
ttttttttttttttttttgacatgtctacttgtgtttattctcatttttgctttttttaaaaaaaaaaaaaaaatgagggatggagagggaaataacccataaacaccgcgaacaggaaccaagactccaagacttgggcatactccctctaccctcagcctcagttctccaagagattcccacccacctgattttcttttaaacaagacacccaaatcagcagcaaaggtacctggggtagtcactgagattttgaacactgggaatgggagggggaaagtccaaaaagtagaagttgggaagaaaagggaaggattgagggagacgctaggctctggaggacagagctgggccgcaggaggtggaagccagtatggggggtacccctcctgactgctgttgcccgtattcccccagaccccagagagccccacggtttgttctgcagtccattccctattccccaaaggcctcagaggcctaactccaagtcctctaactcctcttctagcgccctcctccttgctagcttttctagctgctctttgctgggctggctgacttccccagcctggatccgctgctgcagctcttccacctgccggagtttcttctttaggttctttatcttcttggctttctcagtggtggcagctgagtcaggctggtcagatgcagctgtgggggctgcccgagagccctgtggagcactggggagttgggctgtctcttccagggacaccttatcaagagtcctgctcaaggcctctgcctctcctttctcttgctgctgccgcctcttctcctttcgcttcaggttacgtttggctgtcttggagaggcctggttcaccaccttcaggcctggatggggtgacaggagcagtggcctcagggcttagccctgggggcaactctggtttactcttgaaaaacttcacatacttgttttcatatactgggacctcctcctggggcacatatccttctttcaccctcc

SEQ ID NO: 474002 - DNA, 1000 bp, Homo Sapiens; identical to SEQ ID NO: 342912

SEQ ID NO: 474003 - DNA, 1000 bp, Homo Sapiens
ttttttttttttttttttttttttttttgcagctgcggagcgactttattgtcttctccttcgacagcttcgttgtacatagctgggcccccgaggccctgactgtccctgggaaccaagccacgtggggtgaagctactttgaaacctcacccacagttcacacgtggtgaaagagaaaatctagcaaagtaaatccaacaacaacccaaattaacagtattattaacttcctaccccaagctggctctcccccaggccctgaactggctcaggaaggaggcaggaatgagctgaccgagacaaggcatcctccacccacacatcccatcttctgagtggtcccagagctgtgcgccacccctgtgggacaatcaggcactcctgggtctctaccagctgtgatgagacgtacaagaggagggtctgagcccagaataaacaagagcatcctgaggctggagaggcaggcccagtgtgcccggaccaccctgctctgcctgagaggatgggctgggttccagctggcccggccgccacctagtgactgcttgggacagtggagatgatgacaggatgcccactcgccctaggcagtcagaagcggggtacacacaaacactctagaagccacacttagcaggaattcccagtcttccggcccaggggagggtgccaccagctcaggcagccctcaagaggaggccgggagcaacttctccagggccttcttctgcttctcggtggctgcagccagggcctcaaccagcttctcctcgggcatcatgttgagcaccttgagggcaaagaggagctggcacttagccgtgctcacgaaggcgttgctcaggaagttggggaagcctccgactcggtccttctgggtgtacagcgggacccgcacgaggcccagcacctccaggccgtggtcgcgcgagtgcaccgcgctgatctccacggcgtgcagctgctccagcgtcagctgccgcgcgtacaggtgc

SEQ ID NO: 474004 - DNA, 1000 bp, Homo Sapiens; identical to SEQ ID NO: 342914

SEQ ID NO: 474005 - DNA, 1000 bp, Homo Sapiens; identical to SEQ ID NO: 160430

SEQ ID NO: 474006 - DNA, 1000 bp, Homo Sapiens; identical to SEQ ID NO: 342916

SEQ ID NO: 474007 - DNA, 1000 bp, Homo Sapiens; identical to SEQ ID NO: 160431

SEQ ID NO: 474008 - DNA, 1000 bp, Homo Sapiens; identical to SEQ ID NO: 342917

SEQ ID NO: 474009 - DNA, 1000 bp, Homo Sapiens; identical to SEQ ID NO: 160432

SEQ ID NO: 474010 - DNA, 1000 bp, Homo Sapiens; identical to SEQ ID NO: 342919

SEQ ID NO: 474011 - DNA, 1000 bp, Homo Sapiens
gggtagtggttaccatagcttttactgtagttattcattaagctattcaactgttctgtgcagtttgatgttttattttacaataaaaagtcaaaaaaaataagcaaaaagataaactggaaaataagacttacatctcatatatatggacaaaggaccaattacctccaaacataaacagctcctagaaattactgcaaagatcaacaacccagtagaaaaatgaatgaagttcccagaacagaaaacacaagtggcccttcaaaaaaatgaagagaggcccagcctcttatggtaagacaaagagacaggattttaaaaacctaggcctcttcctagagttcccttaaatatctaggccagatcatttttacttcctggcttagaccctgccaagggctgcccagctactcaggtgtttgtgtccttgtggactcaagtcatattgtcctgatcttttggctgagtacggttttctcctccagcaaagacaatttggaggatgtactaagcatgaagcgctacttcctggcccccatctctcttcgcacagtgttccatcatccagccatgaaagcacagctgagtgatccaagaggcagttccaattgttgactaacgtgcacctgcctatgtgagtgtgtcctatgggaactcaggccttagaatggtttcaaagtagtggctttcaaaattactgtttgcctcttcaaacttcacacctaaggaaaatggaaacatgcagagcagggacacagaaggggcattagctggcgtggggtaggggcaagagctaattgtgaaggaagaaggcctgagatcacgtagccatgtcggagaacagctgtgctcgctgccctgcctctttgcgcgcatgtcaggcagccccaggctccagctgcttgagtttctcttggagtccccggagctggcttcgaccccagtcaatgcggttctggaggctggctatgtctgcggccagctgcaggccatcccggaa

SEQ ID NO: 474012 - DNA, 1000 bp, Homo Sapiens; identical to SEQ ID NO: 342920

SEQ ID NO: 474013 - DNA, 1000 bp, Homo Sapiens; identical to SEQ ID NO: 342922

SEQ ID NO: 474014 - DNA, 1000 bp, Homo Sapiens; identical to SEQ ID NO: 342924

SEQ ID NO: 474015 - DNA, 1000 bp, Homo Sapiens; identical to SEQ ID NO: 160433

SEQ ID NO: 474016 - DNA, 1000 bp, Homo Sapiens; identical to SEQ ID NO: 160434

SEQ ID NO: 474017 - DNA, 1000 bp, Homo Sapiens; identical to SEQ ID NO: 342927

SEQ ID NO: 474018 - DNA, 1000 bp, Homo Sapiens
aacattgtatgagtctatttatacaacatacttacagagtaatctaaatcacagagacagaaagaatggtggttgccaggggctggggagagagagaaatggcgagttattttttaatgggtgtagagtttcagttttgcaagatgaaagagttttgcagccggatggtgatgatggttgcacaagaatatgaatctacttaatacaactgatctgtacacttaaaaatggttaagatggtacatcttacatgtattttaccagttactaaaattgaagaaaagtattaaaacattgataatatatgttgaagaaaaatatctgctatcagtgacataggtagactccaggatatgtgtaaaaaatactcggagaggcctgactgtgaagtgaagcaaaagttaagacatgaacacacgagatggatgtgtgttgggaggaaagcttagtgttgggagaaaagttgaggcagggcttggaacatgtccggggtccaggataaaaccccttgtggcctttgtaatgtgtccagacttgctggctccttgcttctagcactcccattatctcaagtagccatatgtttcaaagaaaatgctaaaccctcacagctgtagttcattcgcttgatacaccactttctttcaactcccacatcctcatcacctgtttctttgtttgatcaccaacaaatagtgtgggcttccagagcttggggacttcacagcctccatactagcattggccccctggtcccactttctctcttgacttgtcttttctctttcctttgactcggctggactttgtagcccccatggccgggtgttgggtctgatcaccccaacagatgtgttttcattgtgtagtctccaaaacgttgataaaacaagaggaaaaagtcacagccacttggttacttattttaaatccttattctgagtttattttatcctataactagttcaaatgttcacatgattaagggtttttcagaaaa

SEQ ID NO: 474019 - DNA, 1000 bp, Homo Sapiens; identical to SEQ ID NO: 342929

SEQ ID NO: 474020 - DNA, 1000 bp, Homo Sapiens; identical to SEQ ID NO: 342930

SEQ ID NO: 474021 - DNA, 1000 bp, Homo Sapiens; identical to SEQ ID NO: 160435

SEQ ID NO: 474022 - DNA, 1000 bp, Homo Sapiens
tttttttttttttttttttttttttgtctatataaaatgtttatttttggaggactgtgtggtctggtgtttgggagggaactccacccccaccaggccaaccatggagctagaaacagagacagcaggaagggcaaagctggccactgcctgctccaccccttcacagcccagagcagaacagggtctgctctactctcaaggtgagtgacagagagccggtactgtttctgcccctggcataccctgagaacccatgtgacttctgtagtgctcagcccctgtgcccttcctgggcctgatccacatgtgtcaacacacacactccctctcacagtctccaaacagcactgcagagcctagctgcatctgccaggttcaaagaggaatttttcacatttgctcacttccaatctccatcttccttcctctgtctcccactctcccactctcagtagccgcatcccagccctgccatactcccttctcagggacaggagactcagtgggcagctggcctcagctctcctaacaggaaaaaaacctgtacagcattagtgccagggctcctgccctcccaagcgctgagcccagaaatttggacaaatgagctgcctcttaactgcaaaaaacaattttaaaaaagcaaaagatcaaacaaacagaccaaaaagcataaataaacagcagctgggccagcaaggaggaaggcagggtgaccctcagtggctccctgtgcccatctcagcctcttgccataaaactcagccatcagtggccaggatgacagcagttccgaagatgcccacactctctccaaggagcttcatctggttccagaactcaacacgccgcgtgttgtgccagtaagcaacattgccatcaatgagcagcatgacagggggcagcagtacagccaggatctgggcagcgagggtcacgtagtagcctgacagaaaggccagggccaggatgccatacagcacgaagaacagctgga

SEQ ID NO: 474023 - DNA, 1000 bp, Homo Sapiens; identical to SEQ ID NO: 160437

SEQ ID NO: 474024 - DNA, 1000 bp, Homo Sapiens; identical to SEQ ID NO: 342933

SEQ ID NO: 474025 - DNA, 1000 bp, Homo Sapiens; identical to SEQ ID NO: 342934

SEQ ID NO: 474026 - DNA, 1000 bp, Homo Sapiens; identical to SEQ ID NO: 160438

SEQ ID NO: 474027 - DNA, 1000 bp, Homo Sapiens
ttttttttttttttttgttaatgaaggggaaaatttattattttttttttccaatgactcccaagtcctactcgcaaacaaatacattgtagaaaaaagtttaattgctggttattgtttgaatcttgaaatacaattcttcactgatgatactggtataaaatggtggttattaattcatgctagcacaaccaaaactaatttaacattattggtaaaaatgagtcatttttgaatctctattaaaatctgaacacataaacaaatctgtgctaaaactggaactgccttctcactctacatataattaaacttccagcttcaaccatctgatgttgaaatctaaagcacctccatgagttaaatgtccccgacaaaccatgtagatggacaaacaagattggtggtctttaattgctggcgacagaaaaggctgcagtttagtacttaaacctgcagttagtggtcaactttctatccaggcagagtaaactaaggagagctatgaaatatcaaaagaaaactagaggccaggacaaagaggcaatgtcagccaagccactgcaagatggtatgcacccctgtatttcagccaagggcaggcaatccaaaattacacactgctttccttaacttgaccaaacagtgtatttttcctctgaaaatcttgtcaaaggttgtattccattgtacctagtgaaatacaaagtccactctcataaaaatattatatttttcaaaagaaatataatacattgaaaatcactgattgctgcttcttcgtctttttttccgtgaatgtgtaggtgtttgagtctcttgtatttcttcttttacacaggatatgggctgtttgaaaactatttcatcatctttatcatcatcattcagttcagccacttgagattttcgcctctccaaaaatgttggtgtacaaactggtgtggggccctggctatccacagtcttctcaggagtgtcaagagtacctgaaactttt

SEQ ID NO: 474028 - DNA, 1000 bp, Homo Sapiens; identical to SEQ ID NO: 342937

SEQ ID NO: 474029 - DNA, 1000 bp, Homo Sapiens
caatatggaaagttagaaggcatttcatttataaatgaatgatatttcacacttatatagcaccttatatatacaaagtgctttacaatgattattcaacagcccattcatcaatgtaaataaatgtggtttacaatctgttaacaaatgtaagcactttgaggcaaccaaatatccaagaaaatctatttagtaacaaattcctggactagcagatagatgtgagaaaaaacgtaaagagatctgccataatataacatacaagaagttactaatgttagtgactgatattaagatatcaagtgttaggaattgttaaaaaatggaagggtttatattaaagaacaagtaaaacaaatggggcataagtcaacaaacagcccaaaaataagactaccaataacttgtacatatatgaaagataactcttttagatgtggaaagcaactgaaggtatgtcaaccacattgttagaaaatgatcctcagttactaagatattccaaaagaacaagaaattaatgcagtgtctaattttttttcttttgtaatttatcccaaaataacctcaccaaacattcacttctgccagcaaacaagatagcaggaaataatgaaattttatgtatttatgttttaaaaatagtctccaaatctttggacaaatttaatttcctataaaacaatgtgaaaactcattttttcctcaaataattcttccaggtgccttagggaagatgtgattagcacctctgccaatgtattcaagtctttgcaaaaagaacacttgtcaaccattttgtatagtaaatatgcaagttatttgaactgtacttggaaaacaattgaaaacacagattaatacatcataaaaagattaattccctttaaacaaagacattcttagcatggtaacacacaggcacaataaagaatataaattgtatatcaattattggcagaaaatctaattcattacaaagcctatacctttgaagaag

SEQ ID NO: 474030 - DNA, 1000 bp, Homo Sapiens; identical to SEQ ID NO: 160442

SEQ ID NO: 474031 - DNA, 1000 bp, Homo Sapiens; identical to SEQ ID NO: 342940

SEQ ID NO: 474032 - DNA, 1000 bp, Homo Sapiens
ttttttttttttttttgtatttttaagaaaaattaaataaaagcccagctctgctgataggcaaatgttacccccgtccccacccccacccacccgttgtttccctggcctgcacccccatcccaccatggccccaggggtatttacaacatggaacaatagaggcctgggttggggggcactgcggcagggaggagggggcacagggcaggtccccccccagaggggtcccccaagacaacacgacatcaacaagaaaagttgcaaatcaggcagaaatggggacgtcattccaaggtccttatatacagacactgcatgaccagcagggaatgggggcccagatgggactaggcgtgggcatgtggcaggcaggtgggccagtccaggagcagcacgggaaaacaaggcctccgctccactcccacccccgtccctaccccacctttggtaacaaaagcccttcagggagccactggtggtcaagagtttcctctgggagctcccagggaaaggggctccccagttcagccctgcttcagggctaaaattgggcatgctatccccgccctggtcggccatgagggaaacaatgagttagaagtacgctgcccacccttgactccaccatctgcccaaatcgagggggtgctccctggaagtcaagggaaggagcccagtcattgcagaggagccctcttgggcatcagatgggggaagccccataaaggggaaggggcccctgggggctgggagatggaaatgaggggagaggacctggaccctgcatgggagaagggccagcgtggtcatgaggtcagtgatacccccacttggggccctggccaggaagtccacgctgaaggggtggagagtgaggccctggaatgggccatttgggagctggccggcggctgggggaggggggccggccggccagtagggggctcacaggtagatctcgcgcttggccgtctgggcagatgccggtgtggctgcg

SEQ ID NO: 474033 - DNA, 1000 bp, Homo Sapiens; identical to SEQ ID NO: 342941

SEQ ID NO: 474034 - DNA, 1000 bp, Homo Sapiens; identical to SEQ ID NO: 342942

SEQ ID NO: 474035 - DNA, 1000 bp, Homo Sapiens; identical to SEQ ID NO: 342943

SEQ ID NO: 474036 - DNA, 1000 bp, Homo Sapiens
tttttttttttttttgaaagctgatcactcatttattcatcaagtgttcctgagtctctgctccgtgccattcccagcacctgggcggcctctgcagagtgaagagatacaggcttggccctgagactcccagagcagctgggagagagtcagtcgtgtagcccagggattaccaagtctgagtgatgagagctgaggaagggctggacagaggcctggagggcaacgtgggttggggaaggtgcttgaagagggtgaggtgaaggcacacagccaaggggttagggcagggctctggagccagtggcctgggccccaccctggccctgggccccaggcccatgacttcgtgtctttgtgctcatttccaccactgtaaaatgaacggctgagacgtcaatgagctgcacacggaaggagctgggacatagccgggcatggcgcttctggccttacagctggatgcgtcaattattttgtagacaactccgcgtggagctgtggcactcggctcccctgtcgacatgaagtacagctccccggcctcgtcctccccgaaggagatgatgtacgggtagtagttgttgatgaggcctgggaactcacaggtctggccgtggcccatgcagatctcactgtactgccactggcctgtccctgggttctcttggagggacatcagacgcccgctcatgaaatccccaaaaatgtagaggccgttcaggttggggtactcgcagccccggtacacgtagccccctgtgaccgacttgccaaccgtgtgcgggtaggcgaaaatcggcagcaagtcattgagagaggtgttggcgcacaggctgcggtcgtagcactcgaacccttcgcgcgcgcgccagccatagttgccgccgcgctccaccacgtccacctcctcgaacttgttctggcccacgtcgccgcagaagaggcgcccgcggccagtgcccgaggaggggtcgccacggtcgaaggagcagcgcca

SEQ ID NO: 474037 - DNA, 1000 bp, Homo Sapiens; identical to SEQ ID NO: 342944

SEQ ID NO: 474038 - DNA, 1000 bp, Homo Sapiens
tttttttttttttttttttttttttgtacttccgcaagttataatgcatcgtcttttattttccaggcttcctgggatcagatatgacattgcactaatgagaaatgggggtttccagttgctcaggctcagattgcgcaatggcaggaagcatattaggtgctaaaaactccccctccctagccgagctgggcgggtgagaagccgagtgcgaaacgggacttggcgtgtcatgggcgctaaggaaacggagtaaggccgactcacaggcaggaacatcgggacacacacaaagaggcaacacccactgcggacggggaaacagactttggtgtttcatccacctctcagcgcgcttatcagcatcctgtgacggccggtgctgcaccctaacacacacctaatgacagacaccaacgccttcgcttggggagcccggccagcctcctgctccgggatgccctgctggcttcaaagatgagaagagccacatctccatcctatctccatcctatctccatccttctctccccaacagcgtgtggttgtctgtttcagggagcacatcgctcctggggcatgtggggtttatgtttcaggctgagacaccgccagccacagcacaaggacggtgcatcaagagctacgtcgggtattaggcagggtacgtggaaacccttgattccagggctttggccatcagaggaggatgttttctccccaagacttggaaaaataacagcaaggaaaacagtggtggctatacctcacatgtatttacaaagcgttctttagaggggtctgtctttaaggttacctgtgtgacgagaaaaagaaaaaagaaaaagaaaagaaactagacagggagctctgtgtatgaggaccacaccaagaacagactgaaaccacacagatccgagcggtggagaataaggctggaggccgctcccctgcggagggaccgtaaaattaaactctatatatgtcatctcgcgtttaa

SEQ ID NO: 474039 - DNA, 1000 bp, Homo Sapiens; identical to SEQ ID NO: 160444

SEQ ID NO: 474040 - DNA, 1000 bp, Homo Sapiens; identical to SEQ ID NO: 160445

SEQ ID NO: 474041 - DNA, 1000 bp, Homo Sapiens; identical to SEQ ID NO: 342948

SEQ ID NO: 474042 - DNA, 1000 bp, Homo Sapiens; identical to SEQ ID NO: 342949

SEQ ID NO: 474043 - DNA, 1000 bp, Homo Sapiens; identical to SEQ ID NO: 342950

SEQ ID NO: 474044 - DNA, 1000 bp, Homo Sapiens; identical to SEQ ID NO: 160446

SEQ ID NO: 474045 - DNA, 1000 bp, Homo Sapiens; identical to SEQ ID NO: 342951

SEQ ID NO: 474046 - DNA, 1000 bp, Homo Sapiens; identical to SEQ ID NO: 160447

SEQ ID NO: 474047 - DNA, 1000 bp, Homo Sapiens; identical to SEQ ID NO: 246565

SEQ ID NO: 474048 - DNA, 1000 bp, Homo Sapiens; identical to SEQ ID NO: 342954

SEQ ID NO: 474049 - DNA, 1000 bp, Homo Sapiens; identical to SEQ ID NO: 342955

SEQ ID NO: 474050 - DNA, 1000 bp, Homo Sapiens; identical to SEQ ID NO: 342956

SEQ ID NO: 474051 - DNA, 1000 bp, Homo Sapiens; identical to SEQ ID NO: 342957

SEQ ID NO: 474052 - DNA, 1000 bp, Homo Sapiens; identical to SEQ ID NO: 342958

SEQ ID NO: 474053 - DNA, 1000 bp, Homo Sapiens; identical to SEQ ID NO: 342959

SEQ ID NO: 474054 - DNA, 1000 bp, Homo Sapiens; identical to SEQ ID NO: 342960

SEQ ID NO: 474055 - DNA, 1000 bp, Homo Sapiens; identical to SEQ ID NO: 342961

SEQ ID NO: 474056 - DNA, 1000 bp, Homo Sapiens; identical to SEQ ID NO: 160448

SEQ ID NO: 474057 - DNA, 1000 bp, Homo Sapiens
ttctggattttattgcactcaacatttaatagaagacatttacattatttttagaaaatccaccgatgttgcacaatggcacatatttgtaaacacaaggctcattaattcagatatttggaattcaaaaatatttaaagttaaccacagcataatgaatcctcaacgtccagagttctacaaaaatccagcaaaacttacttttgctcattcatcagttctatgtcactccttagtttccctaaaaaaatatggctttataaaaagtagcttctataattcacaaaatgaagagttttattataatttgagtatcgtctctgtatcaccgacagcacagctttagaaaattattgcttttcttattatcttattatttcaggtttcattacacatcgagtacccatgcaggactcactacattgtataataactatgatctatagtgataaaaatatagaagtatctttgattttaatcctaaaagcagggggaaaaagtcaccttatcttaatgttaacaaaatcaagagctacccctaatatatcgatcaaaccacttcttatggctttgcttatagttgctcatggtcctttcaaaatgatgtggtagctaccttcttttctgacaaaggattattttcaacagagcaattatttctgagcccaaaataaaccacattaaataagaagaaaatcttcagtgtagaaagaaaaaggctcattgccgtgaaatagcagcaggcatcgggctctgtgagcttttcacacatcctcaatcaacccagctcaaggcgttactgagttcatctagtaagagcactgagcggtctctagtgctggaggggaattactcaattagccaaaggcagaataatctttaagttatgcaccagtaatttatacaggttttctaaaatttaaacaaatgctgaagagactatagctattatatgattaatctgaggtgccaacaaagcatttttgcatgataatagtag

SEQ ID NO: 474058 - DNA, 1000 bp, Homo Sapiens
ttttttttttttttttttagagaattcttctgtattttattgcactcaacatttaatagaagacatttacattatttttagaaaatccaccgatgttgcacaatggcacatatttgtaaagacaaggctcattaattcagatatttggaattcaaaaatatttaaagttaaccacagcataatgaatcctcaacgtccagagttctacaaaaatccagcaaaacttacttttactcattcatcagttctatgtcactccttagtttccctaaaaaaatatggctttataaaaagtagcttctataattcacaaaatgaagagttttattataatttgagtatcatctctgtatcaccgacagcacagctttagaaaattattgcttttcttattatcttattatttcaggtttcattacacatcgagtacccatgcaggactcactacattgtataataactatgatctatagtgataaaaatatagaagtatctttgattttaatcctaaaagcagggggaaaaagtcaccttatcttaatgttaacaaaatcaagagctacccctaatatatcgatcaaaccacttcttatggctttgcttatagttgctcatggtcctttcaaaatgatgtggtagctaccttcttttctgacaaaggattattttcaacagagcaattatttctgagcccaaaataaaccacattaaataagaagaaaatcttcagtgtagaaagaaaaaggctcattgccgtgaaatagcagcaggcatcgggctctgtgagcttttcacacatcctcaatcaacccagctcaaggcgttactgagttcatctagtaagagcactgagcggtctctagtgctggaggggaattactcaattagccaaaggcagaataatctttaagttatgcaccagtaatttatacaggttttctaaaatttaaacaaatgctgaagagactatagctattatatgattaatctgaggtgccaa

SEQ ID NO: 474059 - DNA, 1000 bp, Homo Sapiens; identical to SEQ ID NO: 342965

SEQ ID NO: 474060 - DNA, 1000 bp, Homo Sapiens; identical to SEQ ID NO: 342966

SEQ ID NO: 474061 - DNA, 604 bp, Homo Sapiens
tattcggaaggtctattttaataggaaaatgttttttagttggaacgttttggaaataagataacgcaatgtcttctatagttactcatttacactgaaacgtgatgggtaacttttagggcgtttgcttccagtcactttcccctgactccttgatgtgataattccttccataagatacaaccattctcccaagtgatgcgatgacgagtatgtgcgtgactctggagggaaagggtctacatctgtctctgcttgtgcctcggatgggttttacagtagacgtaccaccgaccccgcctcttcaccaggtaacagtccttgcagcgcttcttaaggacagtcttgtttttgaaccccagcgcaggcagcagatggggcaggaggccgggtgagagaagtgagcgcactgctgccccgggttccacagccacgggggctgcacctcgaatggatccaaatagaaatgtggagagggctcgaggcttcaccgtgtgacgactgagatagagcagagggttcaccattttccttataaaaagatttgccatgttgtggtgaatccggccgcacgctctcacccggcgccgacccctgcgtctgc

SEQ ID NO: 474062 - DNA, 849 bp, Homo Sapiens
tttttttttctaaataaaatctttttattctcaattttatcatagttacagtattatcattgtcaggttgctttctgaacaccaaatcaaaacacatcttaagtaagtataataagctttgttcagagtgtactaaattagaatttttctaactcagaagagtaacaaaggtccacttattgctattcatctgcccattttcaccatttaaagggtccttgccagtgatgcttgtagtcacatgtgcgggacagtgcaatcacagctgcaaaaagtagaggtgacagaaaggcacagaacctccaagatttcccacggccttgtggtgtgaagcagtgtaacttccctgccaggtagaaggacgcaaaggccagaccagcaaatgcaaaggaagaatgtccactggggaagctctttcggccctcattcaccacgtccttatcccctgtacacatcaagtcagaatgggctagcccatcagggaagcagcggtagaagaaatctgggcgtggcctccctacgatcagttttattgtgttggtaaagacgccattcagagccagggcaaggctggcagccaggcaggcttgtctgctgtctcttgtgtctgccttcttgagaaatttggccaggaagatcagagacagtggagagagaaatgcaataacaaacatcggcttggtggggaaatactccgcctccacgtaggggttccggtagagccacatctcctccggctggatgagtctctggaacggggggagcagctccgtcaccaggaaggccgcgaacagcgcgagccgcacgcccacttcggccccaaaggccaccgccgccgccgccttcccc

SEQ ID NO: 474063 - DNA, 1000 bp, Homo Sapiens; identical to SEQ ID NO: 160451

SEQ ID NO: 474064 - DNA, 1000 bp, Homo Sapiens; identical to SEQ ID NO: 342969

SEQ ID NO: 474065 - DNA, 538 bp, Homo Sapiens; identical to SEQ ID NO: 342970

SEQ ID NO: 474066 - DNA, 1000 bp, Homo Sapiens
tttttttttttttttcatattttaggaatatatatttttaaaaggattcaataatctttttaaagcaaaatcaaagtatggctacaggaggagaggaaatatccaaattgtaatcaatgcagattgtttacttaaggccttatatttgtacctgtataaataccatatcacagcacaaaaacataccccatctggctctcttaaggtacatgataaatcagactaatgcacattcatcaaagtggcatcatctcaggatatgtgcatatttgacgtgggtatgaattcagggtttccttgggtctctttcaaggactctcctttctcgttggtatttctatttccttattttccttctgtttatgaagaactgttatttttatatttaatgcccaattttcactacttgttcatgtcagttctctgaaatgttactgcctatgaaccgtgacatgtactctttataacagaaccagaagttaaaagatgtagacatcacacaaatcaatgattattttaaaaatagaaaacaatgataaaaattcagttgccaacttagaggattttatacattatgaagtgttctattttccttccagggtctgaaatttatttctcaagaaaacagattttatttctaagcctttactatctttgctagaaacagaaaaaccagttttctctttgacaaaattgtcccaggagaacaacacaaatgctttttccaaattagagcataagtcttccttaaatgtcctagtgtgacaataaggatacaacagccatcttttaaatgtcatgaaggctattgttaagacggtgtttttggccgttttgcagatggtccatcgaagttagttctgttatcaatgttattttcatcttctgcatcatcttcatcatcaccgtccaagtcctcgtctggagccgccgccacccggtgctgcacttccccctgtaccagagggtcgaataattccgttaccatgtccttcatctg

SEQ ID NO: 474067 - DNA, 1000 bp, Homo Sapiens
tttttttttttttttcaatgaatggaatttaatgtaactatgacataaacacacacagggtggggaggacgggtgaccaagcgcagacgtgggtgacacgtggccccgctctctggaccctcagtgggaaaaagtctgaggctggcgtctctcaccaaaccccacctcccctggtgggtcaatactgatctggctgagtgacagcatctcgtgacccaggctggccctgggaaggcgccacaggcgaggcctgcgagtccagggagcaggcagacgctacagtggcccccgagcgcgccaggtgccagcctcgacgtgtaaatggcccgctgcgggcgctgctgggaaggaagacaagaagggtgagggctcgtcctcaccaagtgcttcctgagtgccgtaggacgtgggtgggacatggggacagtgagggtaacacaaacagcaacgaatgcacaaagacaagttccaggaacacccataaacccataacgttcaacaaaatggcaacaaaacgacgcccctgctggcctggcgaggctggcgcttccttcgtggcagatgccacctgcagctggctggctggcaagcgttggccaagctttttggtacctgggagctcaacagcataaaaggctgtaacctctacacggaaaaatttcacatccttcccctgaaactgacttcaggggcaaagaaacgagacttcttgaagaccagcctcttctgggaaaggggcttctgagacgagtgtcgacggcagagcagatggcctggggaaggcaggggtccctgggcagaggctgggagggtggccagagaccagggagggcccctccatctggtgggtttggcaggtgtgtcccctggtgctgccaccaggagccccgaggccggggtgttggctgcgacagcccctcactgggtccggagctggtaatctccattctgcgtgatataacgcacccagggcagggcctggtacccactcttctcaatg

SEQ ID NO: 474068 - DNA, 1000 bp, Homo Sapiens; identical to SEQ ID NO: 160453

SEQ ID NO: 474069 - DNA, 1000 bp, Homo Sapiens; identical to SEQ ID NO: 342973

SEQ ID NO: 474070 - DNA, 1000 bp, Homo Sapiens; identical to SEQ ID NO: 342974

SEQ ID NO: 474071 - DNA, 1000 bp, Homo Sapiens; identical to SEQ ID NO: 342975

SEQ ID NO: 474072 - DNA, 1000 bp, Homo Sapiens; identical to SEQ ID NO: 342976

SEQ ID NO: 474073 - DNA, 1000 bp, Homo Sapiens; identical to SEQ ID NO: 342977

SEQ ID NO: 474074 - DNA, 1000 bp, Homo Sapiens
ttttttttttttttttgtccatagacaagaaatatatattagtagattaatagaatacattactactgagtagctaaaataaacttaagctacctgaatcaaaatatataattctcaaacagagtctaaaaaattgcatgaggatatgtatagtatgaggtcactatataaagtaaacatagcatattatgctgtagctacataaaatatgtagtaaaagtataacaacatgcatgggcataataagcatcaaattcagagaaatgttcacttctgggaaaagaagaggatgcaggatcctcggtgatagggtatttggaatgttttatgtcttatttcaaaacatcaaatgctactatgtaaaaatgctgggtggtgggtacctggatatttgttgtattatcctctgtacttttctgtctacttgaaatactgaataataattaaaaagaaaatacaagcaagcaaaaagaaaaaaaaatatctataaggcttcctctcctgctccaactctgaaatcaccttaattaatatatcgatgtaaatctgtccaatgttcttccatatctttgtgtctctgcctcacgatatgtcaagcagtattccaagtcctttcatgtattaattcgtttaacacagcaacactgtcatcaagagcacactgctcaaaccactttttctgttgctcttagacacagtgccgtctctgggtctcagtttgtctgtttcttttgcttcctttgacttgactcggtccagatcccccaatctcatttttattaggtgccctgtaatttcagtcattcgccgttgatcgtcttctctttgtgcatcctggttgaatctcaaggatcttgtggcatcccacttattcttctgcatactcataacgaaaggagacacatctctagaagctgacttctccaatgccttttctttcctctgggcacagggtgaagatacctgcttttttggttgtctagtgaacttctttggcttc

SEQ ID NO: 474075 - DNA, 1000 bp, Homo Sapiens; identical to SEQ ID NO: 342978

SEQ ID NO: 474076 - DNA, 1000 bp, Homo Sapiens; identical to SEQ ID NO: 160454

SEQ ID NO: 474077 - DNA, 1000 bp, Homo Sapiens
ttttttttttttttttttcgtttaatatctgtggattttatttgacttatgtctcaacatacaatatacacacataaagtacaagcagccaccgtaaaacatttttctgatgatatctctcattacttcaaatcctggtggaggaaggaggttcaagaatccatctcacaattaagacctcagggttgaagaggatcatcataaaaactatcagctgacaaccagctcttacacctgctctaccacacaatattattaatagttttctaatgaaaacaaaaatggatttcaggaaccatgctgacattattttttgcctgtttgttttcaatggagtcatctgaatggttctgtgttttgtttgtacaaaaaaagaaataaggctgctatagtccagttagcatgtgaaaactctgccaagcacgaagatctcctcccagctcggatggattgctacctgggaaaatggaccgacccagggagtggcaggtcccaaggaagagggtcagtgaggctggacgtcacttgcactgttcgtggtctgtatagtcatccatgtccacatccgaatcaaagagtgagtgtccagtaaaatctgtgtctggggttctggaaaaactgttttctgctccctcatcttcaaaggtctctgtccttgagtaaaagctaaaatccagcagcggggtgtgggttttgctgccttcgctgctctcctcagactcatagatggtattgtcatcatcgtggtgccactctggccaaaatttcctccttatcctctcacagtacatggcaaggttgatcagctcacctttgatcagccgttcgggtcttgtccctggtaaggtccacattgcctgtgccaagtgtccaaagacagtggcgtcaagagtggaaagcttgggccccatgatgtacttcttatcacccaaaagccctgctaaagaccgcatgtccttctccatcagcatgtaaatctcttcctcggagaagcggccaa

SEQ ID NO: 474078 - DNA, 1000 bp, Homo Sapiens; identical to SEQ ID NO: 342981

SEQ ID NO: 474079 - DNA, 1000 bp, Homo Sapiens
ttttttttttttttttttctgtctaaaatgacaacgatcgtttggagaagtttattaccacccctaccctccagtgggatctcaatgtcacgatgagtccggggctggctttccgccgggaccctcctgtcctggcacatggcccaccccagcacgaagcctggccgggagggctcaggtgggtggctgctaggccaggcctccccagaacgactgccccatgtccagcctgtatctcctgagtgccatgctgcactggggagggacagggctggctcggggctccaggaaagatgcctcacatgtgcctagaaatgtaggcgtcaagggaaggctgtgtgtgggggcacctgaggggctgggcttcccaggcatctgagttcttacggagccctaataggcacatccccaaatggttgtatgaggatgagcacaaaaatagcagatggggtcaccctcaccctccactgacaatggactgggatccgactcatgcaacattccttctcggccgtaggttccacatccatgggttaggtgtgctggcctggagcccgccggccccggtccccaccgcacaaggaccccatcacaagtgggtgtcatactcttcctccagaaacggattaagcaaccagcatgtgaaccttacgctctgtttacaggctgagtccccacagctcttccagcttcagccaggccagggtcaccttcagattgaatgtgcagggcccctgaggactcatgtcctgagatggcccttcttcctgggatgggacccccgggttcaggtgagaggtgttcccgggccccttcacctggggctcaggtgacaggaggtgttccgggccccttcacctggggctcaggtgagaggaggtgttccgggccccttcacctggggctcaggtgagagcaagtgttccgggccccttcaccgggggctcaggtgagagcaggtgttccgggccccttcacctggggctcaggtgagagcaag

SEQ ID NO: 474080 - DNA, 822 bp, Homo Sapiens
tttttttttttgaagacatttaaatggaaatatttattttcttaaaagtatagcttaattttccctctccaagtttgagaaggaatattgggaggaaacgggacaagatgacacaggcatttggacattcactgcaaatcctagggcgttgctgcaaagcatcctgggtccagttccagtttaggaaacctcacagccttttttccactcggacaggtctctgccctcacaatgtttcttccagccttgccaatagttcattccttgtgtctctttaacaattttcctggcacagataattgcatctgtgaggtcatcagtgatcaaggctgagcaggcgacatggcagtggttgttctccttcagctttccgcgtctgcaccacgcgaagctgttgatctggaagatgccatagtcgatgctgccgtcatccaggaccgtctgggctgtggtgttgtagccgctctcataatatgccatgcagatccagtttccaaggctgaagccccagtaattgtccaggccagccctcgagaatatttttgccagtttgcaacgagtgtagattttggactcggcgcctgtgaccaggcagccaatgagggtcagaatgcccgcagccttcatcctcaaagcctgccggagacagaactgaaaaggcagattcctggtgcctgccccagaggctgacttctcagttgagtctgcggaagaaacactgctccacttagtcggtgacaggcagctcaggggagcgtcctgcatcccctgaagccatgtctgattctaacgaggcgcgagtaatcctttcctagctcaaga

SEQ ID NO: 474081 - DNA, 1000 bp, Homo Sapiens; identical to SEQ ID NO: 342984

SEQ ID NO: 474082 - DNA, 1000 bp, Homo Sapiens
ttttttttttttttttttcattattttctattcatacacagtagcaattcctccaaccaccaaagcagttctaaatccacaactccatacctgggagctgggttgcttaggctcatccattctcccaggagactcacttctggctctgtgtctctctgtcaagggaacaacactgccggaggggctaaatctgtcaacttcactgcttgttggccgagccaccttggctcctgaagaccctaaagtataattttcctgtcctacagaaccatggcctgtggtatcaatcaccatggctgttacttcctctgcactactcccatcttctccagaaggctgattctcaggcccaagccactcctccagattttcagttttgatgtgtactgctccaagaactctaacttcatcatcactccgacccccacggtccgccactcctgtctccacataccactgtcctgctcggttgatccgaagaatgggctcccggctctctacatcagaacttggttcaatgatctgagggctggtggactcctcaggaggacttagctctctgatatccagcacagcactaacctgacctcgccggtttccctttggggtattatgtcgtgggctaagggagcggttgagatttggtgtaaccctgtgagactctggaggtctctcttgatgctttgtccttgtttgacttaattctgcttcaacctcagccacattaattttgaaatgaatgccctccaggatctgtgtacatttgtctataatatgctgcatttgcagaaaactggcagctgttaggtagctgatgatatctgccagttgcaggcatatccgccctgtgtaacagaaagaaaggagctgttcaaaaacagtagggttcttgatgactgaaatggagactgtactcatctcattcaaggacatgtgatcccggaaatagggggagctggcagccagcaccactttgtgagcccgaaaagcttgtccttgc

SEQ ID NO: 474083 - DNA, 1000 bp, Homo Sapiens
ttttttttttttttttttttttttaaaaatgatttattgtacatctttgcatttcttaaggcatgaacaatggcatacagatggaacaggttctgagaagcatcacatctttttcgacaaggccagcacaatcacaccacatcaaacagacacacttgaagtctgcactgaccgactgcttgtggcccaggagtcctgcgataggggatggtgcttccagacagtggaacaatcgtgtggtttctatgttgttgttaactttcttgatcagctttaagcaccagttaccatttgtttttctttacaaactggtcagactttggattttatattctgctccttttattctgctttccaaggacggtgtggattttttttttttttttttttttttttttaaggaatatggttgcagcaaaacagaaaggatcccaaagtggttaggggccttgtctaatgcacttctgaaagtccattataaagatgaatagaaaagcaaatggtaggttttcagttgacccagaaaccacacatagctataagaaacataattgtgcatagttatttattcattcagaatgtgatatgttggctagctctacattcccagtctaccaaagaacagggctgtctactttgctaaacccagggtcctttcgaagctcccagtaggtgtcgttagaaacccaggcttctctttgattggcatcaataacttttttaaaaaattttggtatatgttcaagattgttttcttccatatatcgtctccgagatctctggagttcctctactctttgcttctctgatgctgcagcttctaaatttccttcttccaaaaatctttgatctggccggaaccgggcgtctgttggtggaaggagatcttttagtactggatctaactcattgagctcaatagcaaaccttgtgaagccatagtacagctcatagtttgttggcatggaacctggtctccaaatgcactttgcagaggggg

SEQ ID NO: 474084 - DNA, 1000 bp, Homo Sapiens; identical to SEQ ID NO: 342985

SEQ ID NO: 474085 - DNA, 1000 bp, Homo Sapiens
tgacactgtgatgaaatcactttaatgtccttgccaaggaaatgcccaagacactggcaggtgggcaagtaagtgtccagatgggaccccgcagctctgtctccactcagcagtgtccgcacgccccaggccagcaggccggcccctcctcgggcaacactggtcttcctgagggcagcccgtgctggggtcccacgcttcgtccatagtgcttgtggggtctctagaactcagtcatcttcttgtgggtgtctgccttcctctgctcctgctgcaggccggcttcctgagcccggagctgccccagctggcgctgggctcctgccagcttctcctgcagctgggctgacgccacgctatgccggccagcgttgcgggcgagagcctcctggatgctcctgatgtcccgctgggttcgctcgatcttctcctcagtctggaagagccgcaggctcagggcccgcttggcactcttgctggcatggtacatgtccttgctcctcctccccgctggggccgccccggcttctagggccccaggagcctgaccttgcagcttttcattgaggaagtcaaacacattccgaggagctgggcggcccccaggcctggcccctcttccccggcacctggggggcttgttggtgccagccttgccaaccctggtctgcttctgcagggtctccacacactggtccagcgacttccctcgaggcaacaccacagcatggatgggctccacccggccttccgcgtgtcggcccaaacccttgccaaactcatagcccatcttggtgaggagtctggagcctatacctcgcgtgtgcacctcccagccagcaaaggcagagctgcaggtcccagagtccacagcatctgaccccaccactgcaagagacggacagagggcagaggactgtgcagagtccacggcgtccgaccccaccactctggcatagctggagtcacccgtaccgtcgctgtctgagtcggactctgt

SEQ ID NO: 474086 - DNA, 1000 bp, Homo Sapiens
gaaattctctggactttattcccgatgcaggccttggccaaataccaatgacaggccccagagccaggcgggctgaggccaccagtccggtcagctgtaggtgtcagggtccgcgtccgctggcagaaagtagcgctgcagggccggctgcaggagccgcgggggcagcgggcgcgggggcataggccagtccagggggaaaggctgcggctccacacgcggcaacggcagcttcagcgtccggatggggccgtccagggtgcggcccgcacagagccgggacggcatggggcccctcagtctcatcgcggacctcgcggacctctgcggcttggcctcctgcagccggaggatggggtggtaccagtgctcccgcggaggtggcaccaccatgtcgggcaccggcgccaccgtgtagggcactggcgggtgtgggtgcgcagccttctcctggagcgaactccgctgctgcgcccgcagctgctcacagaagaagttgagcgcgtcgatggggcccaagtccagcagctgcgagtgcgaccagtcggtctcctccagcggcggcggctctccgggcagctgagcaggcccggcagggtgcaggcgggcctcgggctccaggcagaagctcttcagcgtctcggagagcactctgagacggagctgaggggtcccccagctgcgcgtgggtgccagcatccgctgggcctggagctccggggctaaagagtgcggctccgcaggtgagaccaccatcaaaggcacctctgagacctgcgagagcctcccgaagatgccggaggccgaccaggaggtgcccgagggtatcacggaggcgcgtgtgggtgccccagagaccactgacgtctgcgatggggtctcctgaagctcctggatcatgtcctccagtttctggtggcagcaagtgcgcaggccggccttggagtccaggtctgggccctggacccaggtcatcatctccttgaataggaagccctct

SEQ ID NO: 474087 - DNA, 1000 bp, Homo Sapiens; identical to SEQ ID NO: 342987

SEQ ID NO: 474088 - DNA, 1000 bp, Homo Sapiens; identical to SEQ ID NO: 342988

SEQ ID NO: 474089 - DNA, 1000 bp, Homo Sapiens
ttttttttttttttttttttttttttttttgcagcagtgagcaaactctttactcctcggattctccaccatcggcccccgcggtgaccagtgctcccgccccgtcccccttgcaggggacagtgaatacaaacaaaaatagttctctacagaacgaagtttccaggccccccaccccttccttctctcctcctcccccagacggtgagttccgtggtcaccgggcctccggtgaggcctggggtctggtgggttgcaggaaaaataaagaatagaaaacaggaccaagtcagcgactggaattgtaggcaactggaggtcggggtccgccgccgcccgtgagcctggcacaggccagggggtgtcggccacagtcccgtgtgtgtaagtgtggtgggaggcaggacggggtgtggggcgagcagcgtttctcccgaccctctggctcaccgccagaaaaaaaaaaaaaaaagagagagagagaaagacaaaaaaggaactgggcggcggataatacaaaagaaaaacgaaaccaaatcgcaggcgcggggaccggagtcccaaggcgcccctgctgcggggggagggcagtgcgggcgggagcgcgggccgggcggggggccctgctgagtagcacctgggagcacctcgggccgcacccttctcaccgcccggcctcggacgccggccccgccccgggaccccgggacccccggcctccgggtgcggggagcgtcctccgggcggggctcagcggcccaggcgggcggccagccccagcagcagcaggcagccgagcagggtggcggggcgcggggcggccccgggcgcgcggtcgcagtccagaccgccgtcatcgtcggcggggtcgcagcggggctgctcgcagcgcacgccggtgtagccgcgcgggcaggcgcagcgctggttctgcaggcaggtgcctccgttctggcacagcagctggtcgtcgtcgcacacgttggggtagcagccctgg

SEQ ID NO: 474090 - DNA, 1000 bp, Homo Sapiens
aaaaggtccacaggctttttaatggtgtgatggctacttcccttccgagacccgatctaatcattgacagtggcttccagggtgttggggtggggtggacaggtgcaggatgggcagaggccatgcagtgactgggaagggcttggggaggggtgttacattctgtttggcatgtaaacattcttaggtggcttcccgagggaggggaagggcaactccctgctccccaccccatgcccaccagggctggtccctggagttcagaagactgagcaaaccaggcctctgtgaggagctgggaaatggggagcctggggcacagcccctctcctctcctgtgcccccttcgtgcacggtgtggctggggagggaaggcatgtgttggggtgagcagaccctgcatctgagtcagtgacataggttgttgtgatggggaagtgctgagggaggtggtgtgacacttttacagaggaagggctcaggacctggaggcctggtggagagaatgaatgctcagggggaggaggctgcagctggggttgggggcaccgggagatgtggcttcctctgccctggatgcttcctggggagaggcacagaggcagtcccctaggtgaccccctccccactggcccactttccctcccccacctctcctggtgacattcagtgactcagaggcctgaggtcagttgggagccctagggaggtttggaatcccaagggcagactgggttttgcgtctctgccagctccagtgctgagtgaagctgggggtagaatggacctggggctctctcaggcccccttcttcctcccagctccaaaccagggtgttgttggtcctggggcagaggtgaggctgggggccctacattcacggttcggttggtggcaaggagcaggcccagggcctgggcaccaggagtcatatcctggtccccacctggcacgagctgattgtcattcggagaagctctaggtgggaggcagtggccct

SEQ ID NO: 474091 - DNA, 1000 bp, Homo Sapiens
ttttttttttttttttttgggttaaatatattttattaatgaattattaatcctgactgaggtggcttattacctctagtccactgttaaatccccttagttgacttaaataaaatcacttaaacccagaggaaaggaaatattttatagttaagcctacaaagtcctagaactagaatcatttgatgacaggctggtttctataactcaagcaaactgtacgttgacttaatatagctgacacatcaatctattttacagtgttttcaatttcaaaaatacaacacattaaaatattttcaatttatcaaagctaaaagcaacatttaagtaatgtacttaaagtgcgaaggcactttaacacaaagtagtgatacccagtggctatactcggtaactgacgatggaaataccatatatcattatttacaaaagaagttgtagtcacaaaagatctttggagatcttctacaaaatacactaaatatccattttcatttgaaaagtttgcctattctttcttcagtcactataatctcctcttcccactcccacactgaaaaacaaagaagaaaaaagaaacaaaaccataaacaaaatctatgaagaaatgcattgtagaaacattcatgtccactgatggttcctaagaagagaagggaaaaagaaaaaaaaaaaaaaaaaaaggaggggaggagagcgagagagaaataatttaaaggaaaacttgcaaaagcaaaatcatgacttcatcctatctcccaaacattttcaaagtcccccattaacactgggaaagggagaacaaaaacaaacacaaaagctaatgtccttgtttccaacagttcggagcagcatcctctgatgccttagggttgtaaatgatttcccttcacagctgactgattgcagtttgtttttccagaacttcgaggtagtccggttctgattgcggcttagcttgcagtaaagggtggttgggttttgactgccccacaaa

SEQ ID NO: 474092 - DNA, 1000 bp, Homo Sapiens; identical to SEQ ID NO: 160455

SEQ ID NO: 474093 - DNA, 1000 bp, Homo Sapiens; identical to SEQ ID NO: 160456

SEQ ID NO: 474094 - DNA, 1000 bp, Homo Sapiens; identical to SEQ ID NO: 160457

SEQ ID NO: 474095 - DNA, 1000 bp, Homo Sapiens; identical to SEQ ID NO: 342991

SEQ ID NO: 474096 - DNA, 1000 bp, Homo Sapiens
aaaatagctaaataaatctttaatatttctaattgcaaatgtacagaaattgcacagccacacagagtcttagaacaccaacagcttcctctgtacattattacatagttaaaagtcgcagctggagggaggagctccagcccaaactccaacgtttgcattttttccttttcacatacttacaaaagaggggagctgggacgcggtgtgggagctggggggctttgtggctgagtgtgtagaaaagagagaggctgtttccctggacagtctggctcccgcagtcgtgcggggcgcagggggaggtgtacctggggcagatgctctgggggaccggggcgtgtggagctgtagcctcggtcctccacccccactttctgggcagtcggaaagagtcctcactgacaggaggtttggcagtttccatcacccagaacatggaagttaagcaaaaaagtcagtcaggcctctgtgctagcagggagggcgtggctttctccagcagaggctgagtctcggtgaccagggggccccggggctgttcttccccagcagggactgtccttccctccagggcctctggcaaccccagccctggctgcaggcagggcccagctcccgggaactcaggttctctgtggcctgggcaggagccccccgttgactggcccagtgaaggcaccccagtggccactactcagacagcagctgcaaagccaacacacaaatgccacaggcagggaagacaccccccgcagacaccaagccttttcctcctgcccaatactgttctctagattcagaaataaaataaaacccttgggagagcagcagtcccggccagccctcggcagcaccaggaccaaaggatatgtacaaccattaggtgagatagttacattacagtcaaacaccaagaacatttacaaaatcggcagacttgcaattaagataaaaatctgtgaagagtctgtacacttttacagtttttgcactaggt

SEQ ID NO: 474097 - DNA, 1000 bp, Homo Sapiens; identical to SEQ ID NO: 160458

SEQ ID NO: 474098 - DNA, 1000 bp, Homo Sapiens; identical to SEQ ID NO: 342996

SEQ ID NO: 474099 - DNA, 1000 bp, Homo Sapiens; identical to SEQ ID NO: 160460

SEQ ID NO: 474100 - DNA, 931 bp, Homo Sapiens
tttttttttttttttttgtataattaaacattttattattacaaattcaaatttgttctcttttccctatatcaccatttaattgaacaacaatacaacgaaaactggtcgccttaaaaccaatttgaaacaggttgttcaggagcaacaatacaaaaacaaagtgtagactggaatgtattacattttggccaaacaaaaagatttgattcattctggttcatgaagttagataatggtgtttatggttttgaaagttcactgaaacttcttcactgaactggtttctttctgatgcattttcttgagttctagccatgactgccacagtagcagtcctgggatcagaacccacacaccgttaaaaaaaaacaggtaaagccaacagtacagccagttgctggtgttgaggttggggcttctggtgagccactctgggaggaaggtcatccagcagccatacagctcgcacacgcacagggtgatctgcaggaaatgccggtaatatttttctttgactatggcataaatgaggaacaatgccagagacccatccagggcgacggtcagaatttccacagacacaatggttggatcaaaataaacccatcttgcatcagctttgccatattctttccataaagaagcaatcaagccatcggaatttgcaacgtttcctactaaagacaagtagacaaaagggccttccagcgcgaagtgcaccagcgcgtcgtagcagagccagatgagcgccccgcggtccgccgccccctgcccgcggcccaggcgcaggcccagggcgcagcccgccgccagcagcgcggcgcacagcagcagcgaaccgccagcctcggcccccagctcccactcagcgcccatgcttcaggcttccgacgccaacggcccaggaccatgcggcagaggaaagcaa

SEQ ID NO: 474101 - DNA, 1000 bp, Homo Sapiens; identical to SEQ ID NO: 160461

SEQ ID NO: 474102 - DNA, 800 bp, Homo Sapiens
aatggtgttttgacagtttattttgaaggtcattttaaaaacaaagttaaagacaatctgagaaaaaaattgcacagaatacactcattaaataggtatggtttatggtgattaaatcaaaataagggaaatatgttatcttctgcaattccagaaataggttctgttgtccggaaggttcttatacatccaaaaagagggaatgatcatggcaattaaagctgcctcttaatcatgtaaatctacagtagcaactaaatttttctgttcttcccattaagtcagtttcgatcttcaaactgtgccttgttttttaaaagataagatgctagaaattcaatgggatttggtggtctttcctttgcaagcacagcaagtccctgtaataagataggcacaactgtctgatccaggtaggcacgagttggcaaagactggagatctaccttctgctttgatgacttttctgcattaatcttctcattttctactattctctcaacgttgtctgtgagaccgtactcagagtgaggattttctgcaacctgcgtttgtccctccagcatctgctctggctccatggcggaccctgcaagtcacagtccccggataccagtctgggcgcgggagcaccacgagcagtagagcagcagagtgggacagtccacgactgggcgcctacatggggtctggaaactctacgacagtcccaagtacctagaataagtgagaaagtgggggaaagggagctgattacccgcgcccaagccgttcgttcttaagagccctgcaccgcgcca

SEQ ID NO: 474103 - DNA, 1000 bp, Homo Sapiens; identical to SEQ ID NO: 343001

SEQ ID NO: 474104 - DNA, 1000 bp, Homo Sapiens; identical to SEQ ID NO: 343002

SEQ ID NO: 474105 - DNA, 1000 bp, Homo Sapiens; identical to SEQ ID NO: 343003

SEQ ID NO: 474106 - DNA, 1000 bp, Homo Sapiens; identical to SEQ ID NO: 343004

SEQ ID NO: 474107 - DNA, 1000 bp, Homo Sapiens; identical to SEQ ID NO: 343005

SEQ ID NO: 474108 - DNA, 1000 bp, Homo Sapiens; identical to SEQ ID NO: 343006

SEQ ID NO: 474109 - DNA, 1000 bp, Homo Sapiens; identical to SEQ ID NO: 335654

SEQ ID NO: 474110 - DNA, 1000 bp, Homo Sapiens
gcttggggggaaagtcaagcattatcttccaggggaaacactaggcgggtgccccggctcgaaaccttctggtctcccattcccaggtctcgctccagcacttcctccgagctgctcttcgttctccggctgccctccagactcgtggaggcggtgtgcgaacttgaggagccatttgcagtcactgtgctgtccccgtaggtcaatgtcaggtcgccttcggtcaggatgaaatcagagtcttcctctctcagtggctcttggttatcgtacacctggggactggtcagacatcgagctagtaagccacaccaggcggggagcgtggtggttagtgggggaccactgtgtgtgaggatgggcttcaggtaattgtgatcaaagctgtaccacagcctgaatatccatgcgctctcctgttttgtccggtttcctctggcagaatctgggccgtccccttgtaagacttgaaagctgtcgttgttgggtggtgggtcttgatcggggtcaacaccaactctgaagtactgccagtggtgttcattctggtcctcttcggagggctcctcgacgccaactctgatgttaagccatgacaacatgggtgtcgtgcctcctccaatgatccagacagtgaagaacacaatgagaagggtggtcgtgaacatcatctggcgagcataggatgccgtgtcacggatggccaacgcaaatgccattgctcccctgaggcctgaaaacatcatcatgtgttgaaaattccagccaatcttatgccttctgcccaagttgaggaagaaggagagcgggtagatgtgcgcggctctgcccaggaagatggcaacaaaagctccgatgatgaaaatggggctgaaaacgtgcttctggaaggtaaacagtgccaggcccatgtaggagaagatgaagttctctgccaggaaatgtaacacctcaaagagctgcttggttcgacttcttgattccaccgacagattgttgt

SEQ ID NO: 474111 - DNA, 1000 bp, Homo Sapiens; identical to SEQ ID NO: 343007

SEQ ID NO: 474112 - DNA, 1000 bp, Homo Sapiens
ttaagtagaattggaattcctcagtgtttgcaagtttccttccagttctgagatcttgtccaggagcttgtccatctcctcctttctggccagctccgactcctccagaacccgacgctgtgcagtctcctttttcaggaactcgatctccttctgctggtagtccttgatgaggcgcttggccttgctgtacttgcgctccagggcctggtactgcgcctgagtctcccgcaggtgctcgtccacagcctggcacaggctctgggcctcaccccagtagccttccagtttctccatgcgctccttgttctcctccacactctgctccaactgcgccttctccacccgccagcgccccttctcctgctccaggctctgcagctttcttttcagctgctggatctctgcctcagtgaccgcatgcttgatctggagctccttgaacttgtgcaccagcttctcgggctccatgtccacaggggacagtgcatcctcgttctccgctagctcaaacacctcgatggccatctcaccacccgggaacgtggggctcagctcctcatcctcgtcagtggcatactctcccgtctcctcgtcatcctccccatactgggcgtatctctgctccatcatctcccgctgccatcgctcctgttccaaagtctgctgaattagctgggccacttcgctctgctctcccggccgctcccggccaatcataaacctgcaccgcactcggcccttggtgttccggagcacagacgccgcgaagctctgggtcactcccaccagacttgttccatccacctccaccaggagatcattcacctggatcctgccatcccgatgggccgcaccaccctccgtcacggtcttgacgaagatacccagcttctccaggcccatgtctgccccggcgcccatgccgatgatgctgatgcccaggccctcggagtccttctccagctccacagggaacagctccaacctctccacacgc

SEQ ID NO: 474113 - DNA, 1000 bp, Homo Sapiens
ttttttttttttttttttaaaagaattcaaatactttaattcaacaagtgaaatacaatagtagctataaaactatggagatggtaaattaagcaataacagaaaactactataatttatgctaaacttccttttatcactacttaagtttcattcatcacattaatataatactgcatctcaacatctgcaattttgacaaatgcctggaaagttttttgttcagaaacagacgccggtctgacagaaacacattggaaaatgttctttttctggtcatagttgccaacacatctatgaactcggcctctaatcagtctcggaagttcacgatcgatttcataaaagacacaaggcagagtatttttcccatccctcataagaaaagtcttcgaataatatgggccaggtgtaacagctgaatcaagaacagctaatacttcaaaaagaagtacagttttctgtgcatgttcacgccaatacttcatgctttcaataactgcagaaataattcttaaagaactagctttttccttaaactgtaactgatacaatgaggtttccttcagggtgttgtcttctggaatatcatccaacatttgtttcttatattgattttgttgaaaattgggcttaagtgtctgtagtgcactgtttttgtctagccctctcattgtgcagccagatatttttgatgaatgtgtttgtctgagtagctcggtttctttgttgcgagataagttaggaggttcaggtattcttaattgtttttgttgttgagctcccgaactcactggacaagaattttttccatcatttgccactaagtttgttcgtttacattgaggcttaaaatcatttttattccaagttttcaagctggtatttttgttaccatctctgtagctccaaccaccctggcttcttccagtatttgattgaatagagttaaagacagaatcttgacttctcagaggacgagaagctgaatgtggtattt

SEQ ID NO: 474114 - DNA, 1000 bp, Homo Sapiens
ttttttttttttttttttttttttttttttcatggctttactttcaagttttaaattagataaatagaagcttggtgagcatctctcaggggtgtgtcccttctcttgtcctccttatctcgtctaccaagtctcttccgtttcctattaccacttctctttgtgtctctcatctgctgactttctcccaccacctttctcatcacctccattttgcttccttccacttctctggtcctacttccctttcactcctttccttcatctcttgggcccgcccattctgagagcacatcttgctaggccagctctggcagtggcatggaggtggcatatgccgaggtgcagtggcgaggacgtggttatgtacagctggaaaggctctgctgtcaccatgagatgactctattcttccttggttgcagttttctcctactctccatcccgataatccctcagcagctgaatgctgcaaagtggtgttgatgaggcttgcatagattctccccagtgcggaagggtggctcaaatagaatttcctatgggtggggccagctgtggcccggtggaggctgccagagtgctgagtagtgagaggggctgcaggccggaggggttctctctttcccactctccgtacgtgaatgaagccctccaacgtaggtcacaggtgcaagggatgctgtcttcacgggaagaatctttccctgagctgttcttgttggtctccacctttctgctgctcctgaaactcaactggttctgctggtgtaagtcggcaaaaatctgagacagggcttcactctcccccttggtcattagctgaatgagactctcgctgggctgggaggcttggagtttcttctgtactaacttcgaatctcctgaggggctgctgcagttcttgggtaccaggcagtgcgtgacaagaatcctagggtctttggtggtgatggacagccccttttgcagaatttgaaccagtcggatccagaagtgg

SEQ ID NO: 474115 - DNA, 1000 bp, Homo Sapiens
gtgaatacttggagcctccaggttacatttattttgtgccaagcaaagcagaacataactctatagtcgagttacttcttcttttaaggaacaaataaagccgtaaatattgttgaagatggagagacagattgtggtcaagctcaaaatgggcccagtgaatggacagtatctctgggttatgacctggggttcctcaggaagaatggttggcctagaaagaagccactggatgaattcttctaacttggtagcactgaggaaaaatgtccattttcctccatgaacaaaagttagcttgatccatgtactgaagtctgggtaaatgtaaatatttggctttgctttttcaaagctccttgatgcattttgatggttacgtttcttcagagttttcatttggggagaaattgtttttttctcaagatggtcagtggactttggataactgggcactttctctggttctgctgaagagatttccatgtctgtagaggccaaagtgttcttcagagttgctggttgtatgagtttgtaaagcagttctgtgatttctttacccctttctccctccagaatctctagacaatgtatcgtggagcaggaattctgaatttccagttctgtcaccttcttctttaatgccttgatgtcttctttcatagagaggatatctttagtcgttgtgcattgtttgtcttcattaacattcattctggtttccaggacctccatctgtttttgatacaagtcagtcttttcctggacttttggtatcatatggacaatgtcagtcatttggctgaaaagttcaacttgagcagttttaacatcttggagcactactggaagattcatttttccgtcataactatcatcatcttgattacaatcatcagatgtcacagtgggatatccagttgaatcttggtgccgaatcttacatttgtggtaaacatttttaagagactgtctgaccttggagagatttgaagtccac

SEQ ID NO: 474116 - DNA, 850 bp, Homo Sapiens
ttttttttttttttttttttttttttttgaagaggaataatttatttctatatgattttaataatgttccctaagtaattagtaatcaagattttcttcaaattcaaattaacaaatatgtttgttaatctaaataatatacatatttatgtatttatatatgtatatattttaatctttctgtaattcagtctttaactgtgaacttttacatgatggaagcagtgaaggactcaatgtcatagtacattttgatagtatttgataggctttttcaggtcaattaatttagttgcttgcaaatataaatcaagcttgctccagttccacaaggactccaccacagtctttaggatggagaaaaatcactggttttccatgtgctcctattttgacctcttcacttagactgcggatcttcttttttttcaaatccatcacagctgcattaatattatccacctcgatgcagatgtgatgcattcctccagccttgtttttctgcagaaaacctgcaattggactgtcaagtcccaatggatgaagcagttccatcttggtatttcccaggttgacaaaaacaacagatactccatgttcaggaagagggaccgcttcacttacctgggcccccagaatattcttataaaatgctgcagccttttccaaatctggcactgctatggctacatggttgagtcgacccaggttccacacagaacctgtcacttgatccaagggctgtgatgtggaagaagctcttactgttggaatgggagcttgaagtctggaaaaaagccctacggcattcgcggctgcagccttcagcacccgcgccattttggaaagc

SEQ ID NO: 474117 - DNA, 1000 bp, Homo Sapiens; identical to SEQ ID NO: 343010

SEQ ID NO: 474118 - DNA, 1000 bp, Homo Sapiens; identical to SEQ ID NO: 343011

SEQ ID NO: 474119 - DNA, 1000 bp, Homo Sapiens
tttgtcaaaatactttatttcggatcaggcagtcttagaaaaggggggtgattgtgggccgtggctgctccaaagaccagggcgcacccggggctccggggccaggctccctgcagtctcggcggcttcctcctcccagtgtgcgagggaggccgggaggggtccctgggcggggagttgctgcgcatctgttgtgtgtgtgcgtctgtctgtctgttcaggtctgtttcagactacgtctgcctgtctgtccaggtctgttttaggctgtgtctgcctgtctctctgtctgggtctctttcaggctgcgtcggtctgtctgtctgggtctgtttcaggctgtgtctgtctgtctgtctgggtctgtttcaggctgtgtctgtctgtctgtccgggtctgtttcaggctgtgtctgggtctgtttcaggctgtgtctgtctgtttgtctgggtctgtttcaatctgtgtctgtctgtctaggtctgtttcaggctgtgtctgtctgtctgtccgggtctgtttcaggctgtgtctgtctgtctgtccgggtctgtttcaggctgtgtctgtctgtctgtccgggtctgtttcaggctgtgtctgtctgtctgtctgggtctgtttcaggctgtttctgtctgtctgtccggatctgtttcaggctgtgtctgggtctgtttcaggctgtctgtctgtctgtctgggtctgtttcaggctgtgtctgtctgtctgtttgtctgggtctgtttcaggctgtgtctgtctgtccgggtctgtttcaggctgtgtctgtctgtccaggtctgtttcaggctgtatgtgtgtctgctctttgcttctgctcctggctctgtgtgtatttcccgggtcctgtggccctctttgccttgtgtctgagtgtcggttcctgcgtgggcctcagtcaggccctgggtgtgtggctatgagctgtgcctcccccattctggcatctctgctggggtcttggcctcacgtcc

SEQ ID NO: 474120 - DNA, 684 bp, Homo Sapiens; identical to SEQ ID NO: 343013

SEQ ID NO: 474121 - DNA, 1000 bp, Homo Sapiens; identical to SEQ ID NO: 343015

SEQ ID NO: 474122 - DNA, 878 bp, Homo Sapiens
tttttttttgctttttaaaactgttttattaacttcacaatatataatgagcatctttccatgcaataggtaaaactctcctgctgacagaaacttacaaactgggtcaaaaacaacattcatttagaagctggtaataggagacccacaagaaataggtaacatcaaaacgtttacgacaaaggtacaccacaaatgtgtaagtttaggaagcaggggtctccctattaacttcagggaaaccatcaggattcagggcataaggcaaaactcatcgtgatggtcatggtgagggggatcagtgctgactgcccgcaaactatgactcaactgcttttccctcagcttttccatcagctgtctcacctcctccccaatcctttccatattctcctctctcatccttgcctgtggctctccaagcctatgcattatgtcccatctatactgcaggatgggctgcctaacgcggaaccgcctacggtttcctctaggcacacagtattcactaacattcaaaggtagggccaagggctcccctttattagcaacttgctccttttcatctttttcatcattttcctggttgacattttccacgatgagattgtttaacgctcgttcctctttggactccattactcctgggcctatccttgcagtctcctcctcccgattctcgacgtgaggtgcgtcgccgcaacacttggccccgcaaacctgctccccctccgcttcctactttcggggccgtacctggcccgcacgtcctcagggacaccgggaacaggtaccactgccgagaagggagcgagcgacggcggttctgacgccacaacgaggtaagactcagtgttggccgatcacgtgtggctgtt

SEQ ID NO: 474123 - DNA, 1000 bp, Homo Sapiens
ctaattttatttgactcaaactatattttagacctacatatcatacaataaagtaagctgaaagcatagtgaaattaaagtaaatacaggttgtatggatagctcaatttctttaatataaaatgtaaattcagagatgactgggataaaagaaaagtgtctagaaaaaaaaaccaaagatgaaactatttaagctctttactgcaatgtcatattctgatctcagacagtagaagagtagtaagaaatgtacaatctcaagtctctcagtcctaaaatctatcagtggatgccaaaaatcttcaagacccattaacgttttctagaaaataagtctttttttttttaaactaagtgtactaaaaacacaaaagcacttatcagacaccctatggcatttgttgctgaaatgtctaccggctggagattcgccctttgagccgaagcagcctcagagccaacactggcttcctcctgtaaatcatctccagcagaggactctgactcagctggagaattttcttcttctagttcagcatattcatcagaggtttcgttctttgttgtatctttatcattatcgatggtgacagcttcatccagggcagcatttgtaacctctggggttgtttcagggtttacttccgtggtttccctcgccgctgcatctgtgacctctggcccggtttcagcactgactgctgtggtctccggagcagcctccacgtgacctggacaggcagatgcctcttttatgaccacaactgtagcactgggactttcttcagcatctaccacctcagcttccactataagttcttctggggcttctgaacttgctttctcagtttccgcaacattctccttttcaccttgaaatggatgtatctctgcttttgttttttctttcaaatttgttttatgttctgtgtgtttggcttggtctgatgtgactgtcttgtaagcataatatccaccagcactgactgtgacgcctaca

SEQ ID NO: 474124 - DNA, 1000 bp, Homo Sapiens
ttttttttttttttttttacactccaaacattttttattgcaagaaacaaaaagcacacaacagcctgtacatacatacaaaatactaactatagacagacaaatgtagaacatgtcatcatgttccttagtgtaaaacctaaacgatctaaaaaggatcatacattaactgtacaacacagtgtcatacagggataatgctatcatatttaatatgaaacagtgttacgggcacaaattacccatttctacaaaataagtgtgcaagtgatgccacatattatccatattcaactgagctgtcatcaaaatacattttatttacaatatgtactatgatcagttggatattaagttctaaaatgatttacttcactgctacattataaaggtaaaagcaatgtgtagaaaaagtgtgagattgtgtttttacatactgcttttgtagttgccatcgctggttcagttcgacttataacatatgtcttgcttgtagatttaacacctccaataggaattcttctaacaattacagaagaattcttaggaatcagagcattatcatcagtatattcttctttcgtctgcgcattggtgatctgcaggtcgcagtcggcagctttcagcttctctctccccataatctgcttctttaagtcgcagagggagatgtggagcccatcaaaggtgacggtatcatagttgagtttagaggaaaatttataatgcacacaggacatggtgccaagggattcctaaggttcagcgaggagacgtggacactctcaatatacgtatatttataaactttaagagcaaaatatgtacacacaaaacactcaaagacaccgaaggaccctaaggcctcagattaaataccccccaaccacaagcaggggttcgtcagaacaataatccagagaccccccgatactcagaatcacttcatgggggaggaggaggacgaggacggggaagaggggaaatcgagaatccgcca

SEQ ID NO: 474125 - DNA, 996 bp, Homo Sapiens; identical to SEQ ID NO: 343017

SEQ ID NO: 474126 - DNA, 1000 bp, Homo Sapiens; identical to SEQ ID NO: 160464

SEQ ID NO: 474127 - DNA, 1000 bp, Homo Sapiens
ttttttttttttttttttttttttctttttagaaatctgtttatttaaaagattaccaaaaaatttaagaaattgtgtttttgaaaaaagttgagacagtatcaagtctctgctatgaaaataagagggcattagtgctcttatatcctcccttctcccattcccaatttattagctatcttagggtttgtaatatttataatctatatctatactgtgactataatttccagtttgaccttggttcaccaccagctttttttctaccagctcatccatcattgagttatttggttcatctttcctatcaaatggtttccttaagaaggcactcaggtattatgttctgagttcttacctgcttaagagaacttgacattagatttgacgacttggttggcaataatacatttgagtcattcttttttcctactcagaacttcggaaatactcccccattgtttcccgtcacagaatcttgtggaaaggaagtttgaggtcccttggtgacttgctttttctgcctgaatggtgaggaattctttcttcattcttgaagttcaggatcttcatcagggtatgttttggtgtcaagtgttttctgttggatttcttagggctgtctggatatccttctccccatttttcacttctgtcaaaaatcccttcaaaaatttgagacctctcttcagccacaagagggcttcagtcgctgagttcctaacctgggctacatccgcctccacttcgtgcagcactatcttctggagagtggtaaactcttctttgttggttatatacttctgatttactttcttaatatttccaacaagatccatcttaacaggagcaaacactgtagggccaagtttgtctaatactggaaccacagcataacatgatgccaagaatgcttctgtgggaatgccactgtcttccagaagttcaatgtcactaaagcttgtgttcatggtactaaagaaagttgggataacttctt

SEQ ID NO: 474128 - DNA, 1000 bp, Homo Sapiens
ttttttttttttttttttttatacagaaaaaggtttatttggctcacagttctgatggctgggcatcaagattgggcatctgcacctggtaagggcctggggcagcttccactcaatggctgaaggcagaaagtgggctggagtgtgcagagatgacacagatgaagtgagagcgggtaggtgccaggctctttaacaaccagctctggggggactaagagaactcactcactgtccccacctcgggggacaatataataaatatattaaatatatcaggatgatttacatgcactgccctgatatatttaatagcacaggaatatacacaagagagtgacagatttgaatggtcccaaatgcagctgcaatgctagcccacccttttatgggaaaactgattctgacagttttccagactgtgcacacatttaaaattccacacccttgcttcagccagcttcctcctggaaggcaaagccagccaggtgagtgtttatgaaggcccaactgacccatcagcccagaagccaggccctcccagtgccaatggtcgcaagctgggggcaagtgcttggggagtgggccagttggcatccgaaacagggcctggtggagcagcatgggagcaactggtagtagtaaaaggaaagaaacagctgagtctgtttttaacattcattaatccaaaaatacataaaaattatttctgctccaggttcttggactctcaagaagggggtagctgccagccttgagcatctgatatgatacctaagtgctcactcatattatctcagaggacagggagatgaggaagtgagtctcaaaccagggaaatcagggccatgccctgcagaggccctgtggggggacttggcccacaacactctggcttttgttgccagaggaaatggggcaatcacaagagtgggccacccttaggcaattcctcctatacagctaggccccagggttgggagagttctttccctgctca

SEQ ID NO: 474129 - DNA, 1000 bp, Homo Sapiens; identical to SEQ ID NO: 160466

SEQ ID NO: 474130 - DNA, 1000 bp, Homo Sapiens
tttttttttttttttttttttttttagtacaagtggtttatttctcttccaggtgaggccgcatgtatataagcaaaggtttgcccacctggttccttcaggaactccccgaggaatctgtttagtttccatgcattaaaaacaaccctctagttgccaataatgaaactttaagaagcaacactttgacgtcgcagagttcctctctgcatgtgacgcggatataccaaagtgagtttatggcatacagtatgcatgggttaatgtaggtgagacagggagtcccggctgccctgtggccccattctgttgtggaggcttcgctgggagctgagaacaccctgctgtccatgttttgatgacaggtggttcttccaaaacagaagcaccgagtcaccgcacgcccctgcttcagtgtgcgaggccgtggggctctggtgttgtgaactccaggttggcaggaggttggaagcaccaaagaccccaactctggtccctcaacaggcagtattgggggacattattccctcctggccaataagctcctgtggcctgggacactgggtggggacaggtggtgggggtggggcagggcagaggcctatcctcctataaagacacagttgtagcactttgctaaaaccttttctggcaaacttacttggagacaacagggaggggacagctgatgtaggcatttggctagtcccctagaacagggaactctggctttccctcttggcttttttctcctcttaaagatcctccctctgtgggtgagatgaacccagatccccaccaaacagtagcttgggacaggatgcctcactgatccttatttaagaatcgactccttcccgtctcctccagatctgcagatctccagatcagtgccagcaaaatctgcaaaagtagtgacctaaccagggtaaggaatgagctgcaaatctgttgtaaaaactggatgtgctaggagtttcaattctttggataatcaaca

SEQ ID NO: 474131 - DNA, 959 bp, Homo Sapiens; identical to SEQ ID NO: 343025

SEQ ID NO: 474132 - DNA, 1000 bp, Homo Sapiens
tttttttttttttttgtagtcagtggtggagaccaacatttttattaataagataaaaggaaagagtggtaaagcaaaggcgatcattggatggaatgattatgtgtcacgagcacttgaggacctagaaagcaaactggagtgattatgccaatcaaattgcaaggttggagatatgctaaaaggtttgaaggaatccaatcctggggctattgcacaggacttggggaaatcaagttgctgcaagcagctatgacttgaggaaggtgtgcagtgggggaccttaaaccatttccaacatctgtgcctttgaaatattttattactgatccagatatcccaagacattttaaatggaagggaaaatgtactatactagacccaaattctctggatatttacattccatccctgtctagggatgtgggggaggtgaatctgtcagtggatcagatcagactagaaggttcttgtgattaatggagctgggccatctctaagaaaaaggcagcaaataatttggttccctctatgtagttccacctgttgattttctcattctgcgaatgttctccatcatcaacagctcccagcggaattagcaccacgctcttgtggacgatctcctggaacattttggcaattggaatggtggatccatcccggatcatatctggttctgttccaaacactgttctgatcgctctttttgctgcgagatactgggtgtcatcaatatttgcaatccacgggtgtagtcctagagtcatggaaacaaccatcttgttggaactatttcttttggagaacacatcttcaagatgtcgtgtcacctgtttttccaccgcagacacattcatgtgagggactagacggattgaaaattttcctataactcggccaggtatgactgttttagttccaggctcatcaaacgcgccctcgatcccatgaatagaaagagatgggtacctccagaggtgcattagaatctcctcct

SEQ ID NO: 474133 - DNA, 1000 bp, Homo Sapiens; identical to SEQ ID NO: 343026

SEQ ID NO: 474134 - DNA, 1000 bp, Homo Sapiens; identical to SEQ ID NO: 343027

SEQ ID NO: 474135 - DNA, 1000 bp, Homo Sapiens; identical to SEQ ID NO: 246566

SEQ ID NO: 474136 - DNA, 904 bp, Homo Sapiens; identical to SEQ ID NO: 160467

SEQ ID NO: 474137 - DNA, 1000 bp, Homo Sapiens; identical to SEQ ID NO: 343031

SEQ ID NO: 474138 - DNA, 1000 bp, Homo Sapiens; identical to SEQ ID NO: 343032

SEQ ID NO: 474139 - DNA, 1000 bp, Homo Sapiens
ttttttttttttttttttttttcttttgttatttttatttttcaatataaatagagacagggtcttgctatgttgcccaggctggtctcgaacacctggcctcgagcaatccttccacctcagcctcgggaagggctgagattacaggtgggagccactgcgcccagccagcagtttcagttacattatagagagagtttaatggcatttccacagttcaggaccagggaaagaaacacagaggctgcctggccctatgtgaaacttttgggggccgactccaggcctgagcctgctctgaggggatcagtcatgtccccgccttagtcccaggacctgagggagctctggattggtggcttggcccagagccaggtggatggcagtgttgaggggctggtgcttgagactggttggcagagtgggccctgtgctgaggatgggacatcttggtcacaggtcgcatgaggttcctgctgagaagggctaggggatgatcatccatcttcatgggtgtgttccggttgaggaaactcagtcccagaagtgagcttggaaagggcggctcagcccaatgctccggagctgaagtggtgctgggacgtggctcaagacccgagcttgctgcaggagcccattccccttctgtcagagggggtggtccgccaggagacagtcttgcatctggtccaggaagcagacagttcagtctgctcgggtgtccagggccacacagcctgggggtgtcagaggaactgggctccggtacttcaagtaggacaggtacgtgtcccagcccagcgtcaggccgttgatgtaggtgactcgaaattgggggggcacgaagaggaagttcacgaactgcgcagcaggccacacgcaccagtctgccttgtagaattcccagacgcccagcaatggagaggctaccagctgatccacgaggaccttcttgaggacatttgggaagcctcggaggccagacgcagggaataggcgg

SEQ ID NO: 474140 - DNA, 1000 bp, Homo Sapiens; identical to SEQ ID NO: 160468

SEQ ID NO: 474141 - DNA, 1000 bp, Homo Sapiens; identical to SEQ ID NO: 343034

SEQ ID NO: 474142 - DNA, 733 bp, Homo Sapiens
ttttttttttttttttttttttttttttttttttttttttaatttccaaactctttattatgtggtttacagagcatctgaagattggtttcatgagtctgaacttagtgtgaaagatgttcaaattcaaatccccaagccagcgcatcaatgtttttgtaggcttcacagtgctgggctccgcatccttctttggccgccttacaccaaaacgctgagtttggaaatcaaaagggtcagcccagtttcagtccctcttggaaaggtgacatatgtggttgtttcctcctttttttccttctctttttcttggtgtttcatattttgtcctttcttttttcccatttatttgttttctctcttctcttcttcttaatttttcccttggcagcatcttcaatacttgaatctgtctggcttcctgaagacgatgatgaggaagaaggaaacataggatcatctgaagaaaaagacgtcactgatctatgtcgggatcggtgctggttttggttttgctttcttcttttctttcgtttgtgtttaccttcatatttgccagccctggcatcttcaggatttctgtgagtggacttcttatccatgtctattaaacctccctgccatgttggaaactgcagagaaacaacctgtttggtccgacttgacaacctcaaccggaccgaaggtgctgaacaaccagtgcggcgagcgccgcgaaacccaacgcccgacc

SEQ ID NO: 474143 - DNA, 1000 bp, Homo Sapiens; identical to SEQ ID NO: 343038

SEQ ID NO: 474144 - DNA, 1000 bp, Homo Sapiens; identical to SEQ ID NO: 160470

SEQ ID NO: 474145 - DNA, 1000 bp, Homo Sapiens; identical to SEQ ID NO: 343040

SEQ ID NO: 474146 - DNA, 1000 bp, Homo Sapiens; identical to SEQ ID NO: 343041

SEQ ID NO: 474147 - DNA, 1000 bp, Homo Sapiens; identical to SEQ ID NO: 160471

SEQ ID NO: 474148 - DNA, 1000 bp, Homo Sapiens; identical to SEQ ID NO: 160472

SEQ ID NO: 474149 - DNA, 1000 bp, Homo Sapiens; identical to SEQ ID NO: 343045

SEQ ID NO: 474150 - DNA, 1000 bp, Homo Sapiens; identical to SEQ ID NO: 343046

SEQ ID NO: 474151 - DNA, 1000 bp, Homo Sapiens
tttttttttttttttttttttttttttttttttttttttttttttttttttttttttttttgggccacatgggtagaaaaacagcgtctgcctttatttaagtcccgtcccccgccccaggtcccgcccctggtcccaccccgcgtcccggcgcgggagtccccgggggatggaagtagctatccagggctggctgaagggcccgggacacttgctccgctctctcttggagccgcccggaacgcggggcgcgaggctgctgcagggcccccaggaagtctggcagttgggagggcagtgtgaagacgggcacggtgcggaaaagggcgggtacggcgtccgggtggagcagcctgtcgaagcaggcccccacgtagctgccgggcgcccggccctgcaagaagtcgggcagcacgcagctgagcgaggcgcggaaggcgtcgtgcgggccgtgcgccccgggcccggacaccccatcctgtagccactcgctgcacagcgccaccgcaccgggagagaagagcaagaccaccacgccgccctcctgcagggtctggcgccgctgcgcgtgaaaccaagccacgggcccctgcgcgctcagttcacgacggctccacaggtctacggccacgcgcagcggcagctggcacagggccgacgccagggcgcccaccaggcgctcgaaacccgagtcatcggctgagtagaggagcagagccgcgcggcccctggcggccgctgccggagaaaacagatggggagggaagaggtgagctggcacaggcctggctccccgggggcggccctccgcccagcgcttgctcccactcaccccccgagcggacgtcctgtttcaagagcctcagccaccctttcgcgtgatcctttttgagaaggaggatgagggaaagcgcagcggcaaagagtaggcaggccagccacacgagggcccagcgcttgtggatgtatttgtccatggggcaggcccatagcgctccca

SEQ ID NO: 474152 - DNA, 1000 bp, Homo Sapiens; identical to SEQ ID NO: 343047

SEQ ID NO: 474153 - DNA, 1000 bp, Homo Sapiens; identical to SEQ ID NO: 343048

SEQ ID NO: 474154 - DNA, 1000 bp, Homo Sapiens; identical to SEQ ID NO: 343049

SEQ ID NO: 474155 - DNA, 1000 bp, Homo Sapiens; identical to SEQ ID NO: 343050

SEQ ID NO: 474156 - DNA, 1000 bp, Homo Sapiens; identical to SEQ ID NO: 160473

SEQ ID NO: 474157 - DNA, 1000 bp, Homo Sapiens; identical to SEQ ID NO: 160474

SEQ ID NO: 474158 - DNA, 1000 bp, Homo Sapiens; identical to SEQ ID NO: 343052

SEQ ID NO: 474159 - DNA, 1000 bp, Homo Sapiens
agaggtgtcaagtgggaaatcaggggtctcacagccttcagagttgagagccccaaacagagatttacccacgtatttattaacagcaaaccagtcattagcattctttctatagatattaaattaactaaaagtatcccttatgggaaacgaagggatggactgaattaaaggaatatgttgggctagttaactgcagcaggagcatgttcttaaggcacagatcactcatgctattgtttgtggcttaagaatgcctttaagtggttttccaccctgggcaggccaggtgttccttgccctcattcctgtaaatccacaaccttccaacttgggcgttatggccattatgaacatgttatagtgctgcagagattttgtttatggccagttttggggacagtttatggccagatttgggggggcctgctcccaacagccctcatattttattggtgaaaaggcagatcccaagagacaatgaaaaagatacttgatttctactgtagggttgatcctggaacaatctgggcctgaactgtgcaggtccacttacagaggatttttaaaaacaaatgcagtaggtccgtatgggcagtttccacatttgaaaccaaacgtggtaggaaaatacagtattggtcaggttccaggcctacatgcacagagggttgacttttcctacccacaggctccacaaggctgatttcaggacctgggcatacatgcatatgtgccgagaccagcttggtcaaggagaccccaacccagtggtgctagaggaatgaagacaaacacacagaaataaagtgcaaagtgggaatcagggggaaaacagccttgagagctgagagccacaaacagagtttgacccacatgtttattgacagcaagccagtgataagcattgtttctataggttacagattagctaaaagcattccttacgaaaaacaaagcatacttagagaggagtagagaaacagtctctggccgatta

SEQ ID NO: 474160 - DNA, 1000 bp, Homo Sapiens
tttttttttttttttttttgtagagactggactctttatatctgtatccttaatatctagcacaatgcttaagaaatgtctgtccactgtgcttaacaaatgtctgatgaatagccaaggctttttaggattatcaacttactacagctggtgagggaacatgaatgcttgggacagatcgaggtcgcacatgattggccaaatggcaaagaacaacaccgtcagttagagctgctccgagatcacaaggtagagacactttcaaccggtactcaatatgtttacgcagttggtctattaattccagctcttcttctctctgtcttgaattctgtcctgttatggaatctgtagaatcagtggtaggtgcagcagatggaggaaggggtgaagcatgacctttgttggtttctgccctgacacctgctcggaaaaggaagctttcagggcgctgaggctgatttctctggatagcagcaggaaaagaatatgcaggggaatgatgaactgtttctgttgcaggtgaacttaatagagcattaggtctgtcatcactcttaagaggcgtgaaggcagaagaatgaggcagggtagcagcacagcccacttgattcaaccctgacagcgacatgcacaaggcactatcatcagtgtgctgagaccttctggatgggaaggggcactcaccatctacgccatctaggagcgggtgctgtttttgtggactttgtgatgctttttgtttgacaaagtccaggacagcatctctctggatctgcttggtccttattttctcctcctcatactgcagggcagcaagctgagcctctctccgagtgcgctctactaactgctcccttctctgatgaagttccaggtctgtgtgtgacagctgattgtgacttgctgatagtgacaggagggaagatggctcagctggaaccctgttttgatgtaagtatcttctcatatcttctgttttttgaaactccctaatggc

SEQ ID NO: 474161 - DNA, 1000 bp, Homo Sapiens
tttttttttttttttttttttttttttttttgtagctcaaagggctttgcaaaattttaatatattaaaacaagaggcatctgctagaaaacattctattgtataaaacccgagttcttaaaaacatgttttctttggcactttcattccctccctcccctttccccagcatattgcaaaaagctctccagtgctaaggcattggcagggtgtgtaaacagcagccagcatatgtggaagaataatacaaagcttttttttttcttctaatatgtctgtgcagcaagcataaataacaggacccattccaaggagtgtgtgtgggttttccccctcccctgtgtcctctgtcaccttggtgatgaggccagagtgatgtgaagactgggagggaaccctaggtcagaccttggtttcctgttgttcttcccaagacccagggttccctcggtttccatttggtcctgtagtgaaatgctggtggttggttttaggttggggaaaagacgggtgctggtgtttaaaaggagtaaaggcataggcccctcatgacctgcagggaccccagccactgcctctgggcttggcttgagctcctgggagtcgggaagctggtttgacattttgtaggtttctctctactgtggagctggagatcaaatgattgggatggttcttcctctggccttacggaggcaaggaagtgctcttccttagtcccgtggtgttgtaaggctgagactagggagatgggtcttgtaactgaaaagtaactgcttctccaaacaccacctgcagctttctggggcaccattgtttacaggactagctttagggcatgactagattctgccccagttccacctgccctctccctctactcccctcagttcacccacaggcacctggcagtcagctgttgaggtgcagggcctcagctttgtcccggtgtgccacctctgaaccctgctgtctggtttaagtaccactcctgtgggaa

SEQ ID NO: 474162 - DNA, 1000 bp, Homo Sapiens; identical to SEQ ID NO: 160476

SEQ ID NO: 474163 - DNA, 1000 bp, Homo Sapiens
agttttgctcaaaatgctccgtttattgctctattcaatgaccacgagcgaattataaaaagacaccaaatgtctctgtctgccgtgggataaatatttaaagtcagcaataaaaacacgtggctccaagataatacatgttgccaaagagtcatgcatgccctcctgatgggctctcaacacacgcagtgagacttctgggaaggctttcccacagtgacacagaaaaatgtctcacgtagatctgggctgagtccccacccaaaccttgagctcccctcccctccccaacagggcctagatcctctgggttctccatgccccatctgccccctaccttgccagtgcctcacaggctgggcaccctcctgagagcatctgacacccagaggccaccctggctgtgatgcccactccaacctagagaactctccctcagctgaaagctctctggtgaccttctggagctccccatgcctaactccccgtcatctgccttttgggagaagtgcgggtgaggccgaggcaggcaagtccggttgcttaggggctggagctcattaccccttcctggctgaggagacacagtgtccggtacagagggcagagatggatggacagacagaacacattgcagcaggacacaaagtgtagcacggaaacattctggatcaggtattgatggaaccatcgttaaaaactggagcccggggtctgcgtggtgtgggtcaggccccggggccccaggcctggcctggcatgtcccttcccgaccctgccccccactccccaatatgtacagtaggaagagcaatgctggagggtaggggtcaggccaggctgacagaggacagagggagctgactgaaggggaggaagcggggagcaggcccaggacccgaggcagggccctgggtgagggccgagactcaggctgggcagtgcccagagaaccttgtaggagaagcgcagtcattctggggactggtgggacagctgc

SEQ ID NO: 474164 - DNA, 1000 bp, Homo Sapiens; identical to SEQ ID NO: 160477

SEQ ID NO: 474165 - DNA, 1000 bp, Homo Sapiens; identical to SEQ ID NO: 343060

SEQ ID NO: 474166 - DNA, 1000 bp, Homo Sapiens
ttttttttttttttttttttttttttgaaaaactattaacaaatatatttattgtggtggctttctcccctactagatataccttgttagaaaatagtatcccttttagttccaggtggaccattaagcaggtaataaaattgtttttccctcattgagaaagaaaacacatgactttgcaaacatgttatattctccttgctctattttttttctataaaatcagaattttcttctaataagtatgattttgtttttggaagtaagttacaggcacatgtttacaggttgatatataatccaaggggtaacagaggctgagccacatagtgctaacatagattggagacctgttccaggtgaccacaatccttcacagttttgtaaagcacaaaagtagtctccagctctatgatttcttccacatttgtctttctccaatcccatatggtatattcaattctggtatgcactcttgtgtttcttataaaaatacaggatgagagtgatggaactaatcttaaaacagttgtttctgtgatgataaatcctgtgattccaaatgccaggccctaattctgagcactctctagatctcccggtcaaaacaacactgtcctttgaaggatgtttctcttccctgaactcctatttgttttgaagggatactgtatctttgaatttgcagaactatcttttgcttcttaaaacaacagcttgaaaacacatttttataaggaaaagatgtttcttctccagatgtcatcatttcgttgttacatcttatagcctattgataatatgtacaagaatgtcttgtcttttaaaaatgcagagaagcacacaagacaaccatctgaaagtatcccttctttgatcttttggctctttgttgttaactatgcttgtatgaagaatatagcaactactgggaatgttgtttagacagagcaataactgacatgtccatttgtggtcctaatggctagagcacctgtcc

SEQ ID NO: 474167 - DNA, 1000 bp, Homo Sapiens
aagtatttcaaacagaacccaggttaaatcacccttgcatgcattgaatcggcctgagcttccctggtgcagtttgtttcctcttctcatcctctagaggacagaacaaggcagggtaggtccatcagtatcacgacctgctcagcttgtgcatagcctctctactcaccttaaccccttccaatcacgagctcccattccctgtcgccactcccaaatagtcaattaccaagtcttctcagttccacattctaagtattctacagccaccactctggtcttggcctggattatttctcacctggatttttataacagcctcctaatgcatgtccctgtctacaatactggccccctcgaatctgtccttccattgtctacattcaagatcaaacttcttacatctttccacttcagacttatcattgagtctgaagtccttcagccctaagggaccacttacagcttctgcccataccttctgtactcccccctctgtctaccacatcctcccttcaacaacaccctcacccagtttgactagttcatattaaaaactcagtttaggccgggctcagtggcttacacctgtaatctcagcactttgggaggccgaagcaggtggatcacgaggtcagaagtttgagaccagcctgaccaacatggtaaaaccccatctctgctaaaaatacaaaaattagccggacatggtggcgcacacctgtaatcccagctactcaggaggctgaggcaggggaatcgcttgaacccaggaggcagaagttgcagtgagctgagatcatgccactacactctagcctgggtaacagagtgagactccatctcaaaaacaaacaaacaaaaaatctcagtttagatgtctcttttcctgggaaatcttccctgactcctaggactgcgtgtgagttccctctttcccccatgtaaagacattcttgtctttagtatgttctctgttacattccctgtgcctagaact

SEQ ID NO: 474168 - DNA, 1000 bp, Homo Sapiens; identical to SEQ ID NO: 160478

SEQ ID NO: 474169 - DNA, 1000 bp, Homo Sapiens; identical to SEQ ID NO: 160479

SEQ ID NO: 474170 - DNA, 1000 bp, Homo Sapiens; identical to SEQ ID NO: 343063

SEQ ID NO: 474171 - DNA, 1000 bp, Homo Sapiens
tttttttttttttttttttttttttttttttttttttttttttcgtggtttaggccccatggcctacagtcctttattagagcgagagtcccgaggcccagcccccatatatgatgggtccacttgagtctccttaggcgccccatgagggagtaacagcttgggtagagagctagggaccttgcccagcctgaccctggggcaggcaagcggccccccagcccccaccaccaccccaggagagggcggggtgagaaccggagtcaaatcttgggccgggtccaagcgcctgagcgcccggtttacgcaggaaatagtccagttctcagaagtggtctaaccagccccagccccagcccggcaccacctggagggttcaagtacatggaggagaggagtaaggcggacttaggccctggtatggagaaagggtgaagggagagagaggacctgcgctcaggagggagcgtggtctagtggcgggaaccacgggtcccgcagcgggcgtggccgactgtgcgggaggccccggatccaccgtgggcgaggccaggccccagcgccatcagggcgcagggtgcgccgccaggtggcgctccagcagcgcgcggtgcgagaagaccttgccgcaggcggggcagggcgcgcgctcgggccggtgagtgcgcatgtgcacgttgagcgagctcttctgcgtgaagcgcttggcgcagacggcgcactggaaggcgcgcacgccggtgtgcgtgaccatgtgtttgagcaggtagtcgcgtagagagaaggatcgccagcacacggcgcactggtgcggcttctcccccgagtggatgaacatgtgcttggtgtagtttttccgggagctgaacgtcttgcgacagtggctgcactcatacgtaggtggctcagcacctggggtgcgagcaggggtgcctgagggggccgtggtgggagcagcagagggagccgggacctcccccagctgagtactgggggctgc

SEQ ID NO: 474172 - DNA, 1000 bp, Homo Sapiens; identical to SEQ ID NO: 160480

SEQ ID NO: 474173 - DNA, 1000 bp, Homo Sapiens; identical to SEQ ID NO: 160481

SEQ ID NO: 474174 - DNA, 1000 bp, Homo Sapiens; identical to SEQ ID NO: 343066

SEQ ID NO: 474175 - DNA, 1000 bp, Homo Sapiens
tttttttttttttttttttttttttttttttttttgtctttttaagactggacttgctttatattaaatttgtaaaagtgtgcactggcagcagcctgggcggggctggggtggagcccggggtctgcttgggcctgagccacccacaggtccttttcttccccttcttccttggaaggcagaactgcccaccaaggcagggatctgtctgacttgaagctccgttctggggtctgggaggcgtgggcaggagtgagggccccaggccctctgagcgctcaccccagctggggacaggccccgtggttttcaggcacaagacggtagcccggcctccagcaaccctaaacagctgggctgctgccctcttcctcctcctcagcccagagggtctcccaggaccctgagggccatccacagaagaagtgggccaggttgcgggtcaggcctcggtcgaaggggttgctggggcgctggcggagataggcgatgcggtgtgaggagatgaattcccaggtggtggtgttgctggccaccaggtagaggtgcgagacgaggagcaggctggccaccaacgagaagagggacagcagcaggaaggtggcgaacaggagcccgctggaccgcaaccacagaccccagggctggaagaaccggaggcctgaccatgccaggtacaggccccacagaagcaccaccagctgcagcgccaggtagaccacaaagagtgggtggttgcgctctcccacacagttctccatccaggggcagtggtggtcgtagcggcggacgcaacggcggcactcacggcagtgccgagccctcaggggctgcagcaccaggcagtatctgcagcgccgaagagggatggctggaggaaccatggctgtctgctcctctttgagctcctcctgaggctggggctgcacattcacgtagccagggtccatgagtgacacagcgaggtagagcagcagggagcccagcaccaggagcagga

SEQ ID NO: 474176 - DNA, 1000 bp, Homo Sapiens; identical to SEQ ID NO: 343067

SEQ ID NO: 474177 - DNA, 1000 bp, Homo Sapiens; identical to SEQ ID NO: 160482

SEQ ID NO: 474178 - DNA, 1000 bp, Homo Sapiens; identical to SEQ ID NO: 343069

SEQ ID NO: 474179 - DNA, 1000 bp, Homo Sapiens
ggagaaggccattttacttcgggcgttttaattacatagctgaggccagaaagcaatgcctcggccagggaaggacagctgtgaaagtggaaggagagggaagtggggtgtggtgggaagggacattcctgcaggcctccgctgtggaggaccccgggtaggtggcgcagggcgcggctggcggaaggcgggccaagctagtacagcgtctcgcgggcgtgggtgcgcaggtggcgcagcaggtgggagttgcggctgaagctgcggccacactgcgtgcaggagtagggcctggcgcccgtgtgcaccagcaggtgtcgcagcagattgcagctgcggctgaagctcttcccgcactccacgcactcctgcgggggctcggcctgctcctgcccgggctccgcatgggtagccaggtgccgccgcagatgcgcgttgcgccggaagctgcgaccgcacgtctgacagctgtagggccgctcgcccgtgtggctgcggcgatggcgggccaggttggagctattgcggaaacggtggccgcaggtgtcgcaggcgtggggcttctcccctgtgtggatgcgctggtggcgcgccaggtgggcgctctggctgaagccctcaccgcactcgctgcagcggcagggcttctcgcccgtgtggctgcgctggtggcgggccagatcctgggtctggccgaaactcttcccgcactgggtgcagtggtggggccgagggccaccgtgggtcagcaggtggcgggcaaggctggcccggcgcacaaagcgcttcccgcactgcggacaggcgtagggcttctcgcccgtgtgcacccgttggtggctgaccagctgcgagctctgcgtgaagctgcggccgcaagcctggcaggagaagggccgctcgcccgtgtgcaccctccggtgggccaccaggtgctcgctgcgccggaaggccttgccgcagtcgctgcacacgaagggcctccggtcggagtcccggc

SEQ ID NO: 474180 - DNA, 1000 bp, Homo Sapiens
ttttttttttttttttgtttagaatcatttaatgaatgttccaaacacacccttcactgggctacaggtaaatttcactgggatggaagcagatgaaccacccaatcaaacagtacatgattactcggtttccagaaatctggataccagaaaaactcagtaggaaacatcaggatcacctagccagaggttccttgtgattctttgcttcctcctctcctcttcctcctccctgctaaggaacttctccaggggtacaaatgttcaggatgggagaaggggaagtcaggtcccttatctctagggcaaagaggagtgctgtgacaccacaccccagagacaacaagatgatgtggaggcacaggcctgctcaataaatagttcccagaagtctccacagtgggattaatgggcccagggacgctgaactgcaggagccaccttcccgaggccaggctgtggcctgctcgctacgtgttgcacaccagcacatctgcaaagggtcccaggaggatcttgttgaagatgcagcggacccacaccaggtaggtggtgaagggcttgatgttctcagtgaaggtgtggttctgcagagccaggatgtaaggcacgtaggtgttctccccctgctcctgcagccacacctcgtacttcacctccctcaccttcaggtatttaaggttccatgggatctgccaggagacagtgaggcgggcctcggaggcgccatgcactgacgcctggcaccgtgcctcccgcaccttgcctggatataggccgactgtccacttctgcttccgtggtcctggccggcccttcaccacgcgccgtatggtttgaatgagggatgggatgtccaccttggtgtcctggtagattcggaagagccactcggggttccggcaacagagatgccgtgggacctcacggctttgcaggatacgggcttgctcagcccggtccagatgggtgatgcccccctgatcccagggccgctcag

SEQ ID NO: 474181 - DNA, 1000 bp, Homo Sapiens; identical to SEQ ID NO: 343071

SEQ ID NO: 474182 - DNA, 1000 bp, Homo Sapiens; identical to SEQ ID NO: 343072

SEQ ID NO: 474183 - DNA, 1000 bp, Homo Sapiens; identical to SEQ ID NO: 343073

SEQ ID NO: 474184 - DNA, 1000 bp, Homo Sapiens; identical to SEQ ID NO: 343074

SEQ ID NO: 474185 - DNA, 1000 bp, Homo Sapiens; identical to SEQ ID NO: 343075

SEQ ID NO: 474186 - DNA, 1000 bp, Homo Sapiens; identical to SEQ ID NO: 343076

SEQ ID NO: 474187 - DNA, 1000 bp, Homo Sapiens
atcagtgttagagaattttgttttattgttttggtggcatgggcataattggagaaaccattggggtattcactagtaacctacattgttagtttccttggttccagcaggtaatacactgggttccgtcaccctggagatggctacggggaggctgagtgacttcccaaagtaataaagagtttggaatcagaattccaggtctgactcccagcagactgttctatttccttacacacctgcactttcatcaatcttctccagctccaatttcttgtgccccttcaacagcatctggcacaggagaatcagaggctctcggaactcggcctgacagatggcgcagatgtcaccagcttctgtgcactgctgcccggtggctcggactccatagttctgagaggtacagagaagcttcagggctttcctaactccgcccacacgtccacagatgtcgaaggacttgcagaggctgtagagaacgatcaggaccccgcccaggaagtagctgttggaggagtcgtcacccatgatgtatttgtaccacagctggatggggacaagggatcggaacagctggctcagctcctcgatgaccagatagaactttcccttggacttgacggccaggatgatcttgggcagggccacgatgaggcacttgagggcgatggtgatgtacttcagaacaaagtctgcgatccccacaatccatagcaggtcaaagaagtccagcatctccaggttgggcttcaggaatatgaggctgttgtacagctgctgggagctgaatgtataaagcacatagagggtgttccccgccagaaaggccaggatccacaagatgaccagcactgacctcttctccttcagtgagacctgttctcgaagcgtggagttggcataggcgaaggtgctggccatcccgatgcacacagcaatgccgagcttatgctgaaagcacagtttggccaggaggatcaggatgaaggggagtcct

SEQ ID NO: 474188 - DNA, 1000 bp, Homo Sapiens; identical to SEQ ID NO: 343077

SEQ ID NO: 474189 - DNA, 1000 bp, Homo Sapiens
ttttttatcaatggattaaactatgagaccatttatttcttccctgccctgcagcgttcagtgggcttacgcacctccggctgccaccatgggctgccctgcagggaaggcctgtgtgaggcagacctttcaggccagaggaggctacaccacgggctcccgcagattctagcaggtgggggcatgagacttcaggtcataggagcagacatcgcagccgtccagcaggtctgcctgagagacgccattgaggctgggggcaaccagagctctggggttgtcctgcacgcctgtcctcgtgagtgtgtcctggagaagttctcggattcttcggttttccctgaaggtagattcccaaataacttcaagttcaccttccatttctctgttctgctgcagcgcctggtccagcacctcctgcttgtccttcagcacctggtgcaggtgccgcatctcctgccggtactgggctgtcttgccggcgaagtcctcctgctgctccagcagacggtgactgatgtcccccagcttcagtgctgcctgcttcttgtagcccttgactttttcctctaactttcccaggcgaatgttgctttttatgactttattaagcactccatccttctcactttctaaacattttgccaaacacataagactgtcacgttcctgggttatattttctgccaggccaacaaggtttgccaggtactgatgagcagacatttcgttccccatggctttttccacctgctttttgaggacctcaattttcttttgagatttcctattgattttctgtgctcgttcaagttcggcttccagtgctttgttttgctctgtcaaactgttcttctctaacagcaggctcttcttctgcgcttgcaggactgtcagcttctccatcaactcctccatctcagccctttctttctcttcttccttctgtaattggctttttaattcattcacaattgatttatgaacttccactgcgatt

SEQ ID NO: 474190 - DNA, 1000 bp, Homo Sapiens; identical to SEQ ID NO: 343078

SEQ ID NO: 474191 - DNA, 1000 bp, Homo Sapiens
ggccttccaatattatgaggttattttgaggatccagggaggtaacggatgtgaagagcgtgtggtgaactgtaaataatgactatcacatttagttctcccacaatccagtgaggagtagtcacttactcgaggtcacccagcgctggcaactgctggagctgggatttgaacccagctagcagtgtccatgctacaagagtggggccagccttggcacaggaggttgattgctgcagccagtgtttctagagttccagatatgaagtggtctcatgttctccttgggaggaggcccttggcttcccgaagtgctgggattacaggtgtgagccacagcactcagccaccagagcttttttcaaaccggagggagttgctcattcctggaggtgtttcagcaaactgaccatgtgtgggacataggacgtcgcttcatatgctgggtgaggagctagatagactaggattgtgattctctgaggtaaaaacccaatcactgtctccatctcaaattgcactctctcttggctggctctggagactgaggtgatggagcagaaccttgttgcttcagtactgccctttccttcttccacaacaggggaaagatgaaactgcggttctccacgaggaggcaagcaagcagcagccactgcagtcaggtgggtttagcagaagtctgtgctgggtcgggggagtttaggggacagcagaagatacataaccacttctgcccccttttttcccttatccccagagcaacagctggcccagttgacacaacagctggcccagacagagcagcacctgaacaacctgatggcccagctggaccccctttttgagcggtgaggagagcaatgattctgtgaatttttggggaatttgtggcaggagggaggaatggggacataggttgggagccactgagtggacatttcttcagtgtgactactctggctggagcccagcaggagcttctgaacatgaagctatg

SEQ ID NO: 474192 - DNA, 1000 bp, Homo Sapiens; identical to SEQ ID NO: 343080

SEQ ID NO: 474193 - DNA, 1000 bp, Homo Sapiens; identical to SEQ ID NO: 160483

SEQ ID NO: 474194 - DNA, 1000 bp, Homo Sapiens; identical to SEQ ID NO: 343082

SEQ ID NO: 474195 - DNA, 1000 bp, Homo Sapiens
ttttttttttttttttttggctaacggcaatgtcacgtttattacatttgcctggaagatttgggctgtggctaaatgtttttctacatatattacattcacattcccagttttcacaataacattgattgagtttccctgcagcatgaattctctggtttgaaccagcaccatattgataaaatttatagctgtttcccttcagtgtcaattatctcatgtggtgaaagttctgaattgtctgccagtatctgactgaatacacacatgctctaagacccagcgattccactcctaagtatatacacaagagaaatacatgtatgtacaccaagacaagtatgttctcagaagcatgatttattatgaccctaagctgtaaacaatgtaaaagtccatcaacagcagaatggataaattgtgatataatcatataattgaattctatactggataaaaataaataaacttctgccacacgtactaatgattagactcacggacatgatgaaggtaataagctgtatatgaaagaatacatgatatataatccaatttatagaaaggtttataatagtaaaaactaatttgtaatgttagaagtcagaatcatggtcaactgtgaggaggtaacaactaatttttattttgtatttgcaatgagaaatacagttcatacctccttcttttaaagaacctctactcactgtgtagtccatggaccacagtcagttggccaactagttattactgatgaacaaaaagatatgtatggaaatggaaaatgtgattttaaatgtttataacaccttgacagaggaagtttttgtctgctgaagctagtaataaaaaaaaagtttggacttcttaatgatttttgtcatctaatttgtctaataatatttgtgtgtgtgtgtgtgtgtgtgtgtgtgttttacaggctggcaaacagtaggttaccatgtggtatagtaccttaaactgttggatattacgcttg

SEQ ID NO: 474196 - DNA, 1000 bp, Homo Sapiens; identical to SEQ ID NO: 343083

SEQ ID NO: 474197 - DNA, 1000 bp, Homo Sapiens
ttttttttttttttttttttttcttgacattttggggcttttacttcaatttgaagcagatggttgagcacagacgtgaacagctttggccatttgagcacaaggaaggggcgggccttggctttgaacacgcaggccccatcctccacatactggcccagtcccctggtcccttccttctctgcccctgcacaccctgtaacagaccaccgccctccaagtggggcgccatcttgcccagtaggacggctccagccaacccagcctctactccttcctcaggccacgtgcaggctgaacaagagaaaaactctttttctgtccatggcagggcctgcccatggtgctggctgcctgggacgggggcccatgggggtgggtcacagtgaggagaggctggctggggaagcaaagacccataggtagctgccctggggcaagtccctggtgtaggggagggagtaatattgcttctctccctgcttactcccttctggtgatgcttagggcccaaggagcctggacccaagggacactgagaactggggccagtggcctgggcagccaatgaaggggagagagtgggcagggatctcaggtcccactcccagccccgcccaggcaccccagcctccctctcacagcccctaaggcttgtcttgcactcagccagcacaaggcccagtggagagagagcaccaggtcagagggccaagatgacccccaggggtcatcaaatgcccatccattccatgagttcctagcagaaccactgactcatctttggcttgagatggggctcaggcaacaggaggagcaaaagtcacagagcaacggtgtggcttttcgctgtggggtttcaccaccccatttccttcggtgtctctgtccaatctttggcaacgaatttctgcagctggacagtgggccttggggtctgagtgagtcgggggctgagctctcccctccccaccaggcagagggcaaagtgcgaagcagc

SEQ ID NO: 474198 - DNA, 1000 bp, Homo Sapiens
aaatagggatgacatttctccatgtttgtcaggccttggactctctacgtcaggtgatccatccacccacctcggcctcccaaagtgctgggattacaggtgtgagccactgcgcctgacccttgcaggtacttcttaaagctatggggttttcccagagcttggtagcatgtgtgttcaaagggctatcaatgttgagttgtcctagcaggcactggatagagagcaggatggtcctgatatcatacggggcagaccacttctccttcaggatgtccaggcatatgttaccctgggtgtccacgttagggtggtagcagggtgtgaggaacttcactgtgggtgcatcgtaaaggtgggtagtcattgaggaactccagcaagagcttatacctcagatcttcatacactgtgccagctgcttcatggatggtgtccatttgataaggctttcagggtaggcagaaattcttttgtcaccaggcatcatgagggtcatcagctcctgctgtagccttttggctacagggccccaggcagtgcccctgctgggctcagctcctttatgggcggtggcgacactaacagtggctgggtcaaagttttgtgaggctatctgggtggcactgtatttccagctactctggaggctgaggtgggcagagtgcttgagcccaggaagcagaggttgcaatgagccgagattgtgccacggtactctagcctgggagacagagcgagactctgtctcaaaacaaaaaaaatgcaaaacataaaccactgactcaaaagttataaccacttattaaaataataaacaatttcaaatactaaccatactccctcttggtaagatagaacagaaattcttggacactgatggtagatagatatacaaatgagcaataatttcattcttaagtcatagtttggcattgcttaaaaagttgtacattaggccaagcacagtaggtcacacctgagaagctgaggcaggcag

SEQ ID NO: 474199 - DNA, 1000 bp, Homo Sapiens
gtgttttcctttttcttctttctcttcgtttttaaaacaatatagtgcagactgcacttctcacagtagaatataatggtcaattttagtataaaaaaaacattctcagagatttgtaaatgcacttagtgcttgaccaggccttggagagagatacagtaccgcttccagagcgccagaggggccaggacttgaggacttcgtgaggggactcctgcctatctttccctgccttgatcgtgtgggacaggccttggagggtggtttgcaggaaaggagttggtctgggcctcccagttaaaaccaggagggtcccaagagatccctcgaagaaggcaaggatgggatctaagattgcaggcccactgttagcccctgtggtgcctttgtgcgaacaggaaaatgacgccccttcctcaagatgcagaaaattgtaataaatatacaagtttgggtgaaagtggtgtctccttggacaaggtgcccttgtgcagtgcacagcctgaacaactgtacccagcagccctataagatgtattggagggaagggggaatatggtagtccagggtttggagaatggggatgggggtgcaactctgtgttaggaaggaatggtgggggtaggggaaggaggaacagggggactggtatagtccctggagcctctatcagagtggtcttcacctggctggtggggagacactttgggcccagtgacttcctatcggcctcctgtaccccttttccagaatactggggagccagtgtggggagacacagctgcctgacccctgggggggctgccctgcccccaccctgactctggtgcgcctgtttcctcctgcaccccaccttggcctgggcccctgtcccaggaggcccagaaagaaccattcctgtttttgagtggtttctctctccctgcctctgccagcttagataaaggaaggcatgggcgtcagtggctgcccccaggccctcactgtgtcctggggcaac

SEQ ID NO: 474200 - DNA, 1000 bp, Homo Sapiens; identical to SEQ ID NO: 343084

SEQ ID NO: 474201 - DNA, 1000 bp, Homo Sapiens; identical to SEQ ID NO: 343086

SEQ ID NO: 474202 - DNA, 1000 bp, Homo Sapiens; identical to SEQ ID NO: 343087

SEQ ID NO: 474203 - DNA, 1000 bp, Homo Sapiens; identical to SEQ ID NO: 160485

SEQ ID NO: 474204 - DNA, 1000 bp, Homo Sapiens
catataagaaatggctttattagaaaaaatgtagtgtacatgtggctaatttccatcatcgatatacctcttggctattttatcattaaaattggatacagggtttgaacttctttagaagttagtggcatatcttcctattctgatatgtgacttagggaaggcgttatcttcatatgatagacaccctttatttcttttcataattacaagtaatcagtagtttagcactggcacaaaacagagagagaattacttaggtagtgctttatgtgtaagaagtcacacttccaaccccagaagcaggcacaggtatgccatctgtagagttttaaaatcccctattatcactcaagtctcccattattattacctagtagtaattaaattaatgtgataatctgtaacctaacaaaacctctgaatgaagtttctttcttctccctcttttcctgttagatgtgcaattctgagcaaatgtgcagtgtgcagtattgatttccagcctccttttaaactccttcaagtctgtgctattaaacggagacaaccacatcaagatagagtctgtcataggattccctgaagcacagaatgaggaggagactgagcaaacacgacccgggaaggcaccagttgaaccaagacaactctgtatgataaaatgtgagaaaaaataaaagtactcccataaacatattacttaaaaaagtgacaactccacaagtaattccttctggaactgggtagacagtttccacaaaaagctcaaaaaatataggcacgctgctattcaagaacactcccaggagaatacaggaggcatacaatgtcactgtggttaaaggtaggtgtgtgatgctgttcaaacaggtcagggtgaaccacgtggatgacagtgtagctcccgaaaacaggaggagaagaattagtttcagcatacccctgataaaatctgcaaaccttgccatagctattccaacaacacagcctccaacta

SEQ ID NO: 474205 - DNA, 1000 bp, Homo Sapiens; identical to SEQ ID NO: 343090

SEQ ID NO: 474206 - DNA, 1000 bp, Homo Sapiens; identical to SEQ ID NO: 343091

SEQ ID NO: 474207 - DNA, 1000 bp, Homo Sapiens; identical to SEQ ID NO: 343092

SEQ ID NO: 474208 - DNA, 1000 bp, Homo Sapiens; identical to SEQ ID NO: 343093

SEQ ID NO: 474209 - DNA, 1000 bp, Homo Sapiens
ttttttttttttttttttttcccaatgaatcaacatactttattagacccactaagtgccaggggaggggcctgtgccctagagccaggttacagggctcacccgtagattcagtctggtctctccccatcatgcctctcacttccagtctgggcttctaataggagggccccgacttcttccctcccagtcattctctcgaatggagaatctttcctcattccagggacaccaaggctcaggaaggggcctatccatcatcagtagagccagacaagctctcccatcggacgtcctgtggctgggcccagaaatgggtgccgctgcctgtgggactgcccttccgggaggaccagggtgtcttcagtgctcttggcctgcacgtggaggagagtaggcagatgtcttggtgctctttaagctcaaaggcatcatggccctctcggaagcagcgggcacagaagaggtccccatcgcagccagcgcagcgtagggtggcatcctcattgcagatgcagcaccaggggagctcctcttcctcagcctcaggcctggggtccacatcctgggcctcaggctctgccccgcggggttgcgtccagggtcgagaagcctgctctgcagggatgttaaagccacttgcctcatccagggaagcttcttcagtgagctgctgcaggactctttggatggctgtctcctcatcctcgtcgtcatcactgtctgggaggcgatagtcctggagggtcactctctcggggtcctgtccccgcagcatggctagtcgcttggccagggccagaatccgttcctgcctcgtgttctcctcccgcaactcaagtgctgcctcagccagcagtctgctcttctcctcctccaaggaccagttggcctgcctcttggaattagtgctccctgggccaccctggttgagatcattctggagagaggcagctgggcctcctcctttccagctttcatcgatagccacctcagctgc

SEQ ID NO: 474210 - DNA, 1000 bp, Homo Sapiens; identical to SEQ ID NO: 343098

SEQ ID NO: 474211 - DNA, 1000 bp, Homo Sapiens; identical to SEQ ID NO: 160487

SEQ ID NO: 474212 - DNA, 1000 bp, Homo Sapiens
tttttttttttttttgaagacattaatcaaatttttaatgtaccaatttattgcatatgtcagtacagaaaaatagaaagtatattttaaaagaaatttattgtaaaaaacaaatgtaaatgtttgcttgccatggttagcacacaatgtactatgacattcaaatttgagttataaaattttatcacttcaaataaaatatggcaaataacaaaaatatgatttacattatgaaatgggattaacttattttatactgaacatacttgaatatgttaaaaacaacttgaattttccatatacgctgtactgacagaaataattataaattatgttaaacacacactcacctgttacatatgtatatacggcactttttgtaaaaaagtgtctcatacatggtcctatttttaaactacattttaagatacaaaatataaatggaggtatatttgcgccatttggcaaaaatgtatagactagtattaagatgactgcatttatcttgccatacaaatgaatatattatttccaatttgctaaaactatgtgtgtatatatatatatagtattaagaataaacagaagtacatttcattttctaccctatcaatttaaaaaataaatgtctgtgctctgtcatttccatctttacctgagtaatatgaaaatacctaaatttaagtggataacccaaaagggttatgactaatttttcctctcacagtttttaaaaatacatataattatcaaacataataggaaaatgggaaagaagaatgagtggaagagttcagtatctcaatcatgacttaattaaaaagtgacttctgtgacatcctttttacaagtttaccttacctatccctatcctcaaggagaaaagggtctccttaatataaactgctcttaagctatctgagcttgaaagataatttataaaaaatgaaatatggccttcactctttaatttctccacacctattcccacaaagccaaa

SEQ ID NO: 474213 - DNA, 1000 bp, Homo Sapiens; identical to SEQ ID NO: 343100

SEQ ID NO: 474214 - DNA, 1000 bp, Homo Sapiens; identical to SEQ ID NO: 160488

SEQ ID NO: 474215 - DNA, 1000 bp, Homo Sapiens; identical to SEQ ID NO: 343103

SEQ ID NO: 474216 - DNA, 1000 bp, Homo Sapiens; identical to SEQ ID NO: 343104

SEQ ID NO: 474217 - DNA, 1000 bp, Homo Sapiens; identical to SEQ ID NO: 343105

SEQ ID NO: 474218 - DNA, 1000 bp, Homo Sapiens; identical to SEQ ID NO: 160489

SEQ ID NO: 474219 - DNA, 1000 bp, Homo Sapiens; identical to SEQ ID NO: 343107

SEQ ID NO: 474220 - DNA, 1000 bp, Homo Sapiens; identical to SEQ ID NO: 344093

SEQ ID NO: 474221 - DNA, 1000 bp, Homo Sapiens; identical to SEQ ID NO: 160490

SEQ ID NO: 474222 - DNA, 1000 bp, Homo Sapiens; identical to SEQ ID NO: 343109

SEQ ID NO: 474223 - DNA, 1000 bp, Homo Sapiens; identical to SEQ ID NO: 160491

SEQ ID NO: 474224 - DNA, 869 bp, Homo Sapiens; identical to SEQ ID NO: 343113

SEQ ID NO: 474225 - DNA, 1000 bp, Homo Sapiens; identical to SEQ ID NO: 160494

SEQ ID NO: 474226 - DNA, 1000 bp, Homo Sapiens
ttttttttttttttttttcagcttttcagaagttttattataaagagatttgagagaagcactgggcaccaagacagacactcgccagggccaggaaacagctgcaaacgacgtcaagaacccaaacccaaacgaaaccccaaaaccacacacacggtaggataagctgtaacttcgttctcaaggtttcttcataaatagacaaaagtcgtcgccggcaatttaaaatagatgaatacatgattaaaaggagagcagtgctccggggtggctagcaagcgtccggtccttgctgtgaggatgacgaaacggtttggcagccgcttttgtgcgcgtctcccttaagataaaacttaaaaatgtgctaaggatcatataaaatgctttttaccttaaaggaaactacttttttcccccacaaaatagtcttacagatgtcttcagcacagttctaaaacacgtagtcaactacttacacggaaccaacagtttctaggtttcgtaatcttttgttcacactggaaaaccgatgtgcacatctatgccgggggccggccctctggcccatgcatctggggtgggtgtccgttggtaagcgaccccgccaggggcggcccacctgggctggggctggagctggggccgggtgtccagacatagggtaccgtgcgcagggcgaggacagggtccacagttaccctggagcaagcaggtcagcgggcggaaggttcctgcaggttctttgggctggtggtgggcagtgggctgcctctgcagagtctggtgggaggttgaggaagagactcagcccccgggcaatgggtgtgtcactgctctctccgatgggccaccctgcctctggccagggcctcttttctgctgtcagcccttcaggctctgagcagtgccttccagcgagcctcagggatggtagggaggcgggattaggtgaggtagagcgatttgtccctggggagcaggctgcaggtgctgatgccac

SEQ ID NO: 474227 - DNA, 1000 bp, Homo Sapiens
ttttttttttttttttttttttttttttttcaagtagctcatacttttatcataaaatacaaactttctaaaattaagtgtcttacttctattttaccaacaaaaacaaaaacaaaaatcactcatgttagctaaatacagaagcataagtggttgagcaagcaagtatgaatatgagggtcatgtgtgtgtgtgtgtgtgtagcttgtgccatgtgtgaggagggctatttttgtgtcagtgttggccaatagatgaatctggtcttgctgttttgtctgtgacctggtcagaactttgcttttccaaacttcataccaagcttttgcagaatccaaaaatcagagcccctagtcctgatccaagggctaagggaggagaagggagaagaggagatctaaaagtttatgccattcccactggaagaaaaataggggctgtgcatcaagggccctccggatgtcgagccgaacccatatccttggggaaagaggtactgcggtccatctcctgccattaggggagggtctcgggggttggcagacatctttggaggtgtcctctgagggtagggataattgggctggacaaaagggatgtagctcagcagaggggtgtaggaagagcggaagatctgctgtcccatctgctgtgggttgtatggcatcacctgttgggagtaacatcccagctgcgggtgcaaagcctgctgatagggcatcctcgctgcctgctgtgggtacaggccctgatactgcaagaaggtagagtgattcgtgaacactggtggaggtggatagttcaggttgagccagagtggctggttcagggttgctgaggtcatggctgtaggaaagtgtggagtgaaaacattccctgtgtacttcgggttgttcttgtcagcaaccgtcacaggtgcgttaaatttcagctccggcccatccacttccactttgtttcgaagtctcggctgcccgcttgggttcttggtggccccaag

SEQ ID NO: 474228 - DNA, 1000 bp, Homo Sapiens; identical to SEQ ID NO: 160495

SEQ ID NO: 474229 - DNA, 1000 bp, Homo Sapiens; identical to SEQ ID NO: 160496

SEQ ID NO: 474230 - DNA, 1000 bp, Homo Sapiens
atcatttaaaagtgtttattttctaaatgggagtaacacagagggaacttttggcaccttctttccagtccatcacccccatcatgtcctcccaaacacaaagcaatggcaggagaaaccacaggacagtcacaaagtcagtcacagagagatctgcacaatcccggatagctggaattcaagagtctgtcccagctatcttgtcctggagtggggttacagctcaggggcatagggctcctcagtaggtgaaggtacccgcagctcagcatcatgccttaccacggtgaagagtcccaccactgccagcagagccatcaccatgacagcagagcaaatgctgaacatattccgagtgcctgtttttcgatcactgtcatggaggacaaggagccctaggcaagccagtgagtgcagaggtacccggaaccagttgagtacaccagcctgctctgtctcagggatcacctttctccgtaggaagctcatgctgggaaagtataatccacaagccaactcaataagtagaaaggctatgaaggactccaccggactctcctggcctgggctggtagagaaagtcaacatgaagagagagaagacgacgatgagcacagcaagggacagcaggtgcatgggctgaaggtggtacctcttggaggtggcgatacggtacagggaagagccaagcaggctggctgccatgaagctggagaagataatgcccagaggggccccgtgtgggtccagcacaggtgtccagaggaagacaaagatgaagatgacactctcaaatagagcttgtatggtgcccagcagcagcacgcggcggtccgacaggaggcagcgcaggcctccagcacaggtccttgagaaggcacgctgccggtcatagttctccccccagtttcgaagggccaaggcccctgccagagccaggagagggatggcagccacaaagggcgctacaggccccagccctatccagctggctacagcc

SEQ ID NO: 474231 - DNA, 1000 bp, Homo Sapiens; identical to SEQ ID NO: 343118

SEQ ID NO: 474232 - DNA, 1000 bp, Homo Sapiens; identical to SEQ ID NO: 343119

SEQ ID NO: 474233 - DNA, 1000 bp, Homo Sapiens; identical to SEQ ID NO: 343120

SEQ ID NO: 474234 - DNA, 1000 bp, Homo Sapiens; identical to SEQ ID NO: 160497

SEQ ID NO: 474235 - DNA, 1000 bp, Homo Sapiens; identical to SEQ ID NO: 343121

SEQ ID NO: 474236 - DNA, 1000 bp, Homo Sapiens; identical to SEQ ID NO: 160500

SEQ ID NO: 474237 - DNA, 1000 bp, Homo Sapiens; identical to SEQ ID NO: 343126

SEQ ID NO: 474238 - DNA, 1000 bp, Homo Sapiens; identical to SEQ ID NO: 343127

SEQ ID NO: 474239 - DNA, 1000 bp, Homo Sapiens; identical to SEQ ID NO: 160501

SEQ ID NO: 474240 - DNA, 1000 bp, Homo Sapiens
ttttttttttttttttttttttttttttttgcggttctgcaaactttttttaattttaattttatttttttacaatgtaccatgaacatcttttccatgcacatgggtgaaaatcctctactaaaatatagagcgccgtagttgggtcaaaaggctgctggtaacgagactgacatctaaagcaaagtatcagcttaaggttaaagcattgggcctggcaaatacctaccagggaaagcagggccagcaatattctcatcagagaaatcagaatggaaggccaaaggcattaaaggtatgggatatcgtgtaagcccctctggcccctacctccacccctcactcccctgacaccccgttgtccccttggggcgaatggatcctgtacatctctttgcatccaatgaaaaccacccattttctgttttttccttagctcctcttgagcccttgacacatctccacattctctcatcatctcctcactgctcagatgcctttcctgtaagtcctcctgagagtccttgggggaatcgtccgtccccctgtccgtttttctttttgctttccggggcacataatcttcagccgggcgcttttcggcggcccgcggctggctctctggctttgcctgggaggctggcttgccctcgccttgtggcttgccctcaccttcggacctgccctgcttttcctggcttccctcatcttccagttgtccctcatcacctggctctccctcatcctctctctttccctcgcattctgtcttcccctccacgtctggcttttcttcctcgtctgactttccttcatcatcaggctctacttcatcttctggctttccctcgttttccaggtttccttcatttttattgtagggtttttccatgtcgagatttcccctccttttcctgtcctgcagggattctggacaggttgctcctcctttttaggcctcgcagagcgctgggaacagacgcgcagacctgccgggacc

SEQ ID NO: 474241 - DNA, 1000 bp, Homo Sapiens; identical to SEQ ID NO: 160503

SEQ ID NO: 474242 - DNA, 1000 bp, Homo Sapiens; identical to SEQ ID NO: 160504

SEQ ID NO: 474243 - DNA, 1000 bp, Homo Sapiens; identical to SEQ ID NO: 160505

SEQ ID NO: 474244 - DNA, 1000 bp, Homo Sapiens; identical to SEQ ID NO: 160506

SEQ ID NO: 474245 - DNA, 1000 bp, Homo Sapiens
tttttagatgtttagaattcctaaaatattttatttaaaatgagaagtcacgctaattttctaatacaatttaaatcaaatgataatttattctaagggtttttacaaaatacgaaaattttacatacataagaagaacagtataactgagcaacttacattctaattaaaactttgttgcaaaacatgtttgtgactactcttatgctgctttcatatagtaaagttataagaaaaacaatcatatatatgcagggttttaaaaaaataaactcataaaaatacaggcttgagacctattttagaattaagtcaaaacaagccaacaactgaattgtacctatggccagtgggtggcactaaaatacatttgaggcttgttttaactgtttgttttctcaaggcagaaaaacaccagtagtttcagtctcattgccctaatatggaattccatattttattagagattacagagtaaatagtttcttaaggtccatttttttttttatcatcactgatgtctgtctccattccctgctccactttgagtatctttctgcgactttttcccacaacctacaaaggtcctgcaagggtaccagaccctcttaactgtggcacagaattgtggtgtgaaacacatgatggcaaacaagaacattttgcttcttaacaataccccatgtttaatgctctggggcagctttttctttgaagcagcagcagaaattcaattttcctagcttgttcaaatatcttatttaatattagagtcacaaattacacattttgttatatttaaatcccttgggccttgtaatcaaagaagcacatgcagattgacttttacatgctgtgtagtattccttaggtgcaatagatagaaagtgaggatatttgtccacctactcagattttcaagatcagattccaccggtttagtagttttcagtggaggagccagtggaatttgggctcatttggaaatcttggcaatcaa

SEQ ID NO: 474246 - DNA, 1000 bp, Homo Sapiens; identical to SEQ ID NO: 343132

SEQ ID NO: 474247 - DNA, 1000 bp, Homo Sapiens
tttttttttttttttaaccagcagacagtttttgcttttattggtcaagaattctttacaaaacccacacacacacatccacacacacacacacacatgatgcctgccctgctgtggtcactctggccctggtgtctcctgggatcaggccctcctggcctctcccaggggaaaccatcctgcagcccctctgggtcagcagtgaaggagcagagagagggaacctccttttctgcttctctgctcaggaacagaggtctgtgccccacctgtcggggagcaagtggaggtgacagataaacagcatcctcctctttccaccgttgagcccccggagttgccagcctaggcccccaatgtcacagctgccaaggcctgggggtcatctgctgattgaaccttccccatccccattttgcagattgaaacacagcggtccaaagacagcggacgagtcacccaaggtcacggtgctggagcacagtggcagagcagggacggggactctgctcttcttgacctccaggaggtggcaagtgtgaaacctggaccctgctccaccccccagggaagggcagagccagggcctggggcaggaagggagtgcccagagatgatccctggagcccgtgcccagggaaagcagcccccagggcagctgagtgagcagcagggtctggccaggactataaaggtttgccaagggtgccctctgtgactgcccgtgtggcttgctcagggatgcggcccgggtcggtcaggatactggtagatgtgcccagctggcgtagggagttcaggacagttggccggagagcgggcagagagcagtactggtccagccaggccagtgaggtctggcggagggtgtgcacacttgccgtggacaccatcccgttgaaggactcaaacagaggccggatgaggatgctgaacacccagaacttccagttgtgcagcgtacgggttcggacgtagtcatcaaacatgtctcgcatct

SEQ ID NO: 474248 - DNA, 1000 bp, Homo Sapiens; identical to SEQ ID NO: 343133

SEQ ID NO: 474249 - DNA, 1000 bp, Homo Sapiens; identical to SEQ ID NO: 343135

SEQ ID NO: 474250 - DNA, 1000 bp, Homo Sapiens; identical to SEQ ID NO: 343136

SEQ ID NO: 474251 - DNA, 1000 bp, Homo Sapiens
tttttttttttttttttttgcgtcttactaaatttaataattaatattgttgacataaaagtaaaaggcaagcttaacttttgaaggctgactcatgaagaattttttcattaatcaaacactgactacatttaagctataaaatttttacatggaatactgaaacaataatgtaccatgattctatctctaaatttattttaaatttagagctttcatattttatagttattctttaccagttcagatgtttctatatctctatatattcatatagaattatagattttatattcatgtgtaattaagtcacaaaactatgtaaaataaaattctgtgtgagtgatatgactgatgacttcttaaaatagtaatcttcaattacatattttacaccacaaaatgtacagacacccagtttttttctaacaacaaatacaggtgaatttatcgattctttataaaagctttaagtgattctaaattcaaagtcatagaaatagaatcagacttatgcagattgttagatagtttgatagtacatagtcagtgctctgtctgataacatcaatagctacatctttggcattgaaaattcaatatgagtttttgacaaaattttgtagcttagagcatcattttcttttaaacaaggaaaaacacggttgagtaagatatggaaattgggagaaaactattaatgattttttcttagtaagtttgtctttgggaccctgaattaccttttattttattgtatgatgtggactgtatgcatccatttaaaaaccaactgagttgtaccacattttaggaaaattatataatataatatatatattttatatttatttagaagctttgaaatagtacagtaaacactttgcaacacggtgtataaactacagaatgtctttgatattttgtgggtcttcagaatacaacattttttataacccacaggtgaaaagaacataatcacaatttctcttgtaaagtt

SEQ ID NO: 474252 - DNA, 1000 bp, Homo Sapiens; identical to SEQ ID NO: 160508

SEQ ID NO: 474253 - DNA, 955 bp, Homo Sapiens
aaaaaattgaatactctttattagatgcattactttcattaccagacacaacaatatatatattttttaagtatttcagaccaagaaactcacaggaggtgttggaggtgggtggctggcctcttttgtctctttattattatattgagtagggcttcagctttttcatgcaatcctgaactcccggaccactgggtttggcacagacttgccgccccttcttggtgaggaatatgacacctggcttggagcactcgctgctcgtttcaaaataacttttcatgagtgaacacgggatgctttgtgagatgtaggaggtgcagcagtcagcagcaaagtgaaagctgttcagaactactggattttccagtggaagctttgacatcattaactctgtctctgcatcatttatgaactgggcctgggatccaaggacagcaacaagcatgaggcaggagagggcagccacggagaccttcatcctcctggtgggcaggcagggctggccgaggactcctgggctcactgcttcctggctccccgggataccagctctgcccttgtatttataagaagaggaggatccaggaagtcccagggcagaggtcagaatgctcttctttagctatataatagttaccatgcagtttctaaaaagagaacaaggctgagagtgcaacagaaagtagaggacaaagatgacttgaactgtccctgtggatttcccgaattatcccaatagctacaggcagataaaaaaaaatgtttcaaggaagagtcttccctccaggagattaatctaatcctctaagcctgagataggagtgggggactatcttagactcttggattcaggattgggatgtggtgaatgctgccttttttccctttccagttctattcctgtagttccaaccaggaggtgttagcagtggtgaatccatatcagtctgca

SEQ ID NO: 474254 - DNA, 1000 bp, Homo Sapiens
tttttttttttttttttttttttgaagacatcttcttggtttttattttgaaacaatttttaggcttgttccgggggtctctgtgctgcctgtactgtattgacctgttttataggtgcctttttattaaaaagaaaattcaaaatccagcctcttgcctctttgcatctgcttcagactcccccatcgattacccagcttgcgaggagatactcagagaaaaaagggacgtcttagggcttcctcgttgtcctgccgtgaagacactctcacgtgagccacagctgttatttccccagtggggcctcccaaggagcttggctgcttggcttgagtgggacaagggcaggggtccctgactccccacctgatcaaaggctggggaggtggtagggagcacccagaactgccggacgggcctcccacaccccaggtgagcaaacaagcacggagcagcttcctgcggttccatctgagtgacatcctcacgggggcagggcacggcttcctggggcctggggacttccctgcctcagtgtgtttcttacacttccctgcctaaggtgatgccacggaggggatggttgagatgactcccacgggccccttccagtccacctttctccgttccgactctgagtttcctcgggtctatagcttatgggaagggagtgaggaggggacaagccagcctccttccccatcaatgcccacaacctcccatcccctggacccagccaccctaggagttctccaccccaccccatctcgcctggcggaggggaccgccgggtttgattgatccatctccctccttggggttcgggaagaaagctcttttcttccctctgtcgggtttctttcttgcttctcggccttcacgcttcctcaggtcactggctggcctccaagggcacctagagtcagccctgcctgcagaccacccaggatccggtgacatggggtggacccagcgctgtttcggtcagagccaggggca

SEQ ID NO: 474255 - DNA, 1000 bp, Homo Sapiens; identical to SEQ ID NO: 343138

SEQ ID NO: 474256 - DNA, 1000 bp, Homo Sapiens; identical to SEQ ID NO: 343139

SEQ ID NO: 474257 - DNA, 1000 bp, Homo Sapiens; identical to SEQ ID NO: 343140

SEQ ID NO: 474258 - DNA, 1000 bp, Homo Sapiens; identical to SEQ ID NO: 343141

SEQ ID NO: 474259 - DNA, 1000 bp, Homo Sapiens; identical to SEQ ID NO: 343142

SEQ ID NO: 474260 - DNA, 1000 bp, Homo Sapiens
gggggactgtcttctgttaaaatttgactttaatttagtaaagtaatttttttcacaaaatacaaaataatgtaatacattatctttattgtctgacattacagattgattttacactttccttttttacagaccatgggaatgaagggtaaaaatgtgtccagcattttccaaacattctttgttacacacaaacacacataatgaataatagaaaagagcatacagaagaaatgaaagatacgttgaaattggacaggttgtggttctaattgatccatggaaataatgtgaaacttttaaataatgctagtgagtgggatatattgtcatacatagcgtggtacatgcacttgaaattaaagctgcttttattttgcttctatttaatttaatttaatttaatttaatttgtttttttttttgagtttgctgctccccctgctggctcttgagcctgaccacaggttcagacagctccagtttaggctataaagtcacaatgcccctatttccagaaaaaaaaaaaagtatgtaatgaccctctcgtctcccggagccgaaaggctctggtgctaaggaaaaagctgagagttactttttaaaaagagattactgtcaaccaacagtaaggattctgctttggggaagagccaaaaagatgggacgtgaatagtcagttatggagtacagtctttctctcacaaaattgagcacattttggtgagccatggggaacaaggctcaataattgtgtgatgaaaagggatttaattgcctgatttttataaaaagaggtttcacaggttttcagtaaaatgaaaccgaactgaatactcacagtgtgagtgggtgtagaggttagcttctgagtgctgtgggttttgggatgacatgaacctcagggtatctctagtgactgtggtatctctctgttaagagaagggtctgatcaacaacttgaaaagctaagactggtttgaaacttatacctctgggg

SEQ ID NO: 474261 - DNA, 1000 bp, Homo Sapiens; identical to SEQ ID NO: 336468

SEQ ID NO: 474262 - DNA, 1000 bp, Homo Sapiens; identical to SEQ ID NO: 474260

SEQ ID NO: 474263 - DNA, 1000 bp, Homo Sapiens; identical to SEQ ID NO: 343144

SEQ ID NO: 474264 - DNA, 1000 bp, Homo Sapiens
tttttttttttttttttaattttaagtttgaatgtatattttgaaataaaaatggaaaataacaaatttgtacaaaattgtcacatagaaacacactttaagataccattacatgctatgtgtatttacaaaagttacaggtctagtaagaaaaaagaaactgtcattgacaaatgcgagctcattttttgagcaacaagaaatctcccgtgaaatgtcatactgacagccagtgagacttggtgcagtgacggctccgcacctgctgaggcctggagcctgcctcccgggctgagggctcagctctggcctccggctggatgccgtctagagtcctatgtgctcataggtctttttctttcagtaaacagtataaaacattactattttcctttgattgtaaacttcaacagaaaataacatacttaagaattttgctacaaagagtactatgatttttattgcctcaccacctttagaacatttccacttcacaagtttctgatttgcttcactttcttacttggcgatggcgccctggcagcatcatccacacataccagtgcgtatggagaaatgggctgtaggcccttcctgcgtggtccatggctctgccttcatggaacaggctgagtcatgtctctgctcaggctcaaaccatctactctcaagttacaggcagctcagcccattcatttattgctttccttatattccactgtttattatttaagttgtattttcatatgttcctatagaatttattcacattacctggctaataatcaacagtttggggtttttatataatagctcttcagatatattgctggtatatgaagctcaactgatatgcatagggacaaatcagaagatatttatgctggtagatccaggggcattgtagcaccttacagttaaaactccacccctctatgaatgttaagttttagccttaaaagtcaagttagtttgctcacactttctctcacataaaata

SEQ ID NO: 474265 - DNA, 1000 bp, Homo Sapiens; identical to SEQ ID NO: 474247

SEQ ID NO: 474266 - DNA, 1000 bp, Homo Sapiens; identical to SEQ ID NO: 160511

SEQ ID NO: 474267 - DNA, 1000 bp, Homo Sapiens; identical to SEQ ID NO: 343146

SEQ ID NO: 474268 - DNA, 1000 bp, Homo Sapiens
tttttttttttttttttttttttttggtcgctgagaatatttattcaaaaacagggattgaaaaaactgtacagagtgtctgctgctgagaactgggcccctgccccatgccactcccccagctacctggcagtgccccctctttggggtgccccctgacaagcccagccagttcattccagtcaaaagggtatcagtggaagcagcaagaaatctgcaggtggtggggagagaagcctggccccagctacccaacgggccctcctccctgactcccacaaggatgcagtaggccaggaagccctaagggatggggagtgcgtgagtgacacccgccatggtgggggcactagggagtctcctggctgctccctgtatccaagcacagagctgaggaggtagggccccctgccctggggctgccgcagctcagacccctgggccagaaactgcccccactctgagagaaagaactcccatagatggaggcagggtagggggtgcatccatgcgtctgggcgttagcggcgtttgggaccccagggtggagtctccttgggcgggtagggtgcagaggcagccccctgctggtggtcctgcctgcccctgcctgtacctcagctggcctcagtagggggagaatttctgccgctcagccttcttgctcccattagctgctgccatcttggcagtgtaggccgccaagcccggcggcggccctggggaagcaggtggtaaagccaagaagggcatgggcttgaggccgatgaagttggagagggagatggcatagggtgtgcccagcaggccagggggagctgtgggcagggccgtcaggggtggcgagaagggggcaggcaggtctgcgggggccgagctgggcgtccccccagaggtagacttggccgtctctagacaggcagtgatgaggtactgggccagggcgatggagaccggagagccagtgatggtgacatgccgctccccagcgccctctgct

SEQ ID NO: 474269 - DNA, 1000 bp, Homo Sapiens
tggtcgctgagaatatttattcaaaaacagggattgaaaaaactgtacagagtgtctgctgctgagaactgggcccctgccccatgccactcccccagctacctggcagtgccccctctttggggtgccccctgacaagcccagccagttcattccagtcaaaagggtatcagtggaagcagcaagaaatctgcaggtggtggggagagaagcctggccccagctacccaacgggccctcctccctgactcccacaaggatgcagtaggccaggaagccctaagggatggggagtgcgtgagtgacacccgccatggtgggggcactagggagtctcctggctgctccctgtatccaagcacagagctgaggaggtagggccccctgccctggggctgccgcagctcagacccctgggccagaaactgcccccactctgagagaaagaactcccatagatggaggcagggtagggggtgcatccatgcgtctgggcgttagcggcgtttgggaccccagggtggagtctccttgggcgggtagggtgcagaggcagccccctgctggtggtcctgcctgcccctgcctgtacctcagctggcctcagtagggggagaatttctgccgctcagccttcttgctcccattagctgctgccatcttggcagtgtaggccgccaagcccggcggcggccctggggaagcaggtggtaaagccaagaagggcatgggcttgaggccgatgaagttggagagggagatggcatagggtgtgcccagcaggccagggggagctgtgggcagggccgtcaggggtggcgagaagggggcaggcaggtctgcgggggccgagctgggcgtccccccagaggtagacttggccgtctctagacaggcagtgatgaggtactgggccagggcgatggagaccggagagccagtgatggtgacatgccgctccccagcgccctctgcttggttcccgatcttgatatgtgcc

SEQ ID NO: 474270 - DNA, 1000 bp, Homo Sapiens
ttttttttttttttttttttttcaggttttcatataaatttatttttgtaccaaaaaattaacattcaaaggcaatgtttttattgtacagtataagataacatttactaaattaaaattggacttttttgctgataaaccactaataacttttctattttgaaaaaacaaaaaaggtacaatttgcggcacttgtggaaaaacacctgttcaacaattatataactactcttgacagatttcagtggcccattatgtatcctttttggcaatgtcagctttctaaagtcaattagtttctaaatttgaaaggcacctggtggccaacatcctgcttattattcaaggcatccattttaatttttttgcacaggcttgacaagtctgaaaaaatctattaacttaaaaagaacgaagaaatatactgcatttgatattaggaaacaacatttttttcccctccttagctgcaagttttccccagggaatttacaaagtgcaccagttaaatatgtctgtacatttaaaacattaaatatgtcaacagcaagacatttttaaatattttgaatcaaatactatagcacaaatataatttacaatactttgcaaagaaaacattacatctgaaatataactttagatattatataaaaatacatatattttctctcctcattagaaaaagtattttttgcaggttccagcatgatgtaacaattcaaaagaatttgccccttcagatgatccttcaattgcgctagatgacaccctctccacttcagctgcgaaggggcacatgaccagggaccaacccctcccatagcccacatgcagtttctcataaggtcaacccgtaattgctccaatctggtttaattctaggaattcattacaaaatttaaaaaccattgtgtaacacaccatgagtctaacatctcccactggctgtaaatacgcgtgttctctacaaggtcaagagcatggatactgagtcgtg

SEQ ID NO: 474271 - DNA, 1000 bp, Homo Sapiens; identical to SEQ ID NO: 343147

SEQ ID NO: 474272 - DNA, 1000 bp, Homo Sapiens; identical to SEQ ID NO: 343148

SEQ ID NO: 474273 - DNA, 1000 bp, Homo Sapiens; identical to SEQ ID NO: 343149

SEQ ID NO: 474274 - DNA, 1000 bp, Homo Sapiens; identical to SEQ ID NO: 160513

SEQ ID NO: 474275 - DNA, 1000 bp, Homo Sapiens; identical to SEQ ID NO: 160514

SEQ ID NO: 474276 - DNA, 1000 bp, Homo Sapiens; identical to SEQ ID NO: 343152

SEQ ID NO: 474277 - DNA, 1000 bp, Homo Sapiens; identical to SEQ ID NO: 343153

SEQ ID NO: 474278 - DNA, 1000 bp, Homo Sapiens; identical to SEQ ID NO: 343154

SEQ ID NO: 474279 - DNA, 1000 bp, Homo Sapiens
gaaaaaccaaccaaacaaaaatcccaacccaagaactcttggttctgggagactgggagcagcttaggtctgtggggagggtagaacctggaagacagaaaagtatagggagcctcaagccctgggagggagagcaagagcagcctttccctagggctgagcctctctccatggggcctgggcttatccacttggaaaagacaggttgtgggggctcagcccccagaaaaaggcagggtgagcagttctggacagccctcaggcctcttgtcaaaatcaccaaccagctgggaaggagagggtggcccagcgctggatccagcctatcagcgccgtgcccgaaggcaaggttcagcccacgatcgggagcgggggctcagatagggaggcgtaccccaaagttcagcgagggactcaagcccattgaaaagaaagggctctcatgggggcaggacatggaggcagcccctggctggactcctgggagggcagggcaggacccatactcctggaggcctgcggagctcagggaccttgagggccgcgaggcagcactcggatgggccgaggcgggggattgtccaggacgggctcgggccgagcccgcgcaccgccccggcgcttctgcttgcgcaacaggtagttcgagtactggacctcgggcatggccagcttgaggcaggcctcggtggccgggccggcgccgccgccgggcaggtcatagcccataatgtccaccttgcggctgggctgccatggctgcagctgcttggtgcggatctgcgcggcaggccgcagcagtggctcgtccccgaagcagcgccgcagtaggcgctggcgggcctcgcgcagctcgcgcgcctcgcgctccacgcacgcgcggcccgcgcgcgccacgtggcgccagaaggtggcgttgaagtggtcgtagaggccggcgtccagggcgttccaggtgcgcgccgcccgcgccagcgccgcggggatggcggccaggcgc

SEQ ID NO: 474280 - DNA, 1000 bp, Homo Sapiens; identical to SEQ ID NO: 160515

SEQ ID NO: 474281 - DNA, 1000 bp, Homo Sapiens
gtgagcttggcaagtttattgaaaacccaggaacacaaagagtagtgcacacaggcagcccaccccacccaacccccaggcctccttggagcttgcagacacaaccctgcagtggacagggctgggcctcacaccacgagcaggggcaggagtacggggatcattgcaaagcccgcctgtccgcctgcaccccacctcgtggacttgcatgctggagttacaccaacaacccaggaagagaaacagccggagagaagccactgggagaaaagccatctcggggtttagggagaggagtgatccaaaggacagaaattgggaggcagggagaagccagcttagctggaactgctaatggagcatctacatggcagaaaaatcctccaagaggacatggggccaggcagaataatcgggggagtgctaaggggtggcttcctggcagaaaggggagctggagaccgtcaagcccagagcccacgaaccctgggggcagaagcaggagccgtggagctggttcttctctgggcagcagctgtctggggctgggctctcagtacttggtccggcaggaggtggtggtggacacaaagcggacgctggagctgcggccgccgctgcagctgctgaagcccccctgggtgggcagggggcaggggacgctggggacacaggcctcgctgatgagcatggagccactccttgtgccagtgctcagcaggtccccagtggccggggcgacccgggctccacccaggctggggccacaggaagccaggaccccactggtggcacagacgctgctgctacctgagaaggtgaccccgccgcgggagagggtggagccggcaaccaaaggctcaggcccgcacaccaggccgccccgggagctgctgacggatatgtttactggtccaacaccttcacagagccggctctcctcgccctccagcaggcgcctgtaggtggcgatctcgatgtccaggcccagcttggcatt

SEQ ID NO: 474282 - DNA, 1000 bp, Homo Sapiens; identical to SEQ ID NO: 336042

SEQ ID NO: 474283 - DNA, 1000 bp, Homo Sapiens; identical to SEQ ID NO: 343156

SEQ ID NO: 474284 - DNA, 1000 bp, Homo Sapiens; identical to SEQ ID NO: 343157

SEQ ID NO: 474285 - DNA, 1000 bp, Homo Sapiens
ctttacatcattttttttatttggacaaagaaaaaaatccaagtttgttttcatctatggtagctattggataacagatttttcactttgagaagcgaaatgaacaagtcctttctgtcagtcaggatagactaggttaggctgtggtaacactctccaaatctcagtggcttacaacaacaaaggtttatttcttgcttactcacacaaacctagacacaaaatgaaaacactctcctgttttcacatgcatggagacagacatgaatgcataggcatttacagaatcatggaatcctgggatgtaaactcatgcaaacacgtttatagatactggtcagcttaaatagcacaactctctctttattggggatttcaagagatcccaggacccaagaagggtacaagaatatccactgtcagccaaggaaatgcccacactaccaaaggaactgaaagctaatgaagcacctgaaagcttaaacaaacaaacaaacaaacaaacaaaaaagcccgaagcttgtactacattaaattccatgcataaatccttaagtaagacactaaatatacagtgccagcaggctgtcacctccctgccatagcaagacagcctccatctctgggtttctagctcaggagggagatggaccccagacggccaatatgcagagcaacagagggggctgggctgggtcgaagacaggggccaacaggctggaatcctcttcctccagcaggagctacaggcaagaaggaaggggcaggatcaggtcacacctgtttttccttctagcaaccccctctttttaccgaatccaatccaggcctcatcattgttctcctggattatttcacagacctccttgctaattttcccacctccagtcttgcctcctccaaaccgtccatcaaagccacccacttgtctttctaaagctcagggtctctgaatttgtccttgcttagttcagaaacgttccctggctccccttcacat

SEQ ID NO: 474286 - DNA, 1000 bp, Homo Sapiens
ttttttttttttttttataacaacaacggtttattatttgttcacgtacataaacctagacacaaagtgaaaacatcttcatgtttccacatgcaggggtatacacatgagtgcacaggtatgtcagcaatcacaagacgaataaaaactctggcatatgaactcacacagaaccccactgagagactgatcaacttagattgcacaatcctgtctttatgagacagaaaaaggccccagcatccaaaagagtaagggacagaggtacaagaatatccaccctcagccaaggagttgccccatataataaaaagcttataaaacacctgaaggctttaaaaaaagacgttaagcgttttggacgttaaccattttgcacattcagaaactggataccaaataggcagtgctctattgaggcctcctcctctgggttcctagctcaagagggagatgcatcccagatgtccaataggcagcgagatggagctggctggcctggggcggagagaggggctgggaggctggaatcctttatctccagcaggagctggtgggttgcaaggctggtgcagggagatggagtcaggaggggcctgggcagagtttctcagagtcagcagagcctcagcggcctccagcttccgctgccactctgagtgggcagaaaccaaagcctggtcagagactttggggacctcctcgggggctgtgaagatgtgggtctcgggctgcagcatgttgttctccttcccagtgagggctcctgctctgatggtcaaattcctgacacggatgggagctttgggaggggcagccatactccttattggtccttgagccaggtgtctctttgatcgtgcccgctgctccctcttcaaggcactcacagcaggcaagaccctgaggcgttctcacttcctcaggaagcccaatcatccactccctcccggacctccgaatcaaaagcaatcccatgagccctgcctcattggccaaa

SEQ ID NO: 474287 - DNA, 1000 bp, Homo Sapiens
tttttttttttttttttggctgactcagaaggtttatttgcagcgctggcggggcggacaattggcggcctcggggtgcggcgggtgcgggcgctcagcggctgggccagagcagggtgaaggagccgcgagcgcagcggaaatcgggctctggctgctccggcctgggctccacggagatgaggcgccggaccccgcgatggcttagtgggatgcagtcggagacgcgaacctccagggtgcggccctccccctggcagtgtgcggccagcacgcccaccagctccccaacgcggttgtccaatggcggccgggagcggtgcaggcacaccacgaggtcgtcctggccgcgggcgtgcagcaccaccagctggtctcctccgctggtcacgctcagccccgtcaccgcctcaaggggcacggcccgcatcacccggtactgccggtcagggtccagcttgtagaggtgctggtctgtgagcaggagggcccggttccggatcttgtggaagcggttcaccttgcggacatggcttgaaaagagcacagccccgaagccatctttgtcccgaagtgtctttagtcgctgagcaaacaggcttgatgctgtgggattgtcagtggcagaggacaggtagtctcgggcccaggcccgtcggcagccccagtcctgacgaagcccttgcagggcccccatggcggccaccttggccttgatctggggcatgtctgaaggggggatgttcttcaccagctgccgggcccgccacctgcagaagagtgcgtggcaggtgtcctggaagggctgcagcacagcagggggcagcggccacacaaggtcacgcccgtagagtggcggctgccttgcagcctggaatcgccgctgcagctcagccaggtgagcccgcaccttgtgtctccggaaccagcgcatgatggtgtagatagccctcagcctccggcagcgccacctcgccaaggtgccccgccatgccttctg

SEQ ID NO: 474288 - DNA, 1000 bp, Homo Sapiens
tttttttttttttttttttttttttttttaaaaaaaaaatcattaaaatatttaactttattaacagaatatttacatttcttttaagaccttatttaaccatagtgagtgttccaagtttaaaaagcattaagcaataaccacacacaagatgaaaacagtgtaaactatacagttctttatatacaatttttacaaagtaacacttttttaaataatataactggacacaaaaatatacactttagagaaattcacatcggtaattgtataaagctctcctctagggtcctgaaaatttaggacaaacattagctctgtaaataaagtgttactgtgacagtcctgaaaggccactatatatatttatctacataatagatatcacactgacattttcaaggctaccagctttactatataatttttagattatgtattcaagtgttgaggtgcttatgattatgcaaacattaaaagaatagtggtataagaagtagctggggaataaatttgagccagcatttagattacaggctctaaataccccaacttaaatgctaaatggctgatactttctcacttcaaaaacagtagtgaataatgtttaaaagtactgcaaacaagctcaaaacatgattcagatttagtacagttttcttaagagtttttttttttaaatgcaaacaattcatttaccatttctttgttttagtgcatctgcattaaggctttgaattatttgacccaagattttacaatattaaaatctgactcaaaattttacaatgttaaaacaaataggtccacaaccatactacctactgtgtctcactgagtcagcatagagttaaagctcaacaccttaaggaaatggtagcagagacatttgctaatatctaagaagttacatatatagtttttaattaaaggatgtataataaaacaaatagcttagtggcaagaaattggtgctaataaacaaaaggtttttcaaaag

SEQ ID NO: 474289 - DNA, 1000 bp, Homo Sapiens
caacgactcaagatttattttcattataaagaagggaagggaaagcacaatgagaaataaagagaataagacagcaactgaaaaagtataagatttatcaaatccataagcatactactaaatccataagcatactactaagataaaagcaagtcagagtaaaagatgttcttatcagaaaacagatgactacatgttatagcacctgagatttattttgaaataccttatgtctgtcatctcctacaatctaggtacattatattttacttcggtagtatttcttcttaccaaatacataggcttcaagaaaaaacagaacctatcaatcatatcagttttaacttatttgtaacagtctgcttttttcttggaacattcatataaaactacgatcaaaaactaaatgtaaatgttactgcatccacatgatagacatgcctttggtttaagttgggtatctaattttcatgcccacatattcccactaaaaaagagattaaaattacttacttttcaaataaatgtagaacaaattatgctactttgtagtttttaaaaagtaaggtaaatctattatatgagtgagttagtagtgatgaggttaatatctttttaaattaaaaacgagaaaaaaaactgcatttcattgaatttggggtaaaataatagagtcttctttgacgttcaaatttgatgttcaacttgaagactatgatcaacaagaggtttgcccgactaaaataagaaaagcaacattacagtgaagtagattgactgtgagattgtttttcagttccctcgacaatattgttcaaactccccttgttttgttcagatgtgatttccatatttgttacttctgaagggcacatagtttgaagttctgaaacatttgtgcgtagatagtttttttctatttgactgtacatgttagctactgatttttcaagttctgctaagtttttaacgtgtctgaggatgccttttggttctctct

SEQ ID NO: 474290 - DNA, 1000 bp, Homo Sapiens
ttttttttttttttttttttttttttttttttttttttttttctaaatgaaaagtttaatacaatatattttgtgaacacaataaagataaagaaccaataaaatagaaaaattctggcaaacttgaacaaacagagacaaagagagaacagggagaaagcaggagagcatgggaggggcagcctcctacctttccaagagaaaagaatgactgaaaggctgacagacaaataatatgtttgaaatggagataatgtgtacctcactgggaaggatattctgtaggctcaaaacgatttaaaaaatgaggaatttagaggattggaataatttcttagctagtggattacaaattatttcatatttggtgccatgactggaagagaaagaaagcaagggagggagtttaaaatgaaccagaatgttctcacagagtcagtgggatggtgatgggctcattggaaacatgaagtccaccctgctgaatgacatcaatcccactccatgtgtcctaatagtcagcacagaagaatggtctacaactgtgggcctgcagtgaagggagagatgagccagggcagtgggctcagcagcaagaggaggcacagcacaaggggcgggggcagctggagatgacacaggttgggcgatagcaagtggtgtggcaggagactccgccacagactggacgcaggcagcagcaggggcggcagcagctggattcacagcaagaggggcggcagcagctggagatgctgcagctggggtggcagcaggtgggctggcagcacacagactggcagcactggggtctgcagcagctggacacacagcagctggggcgacagcagctggagatgcagcatctggggcggcagcaagtgggctggcagcacatagactggcagcactggggcttgcagcagctggacacacagcagctggggcgacagcagctggagatgcagcatctggggcggcagcaggtgggctggcagca

SEQ ID NO: 474291 - DNA, 1000 bp, Homo Sapiens; identical to SEQ ID NO: 343158

SEQ ID NO: 474292 - DNA, 1000 bp, Homo Sapiens; identical to SEQ ID NO: 343159

SEQ ID NO: 474293 - DNA, 1000 bp, Homo Sapiens
tttttttttttttttttttttatccatacaagagtttgccatttattttagcctcttcaaaaataagttataatcaacagagaagtgaagatcatgaaataacattttctcaattttttaacatcctgtgggatacatgcagtccccaggctattgtctcctcagttatggaattagatgatgcaagttccagttcagtcaccatttccccgtttctatactttgtcaataaaaatgatatggcctttgttcatacagaccattgatactgcagcacattatactggaaaacacataagctttggagtcaagcaaacttaagttgaattctgattccacttgttcttagccatgtacacttgccaaaataccatatttcacataatctaagacactactgcaaagacctacagttatcttactaccaagaaagaaaagcccttttagacatatctatatttcagatgttcaaatgtgaaaataatacatgtcacagaatcaatgacacatgatatttaacctctctacagtgaaatttctcacttgtaagatggagatgctaaatgtccacattggaggttggccatgagacgtaaatgagtaacactcgtactatgtctcactccaaatctggcacatggtaagtactccatagaatgctagtttctcttctctttccaaaagtgatgagtaggttctggatagatgatgagttctctcagagcacattccatatcttatatgcctttgaccttttctaactccccatgactgagaatatttccttacacattgtagccactcagtaaatgggtgaggaatacagatgttgaattcgtttgaaaaaccgataaatactgcagttggaaaatcctgttggtgaatgtagccagtgatgtcccactggcttccccagcacctgcgcgcgatgaacgcatctatctgtaatcttgactgggtctggggactggaaagaagggcaattgccggctcatgaagc

SEQ ID NO: 474294 - DNA, 1000 bp, Homo Sapiens; identical to SEQ ID NO: 340818

SEQ ID NO: 474295 - DNA, 1000 bp, Homo Sapiens
attttataatatctataataaatgcaaagaaatcaatacaaacaaaacttggctttagcaaactgtacatacataaatatctttttttttttactataacattcaacttttttcacataaagccttccatgatcttatttattacatctagtttttctttatacctctaaaaaaaagtgccttttagatttacagcttgtgcttctaaagcaaaggttaaaacatcatgccccaaaggaaaacaaggtaaaaaggaagctgccatataagctcttaaaaattgtatgttacaaggttctaaaatctcttcagcactggttggttggtagattgtacgacactgacatggtgcttgggagggtcatttatctgatggttggagcagcaccatgggaaagctgcccagatggtctactgaagtccttggctgtgcacagaatgggccaagggcccagaattcatgagtccggggaactttggaggtccttactcaatctccttagtgctaaggttcagagtctcaaaccagatttcttccaaaccttcttgttgtctgtttgttcccccgtcactgtttatcttccacctctgaagccataatttgcacacatgtgatctggaggagggctaaagctgccacaccgagggctttcgccaagatcaaggtcctcttgttggtagtttgggattgcttatgacccgatcctccttatgctaccagcacttctgcagatggcatctgcttagttcagagtggaggagggccattcgtgtatctgagcatggggtggaatgaccgggcaaagttgttggagagggcacagctgtagtcttcctctgacattggtacaaggcaggcaagcccgatgaggaggagcaggagaagctgaaggggaagagctgctcggaggactctgaacaggaagccgcggccggaccgacctggccctggctcagaaagggaggaatcggagccaccttttgtggacctgctatgtgg

SEQ ID NO: 474296 - DNA, 1000 bp, Homo Sapiens; identical to SEQ ID NO: 160516

SEQ ID NO: 474297 - DNA, 923 bp, Homo Sapiens; identical to SEQ ID NO: 343163

SEQ ID NO: 474298 - DNA, 1000 bp, Homo Sapiens; identical to SEQ ID NO: 343164

SEQ ID NO: 474299 - DNA, 1000 bp, Homo Sapiens
ttttgctgctatggctgaacttttattgagcgtgttgtctgtgcagagcgctgtgcacgaggtggaagcaaacgagggaggaaaacaaagccacacccctgcccacagaggatggaacagaagggccgctgaggtcaggaaggcaaggttgccactaggtgttactgtggggcccagatgccgccatgctgttcacccttcaaagggtggcatctcagcccacgcagtcctcctccagcttcgcagcagccaggacctcccagtgcagtgacctggcctccccaggtaggaggcctaaccagagttgaaaatgatcctgacgctcctgagggctgctgggagatgaaaggggcaagggcagtggcggcctggggaaagaggaaagaaagaaggggaagcagggagggctccaatacggaggccgcgctggggcgatcactggttcatccacagccacaggttggcaatgctggccgacaccagcacggcgatgatcagggtctccctgtggcgccaggtggcgccctgttcctccagggcgcgcagacgccggttgactgcatacagctgtcttctcatgacttccatctccagtacattgaactcttccaggctagtctgcgccactgcatctgtccctgggttgcgatcataatggaaacgtatgccttggaaattgccagcgtactcctggagatgggcatccccatggcctgattctctcagcattctgggctttggcagctgggaccccattttcttgggtcgggtggcagtcatattccaaactcgtttggctgaagcagagccagcagctttttgttccaacttctgcttcttctgggaggcaccccgggaccgagatccaagctccatcatttctgctatcaccaggtgctcttggttttccccttggcgtccatgattcagttcttctgccagggacatttccatctccgccttggtgttgggagggcctcctgccatcacaaccagctgt

SEQ ID NO: 474300 - DNA, 1000 bp, Homo Sapiens; identical to SEQ ID NO: 160517

SEQ ID NO: 474301 - DNA, 1000 bp, Homo Sapiens; identical to SEQ ID NO: 343167

SEQ ID NO: 474302 - DNA, 1000 bp, Homo Sapiens; identical to SEQ ID NO: 160519

SEQ ID NO: 474303 - DNA, 1000 bp, Homo Sapiens
agaaggtctttaaacagaattcagaaagttaggactggaactacggtggtatagacaggttacactgtccctatgtgcatatacagtggtaaatgtgtagaacattcagcctgggaatataggctttctcctactccaggacagggaataaaaacatgtattgctggaattagtattaaaactgtccttacaaatagctgcaatgattgtcagtataaactttgggtcttgcattctttccttaaccatgaccctatcatcagtttcagtgccattttcagccaacataaagagtgctgttagtgtgtccataatgtcccatcatacgtgagcaccaccgtttacttagcaaggtctctattgtggattctcttatttcttccaaatattcacctttataaatccctctgcaatgcacatcttgacgtatagaacgttacttccttcgcctaaattctcaaaggtggatttacagaaccagctactacatatcatcagcttgcttcccaagagcctgaatgcgtcagtttaccacgcgaacggtgcatcggacaagcgctggttttaccgcacctaagcaccactgggtaccatcatttgggttattaattcagaaaaagatgacttgatttgtgatttgcatgtctttgatgatgagtgagactgaatacttttcaatatttgtttccttctggtattttctcttttatgaattgtctggtttatacgtccggatttcgtatttgatgtgccagctggaccaggtagtagacggtaagcaggagctgcatctcctcggagatgggctggatggcagaggcgccgtactgctcgtatgcccgtgagacagactgggaattctggtagcacgtgtacaagagggggctgaccacgacgtcattcaggttcccacagaggtaagggaagttcccatggcctttaaatatcactggcttggccttgcatattttcagcaagttgtcaggaacagacactggtt

SEQ ID NO: 474304 - DNA, 1000 bp, Homo Sapiens; identical to SEQ ID NO: 160512

SEQ ID NO: 474305 - DNA, 1000 bp, Homo Sapiens; identical to SEQ ID NO: 343171

SEQ ID NO: 474306 - DNA, 1000 bp, Homo Sapiens; identical to SEQ ID NO: 343172

SEQ ID NO: 474307 - DNA, 1000 bp, Homo Sapiens; identical to SEQ ID NO: 343173

SEQ ID NO: 474308 - DNA, 1000 bp, Homo Sapiens; identical to SEQ ID NO: 343174

SEQ ID NO: 474309 - DNA, 1000 bp, Homo Sapiens; identical to SEQ ID NO: 343175

SEQ ID NO: 474310 - DNA, 1000 bp, Homo Sapiens; identical to SEQ ID NO: 343176

SEQ ID NO: 474311 - DNA, 1000 bp, Homo Sapiens
tttttttttttttttcttttttttaaaagttcacagcactttatgccccacacgctcccctacgaccatctggagacaagactgaactgagaggagggactgtggactctctgagggctcaatatcaagagtctgtgcaataacttcgagatccttctttgattagctgtgttttctcatttgcatttgtaggctggagaaaaactggaaagtccacatctttttccatgtcagacttgatctgctcctccagatcctctggggacacatagaagtcctcttctggcactgatgactcgggccggcagtgtccacagcagcagttgcagcagcagcacaggcagcagcaaaagtagcagcccgtcaagaggccaacgatgacaaacagggcctttgcccaccagctcgacagcatgaagtaggtgttaacgttttcgtctccaaactgctcggccacgtagagtcccagcgatccgtacttgtcgtatatgcttctctttgaaatgtcggtaagtattgcgtgggcgttgttgatttctttaaacttctcagtagcagctggatcatctggattcttgtctggatggtgtttcagggccaattttctgtaggttttcttaatttcttcatttgatgctcccttatgcagaccaagaatttcgtatagagcttctcctgttgttgacagagtccgctgtctttggttaggtatgttacatgccattttctaaggctgcaaaactgttccaccgtttcaaagcaaacagctgctcctttccatccttcccccccatgcagggttaagcaggtcaatagagtcaggttacttttcatttgttactttgccagccaattggttatccctcttgagatctctcctctttttcatctagacactggcaagtcctgttctgagcttagcaatgccaagtacctgaactggaggcatggctggctgatcccttctagctccctccagtagtgtcccaccttggctata

SEQ ID NO: 474312 - DNA, 1000 bp, Homo Sapiens; identical to SEQ ID NO: 343177

SEQ ID NO: 474313 - DNA, 1000 bp, Homo Sapiens; identical to SEQ ID NO: 160520

SEQ ID NO: 474314 - DNA, 1000 bp, Homo Sapiens; identical to SEQ ID NO: 343179

SEQ ID NO: 474315 - DNA, 1000 bp, Homo Sapiens; identical to SEQ ID NO: 343180

SEQ ID NO: 474316 - DNA, 1000 bp, Homo Sapiens; identical to SEQ ID NO: 343181

SEQ ID NO: 474317 - DNA, 1000 bp, Homo Sapiens; identical to SEQ ID NO: 343182

SEQ ID NO: 474318 - DNA, 1000 bp, Homo Sapiens; identical to SEQ ID NO: 343183

SEQ ID NO: 474319 - DNA, 1000 bp, Homo Sapiens; identical to SEQ ID NO: 343184

SEQ ID NO: 474320 - DNA, 1000 bp, Homo Sapiens
caaagcctcagcttttccattcgctcccggcctcgcactgggacagcctacagcagtcaccccttgaagccccgggaggaacacccaccccaagcatccgggcactccttgcgcactccagggcctcattttggaatcaaagcaggttttatgggttacacagacgagccttagagccaggaaacatagtggcttcagatgtgttcaccgccatgtggcatcgagggcagaagagcagagggcgcctgggccttgtccacgtgtccaaggtgcaccacctccatcatgccagcacctgcagtcagttgctgtttgctgtcggaggtggggggtgggggctgggctccccatgggcacacagccggcagctgctctgctccctgccctgaggtcgcgggccgtggtgtgctgggagcgaggtgtgcttggcagtggcgctaggacgggtggaagtggtggtggtggtggtggtggtggtgctcgtggtggtggtggtgctcgtgccgctggatcactggcaccgcgtagccctctcctgctggcgtgggcggcaggtcccgcaccacctcgtgctccactgtggcaggctgagcgtgtggggccttgagtggcgagtggccctccctgcccttttggcggtaccgcttgtggccgtagggtggcggtgggggctgcgggaggtggtggccgtcctgaggggcctggggcggcaggacggccggcaggtagtagctgaaggctttcccggacttgctgctggctggcaccccaggcggcttcccggagcccttgggggacttgaggaactgcttctccggccccttcggccggggctgcgtgtccagggcccgggcagcaggctccgaggctggcacgacgtgttccaccagcacctgtgacctgcggtggtgtacggcatgtgtatctggctcctgggagcgggaccgggcctggaggtgcgaggccctgccctggggctcctgctttgcttgcacaggag

SEQ ID NO: 474321 - DNA, 1000 bp, Homo Sapiens; identical to SEQ ID NO: 160522

SEQ ID NO: 474322 - DNA, 1000 bp, Homo Sapiens
tttttttttttttttttttttttttttttttttttttttttttttttttttttttttttttttttttttttttcagttgcttgccaaaaagatttattgaagaaaaatgagcaaagtgaaaacagacccatttaagtagtctgtgccagaaaagaatgaagatttatgtccttgaatcgctaacaagagtcataagaagagtgtgatattcagtgtttaagaccttaaatgcccacattctttcatttctaaaggtttttgcttgttggaaaaatttcttagatgttaaggctagctggctagactattgcacaattctacatggtatcccttttgttgcttttaaatcatgaactcatcgggttcttctttcagtagttcaaagatatccgtttcagttgtggaggtgtcttccttatagtctggggtatctaatacagaggtagttccagaaaatggctcagtgatcttaggtacagtctctgtattatcagtttcagacaaatcttcttctgtagatgattcttccactaggtttgtagctattgatgcagggacaacgaagtcatatctggattcaacagcagtaagcaaaacagaatgggtctctgcttcatttgcagtatctctctccatcccaatactggctccctcggtagtttcttcatcagttagcagagtatcttcccgtttatctttgtctttttcagcagaggtagtgagttcaaacacagtgataaacttctcatcagagtcagttaatgtagccacagcactggtgtcatcttctaaaacacttaggtcaatttcggttattttctcttcttcaagggcagttatgtctggaatagtagtgaagctttcttcaggagcaggagggatttcagcctcaggaataatggaatcagtgacctggacagcctcatcagcagggacattggatttgatggaggaattataattgctcatatcagcttcatcctttttacgtggaaaggca

SEQ ID NO: 474323 - DNA, 1000 bp, Homo Sapiens; identical to SEQ ID NO: 343186

SEQ ID NO: 474324 - DNA, 1000 bp, Homo Sapiens
ttttttttttttttttcatcttagtttttatttcttttataacatatttgctttaaaattttcttacaaaatttattaaaaagacatacaaacaacatatgggagatgagaataagattcctctaatacaaaggcattagggtaaataatatttcaggtgctagacagcaggcatggcacatttattcaccaagaccagaatccctgggggtaatcgcttccgttttttccagcccactattattagttgtgagaagtaatttgcttgacttgctttcattctctgactccagttttgcagcctcctcccaagtagttgctagccgtttcccaagggtttctggaagctttagtgttaacactccactcaggagggccatagtcccaacaaacaactgtggtatgaagatccaaatgctgctgaggtccacagagaacggcgccaggatgctggccaggcgacacaccatgctgccgcttcccacagccagcgatcttacaatggttggatacagctcagctgtataaagataaatgaggccaaatgctgccccgatggcaaattttccaaccatagctgtcaccacacccaaaatataatgtttctgggggatcaccataacgacaccacaggccagtgcactgcagaaaagagagtaggccaggactgttctcctcccgaccttgtccatggcgatgcacacgaaggtgtaggcgggaatttccactacacccaggaggaagaggtttaagtattcattgcctcctaagttaacagaattcaaggaaaacgagtagaatcccaaacttccagtgaaccagattagccaaacggtaagtgtccttttcgtaatgctccagttataaaacagatatgataggttgtgcttctgaacttcagtggggctattactaacaggaccttgtaggtccagtgataaaagttctgacagtttacaggagcttgccctgttccacttggccatgatgtcaactattt

SEQ ID NO: 474325 - DNA, 1000 bp, Homo Sapiens; identical to SEQ ID NO: 343188

SEQ ID NO: 474326 - DNA, 1000 bp, Homo Sapiens; identical to SEQ ID NO: 343189

SEQ ID NO: 474327 - DNA, 1000 bp, Homo Sapiens
ttttttttttttttttttgagtggccaaagtccctttaatatccctgaattgcgttacaagtaatactgctggaggtggggaagggatgggggtttgggggtgagttgggataggacggaggaggagcgccaagcgctcatacaaaatatggccaaaaggcttagcatgcatggaaaattattgctgtcagaagttgctatttacagggtcaacgcctccataattgcttctgctacccctctccctcccaccatccctgcagcctcccttcccgctgggcctggagctgagcaaaggcccattcacccctctggagccctagggaagtgcccctgctgcaggggtgcctccagtctcccccctcttttgtggctaagaggaggggagaggaggatctgagagtccaggactcctgcccccaagctggctgcagagcaatggggcagaggcgtgtgcttaaagcggagggggccagggcccgtgcgcgtggaggtgtgtgcttcggtcctcgcccgggcatgcaaaagcgcagcggaggaggtagtggcggccaacgggcgggtggctggcagcccggcccctctgtccgggagagttgcatagacatggccgggagagagcgcccctcccggggagcaggccagaggccccagcgggtccggggctcagtcggtccctggaacctggggtccctcgggaagaagaataaacaggaaacaaatcgaagaggctcctctctccgggccgcctggagtggcaggggaaggttcaggaaggtggggacctgccccacgcctggacctcctgatgctccctcacccccccagttgagggtcagcaagctgcccccccattctcgagtccccttccttagcgagtgcaggctctgaagagggtgggtttctcccgagacgcgggggtgtgtgtggtgggggcagccctctgtggcctgtgctgtccctctccttgcctggcttcctgacctcccagtccagctgg

SEQ ID NO: 474328 - DNA, 1000 bp, Homo Sapiens; identical to SEQ ID NO: 343190

SEQ ID NO: 474329 - DNA, 1000 bp, Homo Sapiens; identical to SEQ ID NO: 160523

SEQ ID NO: 474330 - DNA, 1000 bp, Homo Sapiens
ttttttttttttttttttttttgttcaaaagcaatatttatttttcatgaagataagaggcatattacattcgctatagaaaatgctatgagaggaaaaagctgcatgttaccgatatgacaaaaaacataaaaaactctacttatgaaagtgttttgccctataagaacatattcaataaaaggcattattccaggtgaatgagccatgcggaaatgtggatttattagggtttgttttgaaatgtaatttgtacggccagctttttattcctttgatggctatcaaatagatttattggctacatgttagaagtgcaaaagataacaggtaaccaagggagaagttttaataaaactctcaggaaaggcaaagaaaagtgagtgaatatgcctgcttacatttcagctaataaataaaaagtgcagatagggctttaactgaaaaccttgctggttattgcagcctggaaggtttattgaaaactgggtagaacactctcattttttatatttacagctacattgtgagctgttcaggttagagtgatgtaacgttcattttgactttggtacaggaaactgatgttttcacaggaaacttgcaaagcagttatgaagaggaagagcgttcttaattattagtgtctgcctgagctatttctgattgtgttctgggattttagagaattgaacaatagagtatttaattttaccactcccctcttgagtaaaaacatcagacacttttaggaaagttttagaaggtacatcttcaataagcagagatctttcatctcaaataactgggaagaattgcactgcttaagaatagttgaacttggacctgagagcaccatacttagaaatctaagtatatttaggtcactcatctaacactgggactttaccagccctgtcacccaaactggttgtagttagtaggaccacaaagtcactgaagaaatctgctttccttttaactttcaaggcaataagaa

SEQ ID NO: 474331 - DNA, 1000 bp, Homo Sapiens; identical to SEQ ID NO: 337787

SEQ ID NO: 474332 - DNA, 1000 bp, Homo Sapiens; identical to SEQ ID NO: 343192

SEQ ID NO: 474333 - DNA, 1000 bp, Homo Sapiens; identical to SEQ ID NO: 160524

SEQ ID NO: 474334 - DNA, 1000 bp, Homo Sapiens; identical to SEQ ID NO: 343194

SEQ ID NO: 474335 - DNA, 1000 bp, Homo Sapiens; identical to SEQ ID NO: 160525

SEQ ID NO: 474336 - DNA, 1000 bp, Homo Sapiens
ttttttttttttttttttttttttttttttgctttaattcttctctatattaccacagtaaaatatttaacaaagtccaagagattactgatgtgcaataatgacctatgactttacattaatggagtgatgtatcaataataaactgatcagttaagtaactggaaaatgtttgcatgtaaagaatgattcactatcctttttatcttgtattgaaatcgtcaaaacatttaaaaacacaaagttgaagtaattttaaataataataactgtgaaatactgcaacatcttgaagtactttataaatgaccaaaaacaggtaaaattttgttcagtataacttcagtgaagaagttttttgacacagaactacatatatttttaaattggtaatccacataagatatacacaaaaccttcaagtgactacattgttcaataaataaaactctacattgttttgtttttacagcctagtgagcttataattcagtaacacccttttaagaaattctagtctacagaatgacatgtccaaattgtttggtcctattaatttctttagcaaaaacctccaattcctttatatttaattcctccacatatcatctttgaagggcctgactaataaatcacaagtgtaaccctccagtctccagtctgggtttttcatgagtttcagttcagtgtaagccagcacactgacctccccatgaattttccacagtacctactttatttaacactttccacaaagtatcctgtccttctaggctttttgtagaatgtgaagttaataatggcatgtggtgttccttagcatgacctgccaaaaagtgatgatctccttggaagaaaagccatgggctgcaatcacacgtctcagttgacagacatccaaatggattctatatagaaagaaaagatttgtgtcttctggaatatgaatgttcacttttaataaattcaaacagatcccgacataaacatcttcaaactt

SEQ ID NO: 474337 - DNA, 1000 bp, Homo Sapiens
aagagtttagtccaacatttatatgtgacacagccatgtgaggcctcttctctgagtacaaagtaaagtctggtaaagtaaaaaattaaaagaaaaatcatttctataattaggagcaagattactttgcatgtcacgtgaccatggctgaatgggcaaaactaacgaagtaccttggttttatacaaccctgcaacacaggctcgcacaaacctctgggtaggaggcagcggagcaaactgaaggctaaacagcaaaccacaaagttcagttgttcctcggccaaatgagacattcaatgaagatgagcttggctcaggcttgggaagtggacgcaggaccaccctgcttcaccagggcccactttagggctctgagcccgaggggtccttgagagcatcctgacttgactccaactgaattcccagaaagctcccagaatcccacatgaaccccatctgagttcaactgtccttcagtttgaactgagagccctaaagtgctcctggggcagtggctggtccccattgatcaaaaacaagggacagttggggtgatgaaatgagagagcagcagatggctcagaagggatgtcctgctcgctaggcaggtcagcagtgtgggcagtctgtacagcaggtcagaatgcagtggtttctgagcctaatttatacatttataagaactctgtccagagctgggtgttcctcagcatgtgagctgcatccactgcggggacatttcctcggatgaaacttgggttgtgttgagtaccgagccgataacatggactcaatcccagctacatccagccctgtgaatgaaggagctggggtgaatttggtcatcccaggcttagctccaaaaagcacaaggactgggagctgaggtggaggggactcgacagggatggaaggatgccggctccgagacctcatcatcagtgtcccctcctaagggaggcagcacgtgggagtggttcaagtcaggggctgcccac

SEQ ID NO: 474338 - DNA, 1000 bp, Homo Sapiens; identical to SEQ ID NO: 343195

SEQ ID NO: 474339 - DNA, 1000 bp, Homo Sapiens; identical to SEQ ID NO: 343196

SEQ ID NO: 474340 - DNA, 942 bp, Homo Sapiens
ttttttttttttttttttttttttttttttttttttttttttttttttttagggaagtggctgtttattaatacatgaaaacaatattatatgagatcatcacagttagtgtccccttcgaatgaagacactgctcatctaaaaataactgcattggggcctggcataacatattttaatgaatgtgattgtctgtcatttcctagaagagctgaatgtccactctgaatgccacatgagacaaactggcagggaagtgttcatttttccagtgactggctggctacagtgcattttaaatgactaatgaagacattcatagtatgacaaatatcacaaggagacattagcagcaagaggaggcacagcacaaggggcgggggcaggtggagatgacacaggttgggcgatagcaagtggtgtggcaggagactcggccacagactggacgcacgcagcagcaggggcggcagcagctggattcacagcaagaggggtggcagcagctggagatgcagcagctgggacggcagcaagtgggctggcagcacacagactggcagcactggggtctgcagcagctggacacacagcagctggggcagcagcaggtggtcctgcagcaggtggtcctgcagcaggtggtctggcagcagctggggcggcagcagcaggggcggcagcagctggattcacagcaataggggtggcagcagctggagatgcagcagctagggtggcagcaggtgggctggtagcacacagactggcagcactggggcttgcagcagctggggcggcagcaggtggtcctgcagcaggtggtctggcagcagctggggcggcagcagttctccaggccacagctctgctcagagctgacagagccacaacaggagctgaccatggtgtcagagggtggaggttctgggtggatttcta

SEQ ID NO: 474341 - DNA, 1000 bp, Homo Sapiens; identical to SEQ ID NO: 343198

SEQ ID NO: 474342 - DNA, 1000 bp, Homo Sapiens
ttttttttttttttttttatcattccaattcatattcagccagtgtttattaagagcctactacacgccagacactttacatgctgatcacatttactcctcacaaccatcttgtaagggagacatcatcagtgccatttgaacaaatgaaaaactgaggctcagagagattcaataccttatccaaagctctccagacaataagtgcaaaaacaaggatttgaattcaggactgtttgattccaaatctggaactttctggaacctctgacacacacacacacacacacacacacacacacacacacacagcaccatgtcctgagctgctgcctcctggactcccgccagactgcacctgacagacaaagccaactaggagggaggggagtgagggagaaggtcccacaggtgaccaatgcctggccccttcatgacagcaggggctagggctgtcccacagggactagagagaggtgtggaaggcagggactttcccataatgctccctcctctcagtgcacaagtgtgctatgttgagaaatggggcaaaagaacaaacagtccttgccacagagggagacaggcagcagccttatcaaacaagataaggagacccggatgatgtgccttttgaggcccctggtggtggaggaggattgagccaggtgaatgggaaaggaagaaaagatgaacccatcttggagtgttgtactttggttgctggagagccaacagtggagactggagacaaatatttaagtcattccggcaggccccatgtacgtgcctcacaatctaacaccgcccaccttggccagaaaggaaggcttcctatggaggtgctgccctgctcagtctgtcttctcaggctttctccaggacttgcgggtctccaggaagatcttgaccagggacaggaggatgggcacagccataggcaggaagagtgggatgtagatggcaaacttctggtcatcagggaaataaaggaggtgga

SEQ ID NO: 474343 - DNA, 1000 bp, Homo Sapiens; identical to SEQ ID NO: 343199

SEQ ID NO: 474344 - DNA, 1000 bp, Homo Sapiens; identical to SEQ ID NO: 343200

SEQ ID NO: 474345 - DNA, 1000 bp, Homo Sapiens; identical to SEQ ID NO: 246567

SEQ ID NO: 474346 - DNA, 1000 bp, Homo Sapiens
tttttttttttttttttcggattccagaggctttggttttattgtgcagttttctttgtcctcaatgagatgccataagcttgtggtggcactatacacagtcacagaacaggaagaaccaccgggtgggggctgggggttgggaaaagccatttcctgagaagtgtccggctcctgggtctcactccatggcttgcctcaggccccgcagaagtccctgagaaggcaggcctgcggggcagggggctgtctgaggggctcaggcaccagccagcaggggctggcactgatgggcgaggggaggaagtgcctcccttagaaacttgggccaaaccctgtgcagctctgggactccaccccacctgacttggaggctgtgggtcagagctctggaagctcttgggagcttgggacagcctgagagggtcttgtcctcctttgtagccctctccactgtgggtggaggcagggaggggcagcagggccatgcttttagcttccttaggcagggagggatgatgaaccctcatcctttacctccttctccaaccctccactagcgctgctttcctggtcaaacctgcatcttcactgggtcatgccccaaggcctctgagggacttccacagtggtaaggagggctgccctttttatttttttttggttgtggctgagaatgctggagatgctcagttctctccctcacaaggtaggccacaaattcttggtggtgccctcacatctggggtcttcaggcaccagccatgcctgccgaggagtgctgtcaggacagaccatgtccgtgctaggcccaggcacagcccaaccactcctcatccaagtctctcccaggtttctggtcccgatgggcaaggatgacccctccagtggctggtaccccaccatcccactacccctcacatgctctcactctccatcaggtccccaatcctggcttccctcttcacgaactctcaaagaaaaggaaggataaaaccta

SEQ ID NO: 474347 - DNA, 1000 bp, Homo Sapiens; identical to SEQ ID NO: 343202

SEQ ID NO: 474348 - DNA, 1000 bp, Homo Sapiens
ttttttttttttttttttttttttttttttttttcttcacattcactcatttattaagttacttgacattcctgagctctggttcagcgtcaggtgcaggccgatgccgtcccccacaacccccgcccacatctgccatactttcagatgccccaagaacttgaacttcatttattacaaataactgggttcactgcattgtatgatgaacagcgaagcctagagaggcagcccagggtggggctccaacaactgcccccaacatgcccagccctgcatgaagtcctgggtgggtgaggtcatctggactgggccttggagctgtcctgtatttataaaaccaaatgggtccaaagacttctgggtgtgcgcgcgcgcgcgcgcgtgtgtgtatatatatatataaaacataggcttcctttccacagggcgttggtaggtgggactgttgacgccatccctgggagagaagaaagtcggctgtggcaggaactggtcccagagtgagcctaggcactgcatcagtttgagtggctggttagcctggaccctgggcaggtatggggcggcccatcctgcccagccacaggaagctctaggccacctggatttgcaggtcctcgtcctcgtccaggtcactggttccatcctcggcctcctcggtgccaaagcgagcactgcggatcttcccgaagaggggagcgttctgctgctgcctgcggagcctggactgcaggtgctccagttgcacttgcaggttctcgctctgctccgtctgctcgtccagcgaccgctgcagcttacgtgcctggttgtgggcctcgtccagctcgtcctcagcctgggccagctccttcttgagctcctccacccgcagccgcagcttcttcacctcagcctcgtgctgctccacccgccggttggcatgtgccagctctgccaccttctcctggaactgcttcttcagcttgccatgcacatgcttcaggtctgccagctc

SEQ ID NO: 474349 - DNA, 1000 bp, Homo Sapiens; identical to SEQ ID NO: 246568

SEQ ID NO: 474350 - DNA, 1000 bp, Homo Sapiens; identical to SEQ ID NO: 160528

SEQ ID NO: 474351 - DNA, 1000 bp, Homo Sapiens; identical to SEQ ID NO: 343205

SEQ ID NO: 474352 - DNA, 1000 bp, Homo Sapiens; identical to SEQ ID NO: 343206

SEQ ID NO: 474353 - DNA, 1000 bp, Homo Sapiens; identical to SEQ ID NO: 343207

SEQ ID NO: 474354 - DNA, 1000 bp, Homo Sapiens; identical to SEQ ID NO: 343208

SEQ ID NO: 474355 - DNA, 1000 bp, Homo Sapiens
ttttttttagtgtgtataaaccctgtgtaaataatttattttttttatcagaatcttagtcattcataacacactagtgcaaaaaattgtgcattaaacattctgcgacagaacagctgactgggaaattgcaaacatccctagagatgaacacacaggggagctgtgaggtcctcaaagcttgtcaggtctcggaaggacagagtgaagcatttgtaggtgtgagcctctatcagaaaggtgtcttcttccagaaagctttttatttttttcagagtattcgtgttcatgggggtttaaaaaggaaaaacaacacaagagaacacatatcgtggtgccaccattctgtcaccgcacctgagggacatatccacgagcccagacgattgcattgaaaggcatctcagcaacacagaaatatgaaagtctgaggcattgagtatgacgtgttggcgcgacgcggcagtcttcctggagtgtgccttgatttcatacagatgcagccaggcatttagaacccacttttggaatgaaaacgcatgtgtagtttgatccgtagaagaccctgacacatttgagtagagatccccgctgcacttatgccagtagacaaggttgaagatcgctgcagtaaagccagagtggaagggagagtggtatatggcaccaaaggaatcactgcttgtccatcagaggtatggctatgaatcagtcctgttggggcactgagggctataccactgtacagactgtgttcagagttgtgtcaaacctcacagccttggcttctgtgggttttaagtttgtatcatacatggggttttcaaacgatgcttgtccattgctgttttcatgcccagcatagccattgtattgaacttttggtctcgttctgtgtttgtagaggtaaaatgcaaaccctgataaaattagagcaaagaaaggaaccagaatggcagccgccacagagccactgctggtgccgtggtaatgactggaa

SEQ ID NO: 474356 - DNA, 1000 bp, Homo Sapiens; identical to SEQ ID NO: 343209

SEQ ID NO: 474357 - DNA, 1000 bp, Homo Sapiens; identical to SEQ ID NO: 343211

SEQ ID NO: 474358 - DNA, 1000 bp, Homo Sapiens; identical to SEQ ID NO: 160529

SEQ ID NO: 474359 - DNA, 1000 bp, Homo Sapiens; identical to SEQ ID NO: 160530

SEQ ID NO: 474360 - DNA, 1000 bp, Homo Sapiens; identical to SEQ ID NO: 160530

SEQ ID NO: 474361 - DNA, 1000 bp, Homo Sapiens; identical to SEQ ID NO: 343213

SEQ ID NO: 474362 - DNA, 723 bp, Homo Sapiens; identical to SEQ ID NO: 160531

SEQ ID NO: 474363 - DNA, 1000 bp, Homo Sapiens; identical to SEQ ID NO: 160533

SEQ ID NO: 474364 - DNA, 1000 bp, Homo Sapiens
atgttttaaagcaagtatgtctttatttgtaagcatattactgaaacgatcaaatgaacagaagtggataaacgtcgagtcacttggctgagaccatacgcatcttccgtactgcttgtattaggatgcaagattgaatgtgtcttttttttaaaaatgcagccttgtgttgcactctgaaataagtgatttaaaaagaaaaacatgatacagagatcccatcctgaccttggaggcttggataaagctgtggggagacagcctcatggtccagccaggctagtctgcctgcttcaggactctcaagatctccccaagactttcaggatcagctgctgttaatcaaacaagtgcttataaaatggaaattgggacaaaggaaatgttaaatttcctccctgcaaccaggcagatgagaaatatggaaataaggaaaagggaaaatgaagatatgacaaagttgatgaaaaggttgaaatagtgatttatacatgatgggcaatcaagtgccccttttgccctgttttttggagagggtgtatcattgcctcaatggtgcgtctgcctgcactgagggcattacacatggctgactcgacctccctgcctctcacactctgtgtattttgtgaagctccacaaacggggtcacgtcatccaggtgaggccaccaccggtacagaaacctctcggcaatggttcttagccagggggtgactttgacttcacccctcgcctccctctccagcagctcccacagctcctcctgggacaggtagaggatgcttttcgtttcactgggatccgggttcagagtgacgtttttcctcacaagcagaaggtaacaaatttcatgctctccccaaattctgtctgattttgccttgtggtgatagattgtcatgaacacaatgtcctctggagaaatctgctccccaggaattcccagctctgcttgcagacgcctctgggctgccctcctcactccgatggcatcctt

SEQ ID NO: 474365 - DNA, 1000 bp, Homo Sapiens; identical to SEQ ID NO: 343217

SEQ ID NO: 474366 - DNA, 1000 bp, Homo Sapiens; identical to SEQ ID NO: 160534

SEQ ID NO: 474367 - DNA, 1000 bp, Homo Sapiens; identical to SEQ ID NO: 160535

SEQ ID NO: 474368 - DNA, 1000 bp, Homo Sapiens; identical to SEQ ID NO: 160536

SEQ ID NO: 474369 - DNA, 1000 bp, Homo Sapiens
tttttttttttttttttttttttcagtacacatttctttacatttaatgtaaataccaacagtggtcacctatcaacatcatggaagagcacacttcacaggtttcataatcaaattttaaaataatcacatgtaataaaaacaaatgactaaaatacaaaaatgtaatgtatttatttactaaatggttagctataaagatacaatttctgccttggagtttaaagcagtttcattttttgccatagttactttttctgataatatgctagaatcacagtcttctctgttttatctggattgtagggattgtttacattttatatgtttgttcacttgagaaccaaatttttttttcttcatgatgatggaagctctgtaatataaaaatgtcattgtgctcatatatttgaataataccgatcacggttttcaaagtctctgtgagcatatcttgcataagtcttgttatgtgggatccttccaaaaggttcatggtcattgaaacaagattcaaaaacttcatcaacagcctttttagctacttctttgctgatattcctaacagccaggatagaaagagtggctctgtctcgcacacaagtctggtggtgttgttttaatccaaaatgtaacctgaatatttcattgacaagtgagcagtctccactaaggttagcagctcgaacctctgagcacgccaaatgtctgatgttggtgaaccagtcgacatgggcacgacaatgatcaaatgcatgaataagctcgtgtgtgaccactctgttcatatgggcctgattatggatattattctggcacaaaactatctgagatgttgaagcatcaaaacctccactgacatttccattacagtcttcgcaagaaaagtgtctatctttgttaacagcacaacctgagtgtttcatagcatcaagcagaagtttgacatatggatttgtctccagcgtcttcaggagcctaagctggcacttctggttgc

SEQ ID NO: 474370 - DNA, 1000 bp, Homo Sapiens; identical to SEQ ID NO: 338771

SEQ ID NO: 474371 - DNA, 794 bp, Homo Sapiens; identical to SEQ ID NO: 160537

SEQ ID NO: 474372 - DNA, 1000 bp, Homo Sapiens
ctgaagacaccttctccgctttttattttcctataccctgtcagatccacacagccctgggaggagcttagaccactacatgaaatgaatcacagacgcagagtgtgcacgcatgtgcttggtgtgcattcagataggtaactacgcgagagcgtgcctgcaaatgcccgcgtgcacaagaatgtgggccacagtggaacggtacactgggggaagaagccacaggtgagtaactgttccagcgtgcaaagggaggtctgtgctcggcttcagctgttggcagtgggagatgcggggctggccttcctatgccagtgacaggcccagcctgggggcagaggctcataaatagctggtgtgttctctggagccatcaccattgtcatcgcctggacaattgcagcacacagcatttgaggagaggcagacaactcgggaagtgggagggcctgggcacatacccctcaggctgagcctcgggtgcggctgctgagctggaaagtggatgcggaggacgttatggggcaggagttttgaggtgtggagaggggccatggggctggggctgtgaatcccgtgcagcacgggtgacagggccacttccaaagcctgcaggctcacagcataatcctgggtctgtgtatatgagggagacgtgggggggctggatgtgtctcagaagaaagggagagccagtgggcgtcctacatcctggggtcctggctggggatcagccccttggtcttccctggagtctctgcttcgtgtccctggggtctggggggtgccttggcttccaagtcctccagaccctgaccgtagagggaccgcccatttgcttgctgggcagctccccacacagctgctgcctccatgtgtgtccagcccacctcactctccgagcccagggactcctggcgcctccgtatggagatccagctgaggttggaggtgtggctggtcagcgtggagcggtgggtggagcggtagctggggtagg

SEQ ID NO: 474373 - DNA, 1000 bp, Homo Sapiens; identical to SEQ ID NO: 343222

SEQ ID NO: 474374 - DNA, 1000 bp, Homo Sapiens; identical to SEQ ID NO: 343223

SEQ ID NO: 474375 - DNA, 1000 bp, Homo Sapiens
tttttttttttttttttttttggtcttacaactctattgtaaactatactagactatagagggacttctacatctttcaagatgtgtttaataaaggtctgtttataataacttttgaggcatgaatctagcaaatagtactttatacaatgtcccttgtcattaccaactcataaatattaagtgtttttcagtgacttatgtttggatgtggtagtgctgatcagggccatgtgctgatgtcctggagagcaaaatcaatccaaagtggtgctgctatttgtgacagaacatgtttatttactcagccccggagacaaaaggaaaattgatatgggggagcgggaaataggagaactattaaatgtagtgaagaaatttcacaggtctaaaggaactattaaaaggaagggataaagtagattctatactataaaacagaatcctacctctgataaaagacaatcagcctgaatttttgaataatcaataggattcaaaatgactattttcaattgcatctcattcttaatgttcttccagaacccttaaccctgagagaagcagggcaaaatgtggccaaaggattcacaacctttctttccaacattatcccatcagctatgagaaggtaaagatttagccacggcaaggtccgaggtccaaaatcaactcttttcattctctgtcttgctctccattttagttgatctgatacaactttttgacatcacaattaaaacacttcaaattaaaccagagtaagaaagcctgtttcctcccctactaggttcaaacacatcctgttatgcaccatcgaggtgagaagacctaccatgggatcatcatgggatatcaggtaagaagatgagtaacatacaaaactacaaaagtttttgtttttttgtaagcccacagattgtgatgaaatgaaggttgtaaatagctgataaacttatgggcctcttaatgtgcaaaaccaagtaattcctaaaagttg

SEQ ID NO: 474376 - DNA, 1000 bp, Homo Sapiens; identical to SEQ ID NO: 160539

SEQ ID NO: 474377 - DNA, 1000 bp, Homo Sapiens; identical to SEQ ID NO: 343224

SEQ ID NO: 474378 - DNA, 1000 bp, Homo Sapiens; identical to SEQ ID NO: 343225

SEQ ID NO: 474379 - DNA, 1000 bp, Homo Sapiens; identical to SEQ ID NO: 343226

SEQ ID NO: 474380 - DNA, 1000 bp, Homo Sapiens; identical to SEQ ID NO: 343227

SEQ ID NO: 474381 - DNA, 1000 bp, Homo Sapiens; identical to SEQ ID NO: 343228

SEQ ID NO: 474382 - DNA, 1000 bp, Homo Sapiens; identical to SEQ ID NO: 160541

SEQ ID NO: 474383 - DNA, 1000 bp, Homo Sapiens; identical to SEQ ID NO: 343231

SEQ ID NO: 474384 - DNA, 1000 bp, Homo Sapiens
ttttttttttttttttttttttcaaatagaaagtttgcttttctgtttcctttctataaatattaccccttaccagagtagcctcctttataatttactccttaaattatagctttttttttttaagggcaattggtttctttcctctgcttcttgctatatagacggatggctctacttctaaaaacttggtactcgtggcatccagagaaaagacactgctatgttatataggtccaactgagaaacaaatgcagaacatcagttttaagaagatagaatctcctagggaaaacttacctctccaaatcgttccatgttttgtgtttttgaaagatttccaccaatagacatatcatctaggccagaaagaattttattaatacttccttcactggatggtcgatttttcagtttggatcggaaaatgtctccttggacccacaacgatgcttgtttttcttccaggaagtgctgctggggtcctataatagagcctggccggcatattctaatccaagcaattatttcagcatgtgtaaacctgtagtgtttcattacataacaggctatcaatgtccctgttcttccaagaccagctttgcagtgaacggcgatggccccttcggtgttctcacagatgttcaggaaccttcgcacgatgttgtcactgggtgtgctgccatctatgaagaagaggtcatagtgctcgaagccagcgtctgtgaagcgctttgcctcataaatctttttgtttagcctcacaactgcagtcacattatgctttttgaaataaggaaagtaggcttcaggggcgtgaagaggataaccattctcaattttgcttttaggatgtggtccactaaatgctaaaaattttcctggaacaatccagttgaagtcaccattttcaactcgctcataatgttcatattcatccacatcaaatgtctcaaagtcaaaaaatccatgttgtaatccctttctgattccctgcaaa

SEQ ID NO: 474385 - DNA, 1000 bp, Homo Sapiens; identical to SEQ ID NO: 343232

SEQ ID NO: 474386 - DNA, 1000 bp, Homo Sapiens; identical to SEQ ID NO: 343233

SEQ ID NO: 474387 - DNA, 1000 bp, Homo Sapiens; identical to SEQ ID NO: 343234

SEQ ID NO: 474388 - DNA, 1000 bp, Homo Sapiens
tttttttttttttttattttttgaggcagagtctcactttgttgcccaggctggagtgcagtggtgcagtcttggctcactgcagcctgtcttctgggttaaaacgattctcctgcctcagcctccccagtagctgggatcacaggcatgtgccaccacgcccagctaattattgtattttcagtagagaaggggtttcaccatgttggccaggctggtcttgaattcctggcctcaaatgatccacccacctcagcctcccaaagtgctggaattacaggtgtgagccaccaagcccagcctatatatatatatttaaagatgacaagaaattaacaactcagcattttgagaatggcatgtcaggttatcatgattagtacatgggcacctggctgtggctcatctactaccatattctttgttcttctagatccttcttggcttccatcttggcaactccaaaggcatggtggggaaaacagatgcagagatagatgcctatttctcctgcagtctctttcagcatagcaattaggcaagttatcaataagagtatataatctataacttatagtccacataaggcttcactcaatttgaaaaattgccagttctgtcaaatatgctaacactccaataaggtatttatgacacagaatctttatttttccatcagtatgtgctgaagctacagatgttgaaacacgaactaatcttgtggctgataaatgaattttgaaatgtctatggaaatgtgaataaaggcaatccatgaataggtcaacttcttcctgggtaacctccccaggtgttttgtggacactgtcccatagagcttttgcatcctctggatgtattgcgaaagaaatgtccagactttgagggctacagggtacagaccaaagaaattcagtagtagccacataatggtccattttgcatgcagtccacatggcagccatccaggaaagattaaatgcattgattgctaaaggac

SEQ ID NO: 474389 - DNA, 1000 bp, Homo Sapiens; identical to SEQ ID NO: 343236

SEQ ID NO: 474390 - DNA, 1000 bp, Homo Sapiens; identical to SEQ ID NO: 343237

SEQ ID NO: 474391 - DNA, 1000 bp, Homo Sapiens; identical to SEQ ID NO: 343238

SEQ ID NO: 474392 - DNA, 1000 bp, Homo Sapiens
tttttttttcactactgttttgttgacaaaacatgccatgaggctctttattgtattaatattcccacttattgaatatccatgtttctctgcagaaatagtaatgtgttccattacaagatgcttccgcaggccctaactggtatgttacgtaatatcagagtgactgagcgtcctgattcgctgggacagctccagtttaagccagttgttttgcaataattattttagcactgcttttcactttaaaaagctctggtttgtacaacaattatgtggacaccctatataatatggactctattatctttctgaaatcgattctgcggttccatagcacacactccaacaccacacacaccgagccctggtgctgagttctcaggcctctgtaatgtcccacggggggcctgcgggtgcctggctcaccagcagctccttgctctccttcttttccgtggaccggaacacctcacagtcctccagttccttcttcaagaccctcagcctggactccaagagctccttggcctcctgcaccgcctcgtccagcggcagcacggcgtgctcgcggtgctcgcgggcgcggtcgcacaccacgcagatggcgcgtccgtcgtcctggcagtagagcttgaagggttcgccatgctgcccgcagcgggcagccgctgcccgggccgcggccgcctgagacccgtgctctcccggggcagccgcgggcaggctgaagcgccgcaggagcgtggccactgccgccagctgccggttgggccgcagctgactggggcgcgcgggctcgcggcactgcggacagggcagtgggaaggggggcgcgcgggtggcggccccaacagaccccgcgcccgggcgctcccagcagcgccctatgcaggcgcggcagaagctgtggccgcactcgacggacaccggctcacgaaagagctctaggcagatggagcacgtcgcctcgccctgcagctctgccgccagcgctaga

SEQ ID NO: 474393 - DNA, 1000 bp, Homo Sapiens; identical to SEQ ID NO: 246569

SEQ ID NO: 474394 - DNA, 1000 bp, Homo Sapiens
caagagcaaaaccctctatattcgtagctggattctgcaggcttctaatatttattgccaccagctaaaaacattctcaaaccctgcatccaagtgtgttccattcctgtccctaatgctgtgaagtttgggcactttctcccgtgcttttgcaaaattgtgattgttgatgatcagacagtatccccgaggtttgcttttcatttggtaaactttgtccaaagtcatttgaaaattcatcaggacttccttcaaggctgctgcttctctctttgctgaattcttcatagtcgttgattatcttcagcaggctcttgttgatttgggcacagactcttttcaggatgtccaactttccttctcccaggatgaccctcttctccatctctatgaaaatatccagcaggttcatgtcatcatccagtttgcatttggagatttcctcttgcaaaagaaacttaaaagacctcaattctgatctgctcacttcttctgaaatctgatagagcatgaccctgtaggcagaaatttgagccctgcctggtgtctgaagttccctttccatctcctcctttctagtgtttaggtaggtaatcagcaaatccagtctattaattcggaagagcagctccttcaggaaggacagattgctttcctccaacattctcttttcctggagtctctggaataacatcaaggcatccttgatgggttcttgcttcctttgcggaatgtagtccaggctcaggaacttgagggaggccagatcttcactgtccagttgttccccaatatcataaagatttctgctgaagtccatctttttaaaaggcaggagaatataatctcaatattcccaaggttcaagtgaccaactcaagggctcaggcggccaaggcccaacctcacgtgcccagaaagtggacgcacccaggggctgctcagacagcagatgctccagaaatgctaattctcttgcccactggtattcctcaggcag

SEQ ID NO: 474395 - DNA, 1000 bp, Homo Sapiens; identical to SEQ ID NO: 343241

SEQ ID NO: 474396 - DNA, 1000 bp, Homo Sapiens; identical to SEQ ID NO: 160542

SEQ ID NO: 474397 - DNA, 1000 bp, Homo Sapiens; identical to SEQ ID NO: 160543

SEQ ID NO: 474398 - DNA, 732 bp, Homo Sapiens
tgcggattgagaagcctttattgtgggaggatcggggtgtctgagggccccgggagtcgggatgggcttggaaggctggggggaggggcctttgaggaagaggaggcctggaagcgggggtcatcacaggtcaaggggtggtccttgggacccccgcagtcagtggtgctgcggcggcagagtgcacattgacagctgagagccacggcgtaggagaccacggggttcacgccgcgcgggcagccagggagccggatggactcgaagcgcacatcgcggtagttgcacaccacctgaggcagggccggcaggaccccctgcagcacgcgggtcatggtggggcagtagccggcacagatggtggtgttgacggtgatgcacacggggcagccctccttctccacagccagggtggcattgatggggcggcaccgtggccgaagcggctccttggatgcccatgtcccgcccatgctcagcagcagcaacagcagcagcccctttgacatgtctctctcttagcgggatatcttccgcaagcactggggatgtggacatggaaagtaaattgagtctccgtgggggagtgagacagggagtgaggggtgttggacgcggcacgggaacccggccggagtcagcggacccaattggctgctctctctcagatacagttccccttcctccctccagggggcgccacggaacgcagggccctcactggccctgggg

SEQ ID NO: 474399 - DNA, 948 bp, Homo Sapiens; identical to SEQ ID NO: 343243

SEQ ID NO: 474400 - DNA, 1000 bp, Homo Sapiens; identical to SEQ ID NO: 343244

SEQ ID NO: 474401 - DNA, 1000 bp, Homo Sapiens
ttttttttttttttttttgcagggcactggcagttgaggttgtctgtttattggtgaggaaactcctcgagagttaatacagtgtaatcttttcccagaggtgtgtagagggaagggggcctagaggcatcccagagatagcttatagcaacagtgctttgaccaagagctgctgggcacatttcctgcagaaaaggtggcggtccccatcactcctcctctcccatagccatcccagaggggtgagtagccatcaggccttcggtgggagggagtcagggaaagaacagacaacagagcagacagaccagtgatgaccatgggcgggagcgagcctcttccctggaccggggtggcagaggaaagcctaagtgaggggtcagactataaacgttaaggaaccgagatgagcacctgcttcaagtgcacccttcctacctgacaaccagggaccagaactgcagcctggggacagcactgggagcagctaacagagcactcacctgccccagcatggccgtcgcagccctggtcctggcaagggaggctccctgtggagtaaggggagacgagggaagccgctcctggaactgtgagggagagagggatggatttgcccgtcaggcccattcacgtctgacagtacaggccactcagtcataaactcaaacttaactgaagacttcagaaacagagttcctgagtgagggaaactgagatccaagggcgcctgcacaggacaggaagacagagactcagagccagggatggggcaggaagaagccagtgtggcccagcgccacttgctggcctgcctggaagagcagaaccctggaggcggagacccagcccagagctcatggcaggggctgggcagggtgaggggcggaagtgctcagcaggcgcccctccctggaccctgggaccctatttgccccttgggtccgtcacagcatccgcagtcatcagaatcaggttgggcagggctgaatcaccgctg

SEQ ID NO: 474402 - DNA, 1000 bp, Homo Sapiens
tttttttttttttttactttaaaattacattttatttctctttatgaatatttgctttttgttttttgtaaaaaaaaaaaaggttcattttacatcttcttcaagagtcttgtgcctcctggtaagtgcattggtttgtttcacagtactctccacgaccaaggacggttcttattgctggaaggagtgagtggatgtccacgccagggcggggctggaggacataagaagaatcggggccctggcaggaagcctggggcctgtgctccaacaagagcaaggaggctgaaggagcagaccggggctcagctgagcgtccgtggccggacctgcagcctctccagggtgttcctagcccttcttcggtgaggaagggcagaaagaaggggcacgggtgaaggtgggtcagggggcaaggtgggctgggggccgggcatgcagtgggaggggtgctggctcctgcctcgagtgtttgctctcactcaagaaatgcgggttcgggggtccttcaccccctagcagctcaggaagcccctttccattctggtctccagccccacctccaggaataaaccagcggcctgagacccgcttcctgaacccccagggtcctgtccctgctttagtgcaacaaagacctgagtggagaagtctccagtgaatgaaagctgagtcccagccctgtccccacccatcctcagacatgcagctgggacccactgttcccctaaggctactgcctttcggggtggcacggcctccatcctcacaagagaacctgcagtttctgcggggaggtcctggcccccatcaggggccccctgagcaccgtgccagccggcagctccagcccagtgtgtcccaggacagcctcctggcacgagctgggcccggagaccgacggcagtggctaaacggtcattaagcaccccttgaataaacgcaatagcccgtggacaaaggagcagggcagggactttggttcccacaccgtcccacg

SEQ ID NO: 474403 - DNA, 1000 bp, Homo Sapiens; identical to SEQ ID NO: 343245

SEQ ID NO: 474404 - DNA, 1000 bp, Homo Sapiens; identical to SEQ ID NO: 160544

SEQ ID NO: 474405 - DNA, 1000 bp, Homo Sapiens; identical to SEQ ID NO: 160545

SEQ ID NO: 474406 - DNA, 1000 bp, Homo Sapiens; identical to SEQ ID NO: 343247

SEQ ID NO: 474407 - DNA, 1000 bp, Homo Sapiens; identical to SEQ ID NO: 343248

SEQ ID NO: 474408 - DNA, 1000 bp, Homo Sapiens; identical to SEQ ID NO: 160546

SEQ ID NO: 474409 - DNA, 1000 bp, Homo Sapiens
ttttttttttttttttgcaagatttaattcttcctttaatataaataaggcagcatgaaacaccaagagccccactgctttctgctttagaagcagctttggtgcagaaaagattcccgtttccccaccgagttctgttgtctctgtacacacaagaagccagaagatatttttttttcagtgaactttctcctggaagcaaaggagaagctatgggagatccaggcatggttttggcttctggaggctgttttttggttactggggtctcttcaaagcaaaacgggatcaggatgaagagggcgaaaggcatgggccataaataaataaggaaatttgccccgattctacaaatgcatctgatggaatgaggagggtcaggctgtgagggattgggggtagctccaggctgctgttagggacacacttgagctggttcattccctggagtgccccgcaactgcgtctagggagaggcaggcccaagcacatgttcagtctaattccagctcacactggaaggcttcctataggtttggttgccctgatcacagccgagctgccccaccaggaattaaccctggtgggcaaagggtccatcttctcaagctttctgaggctggttgagagcactcctggggatgggggaaggatctccttccttcagtttgtggggtaactgggcacccctgtcaagttggttatgctctcgggaaggcatggccggcttaaaccctggaggaacacggtatattcttgactccctggccccctgcaagggtaactgaagtaacggtgagataggaaatctcaaagggccagtgaagccacaggtggaaaagagccttcctgatccccctgaaccagacctggagacggagcccagctccaaccacagagcttctgccaggctctttgggtctgggtcatctgtgtggtcagcagtgcccacacagaaggggtgggttctgtgcagtgagggagccccgctggagtgagg

SEQ ID NO: 474410 - DNA, 1000 bp, Homo Sapiens; identical to SEQ ID NO: 246570

SEQ ID NO: 474411 - DNA, 1000 bp, Homo Sapiens
caaataaagcaaggacattatagtccaaatttaatttttacctctaacaaaacttatgtattacatggttaagagaccaaggctacagttttcacatgtaaaaactgtagccattaagcaggttaaacttgttttagatcataccagaacagttgaaaattaacagcaatatctaatttcttgttccatagaatgaatgctatgagaaatatatcactggacgaggcttcctggagccaccccaagcctgtacatggcaagatggcagtgctgcaagcccactgcctgtacattcagtgtaagagcattcgtttttccattgagaacccctggctattaaaacaaactatcataattttatgttaaatcatagctgccaatcagaagaagtactctttctgattttcattgactgcattttgtatattaagctcacttttcagaacagcctcagcactgtctacattctctgacctttttgcctcacttcttttatataaccttttctgctgataaatgcgaacagctatggcagtgatgcaaagcaagataaaaatcacaacagctatcagacctccaattactgcagagtcacttttgattgcattagcaaggggctctctgtcatctattgttccagaatgatctgcaaacgagtgtgtcctttcccttgatgtggcatcagtgccaggctgggccatacagctggactcggtcacgtgtcctgtaacagtgacagggtctgggtggctggggtgcagagctgccttcagaggggccacgtggctgagctgcactgcagagaggcagcctgtgaagccctgcgcacctgccagtgcagtctcctggtccacatcactgtgttctaaaatcctgcccaataccagagatttgactgcactgaattctgtgcctgatgacaggtgaacttgtctccttctattatcgtcaatctctataaagaccactccttcttctctgttaatcattatgtggtgaa

SEQ ID NO: 474412 - DNA, 1000 bp, Homo Sapiens; identical to SEQ ID NO: 160548

SEQ ID NO: 474413 - DNA, 1000 bp, Homo Sapiens; identical to SEQ ID NO: 343254

SEQ ID NO: 474414 - DNA, 1000 bp, Homo Sapiens; identical to SEQ ID NO: 343255

SEQ ID NO: 474415 - DNA, 1000 bp, Homo Sapiens; identical to SEQ ID NO: 343257

SEQ ID NO: 474416 - DNA, 1000 bp, Homo Sapiens; identical to SEQ ID NO: 160549

SEQ ID NO: 474417 - DNA, 1000 bp, Homo Sapiens; identical to SEQ ID NO: 160550

SEQ ID NO: 474418 - DNA, 1000 bp, Homo Sapiens; identical to SEQ ID NO: 343261

SEQ ID NO: 474419 - DNA, 1000 bp, Homo Sapiens
ttttttttttttttttttttttgaggcttggaattgatttattaagcacatcccttgccaccctcccaccttaaaagttttcagtatcaaaagaagctagcgcaggccacccgagtccctgaggttggagtcctagcatagctcccctccctcaaagagggacaaggggtcaggggcagagcaaaaatccagtctgcttcaaccacggagactgcctttgggatggaaagtttctggagctccctccattctattcctgtggggcaggaacatgccagggctgctggtaaatggcaggggtcacctttaccagggcgcaggcatagtgtggcccctgcctgccctggggccaccctggaacagtaagaccctctgggaagggaagaaaccagacccagccataagctttctccccttctccctcaaatcgccccttcctcctccccaaaatcaggctatggcaaaggggctggcagcaggggaatggaggttttggaggggaaggccagccatgcgaaggcaaggagaaaaggaggatggagagagccccagccatccccattttccttcctctgcctccgaggggctgcttctggagggcactgttgtgtggggaccctgtgaggtttgcaggaggcgggcaaaggggcaccagacagggaacatgcacacaggcagcctggccatggagagctcctggctgtccgcccaggtggcgccttgggcagagctggcgctccacaagtgattattgatggtgacaggattccctcatcctgctccaacctctcaactgtggacacattcaccggcagtcactcatctcacatgcccaccagcacgcgcacacacgttcccctaacccacgctaacacacccaccccctgcacacacacactttgaagccacacctcttccccgacaacacccgtctccacactgcgcacctaggcctgagctcacacacacccaggcccatgctcacggccctgtcacctat

SEQ ID NO: 474420 - DNA, 1000 bp, Homo Sapiens; identical to SEQ ID NO: 343262

SEQ ID NO: 474421 - DNA, 1000 bp, Homo Sapiens
ttttttttttttttttttttttttttttttttttttttttttttttttttttttttttttttttttttttttttttttttttttttttttttttttttttttttttttttttttttttttttttttttttttttttttttttttctacaccagagatccatttattacagtcctgcaaccctgactgcccaccccttggggattcttgcctctgtcccagagatggtcaggcccagaggaaggttagtctcatgcctgctgttagaggcgcttcattgttctctttatccagggcaggaagtgtgagaccttgatgtagactcctggaggtgtcccttttttgtttccataggagagaataccttgggctacgtccttacacacgaggggccccccggagtcccccttgaaaccggtctgtgtcttctttggatcccccacacaaatctcagtggctctgctgtaattgccatggaagagacgttcacactggcagtccttctgcactgtcagcaacacttcctgcagtgtggttgctaaagtgctcattgagacataaccccagccagccacactgcacagctgccctggcttcacctgggccttgctgctaggtagcctgagaggccgcacagctgtggtccacttggcctttctctccagctgcagtagcatgatgtcgttggagaagttcttaggattataggctggatgggggatgggtcttttcacagggataaactgctgggtccgctcctgttccttgatattgtgggcccccaaggtgacatttatggagcttccctggcagtgagcagctgtcagcacaaagtcctttctcactaggatgccgccacacctcttccgactcttctcttgcagaaactgaacaaaggccatgtaggggcgggagtggggcttggcctcatggcccccgatgatctcctctgtcccagccccaggggtcagaagaaaggccaacaggaggaggaatggctgc

SEQ ID NO: 474422 - DNA, 1000 bp, Homo Sapiens; identical to SEQ ID NO: 343263

SEQ ID NO: 474423 - DNA, 1000 bp, Homo Sapiens; identical to SEQ ID NO: 160552

SEQ ID NO: 474424 - DNA, 1000 bp, Homo Sapiens; identical to SEQ ID NO: 343265

SEQ ID NO: 474425 - DNA, 1000 bp, Homo Sapiens; identical to SEQ ID NO: 343266

SEQ ID NO: 474426 - DNA, 1000 bp, Homo Sapiens; identical to SEQ ID NO: 160553

SEQ ID NO: 474427 - DNA, 1000 bp, Homo Sapiens; identical to SEQ ID NO: 343269

SEQ ID NO: 474428 - DNA, 1000 bp, Homo Sapiens; identical to SEQ ID NO: 343271

SEQ ID NO: 474429 - DNA, 1000 bp, Homo Sapiens; identical to SEQ ID NO: 343272

SEQ ID NO: 474430 - DNA, 1000 bp, Homo Sapiens
ttttttttttttttttttttttttttttttacaccagaaatattatttttttaatacacagaatgtaagatggaattttatcaaataaaactatgaaaatgcaagtgggctcctatgccagaaaaacccacctggcgttccagatgcaagagggccagagcagaggcctggttctggggaagcctcaggatgctgcccaccaaggagtgatttccaaagagtaatccagggtgcccttttcccttctggggaagtgtggagaggtagagccccagaggagaatgtaaacaagcagccagcacctctgtataggcccggcctggatcagagagaggggagaactctgcagggtgtgggattgggctcagggacctccgagtgaggcagggactccctgctggctgctctgcagcagctgctggaacagggagtggggctggttgcgcagggtggccggggagtccagctctaccactctccccgcttgtagcaccagcacccggtctgagttcaggatcgtgttgagcctatgggcaatggtcagcactgtcttgttggcaaagcgtttgcagatggtctgctggagcagctggtctgtcttctggtccacacttgctgtggcctcatcgatacacaggatcttggcatctgtgaggagagccctggccaaacacaacagctgcctctgcccaagagataagctccggcccccctcacccagctcaccatccagaccacccatggatgtaatcacctcactcaggtggcactgcttcagggcctgccacaaggccctgtccttatgtaggccctgggggtccaggttttcccgaacagtcccactgaacaaaaagggctcctgggggatgatagccaactgggatctgagctgggccagctccagctggctggtgtccacgccgtccagcagcactcgccctgaactgggctctagcagccggaagagcaccaacaacagggaagacttgccggagcctgt

SEQ ID NO: 474431 - DNA, 1000 bp, Homo Sapiens; identical to SEQ ID NO: 160554

SEQ ID NO: 474432 - DNA, 1000 bp, Homo Sapiens
tttttttttttttttcgttgctcattttatgattaacagtatcccctgaggcctcccgcccaccctcaccgcggctccatctccagattcttccccagccactcctggctgcttcctcctcaggtgccgccaccttacggagctgaactcggtcacctgacgcttcagcaagcaggggcttgtcctgaagctggggccgcgggcggcagggtgctcagagccagttcatcctgccctaggatgccaccttggtcctcagcagtcacaggaccactgggtctgaagaacttccccatggcacggacctgcggcagctcagagaaggtctccactgccagcagcatggccaagagtcctagaagcaagtaacccccttctcaacgctgccaccagagctcttcgactacccctcccacgccgtgccctggagtgaggtccctccacctgcaaggcccagccccccagtgatttatgggagtcctagtccaggctcctcttcccccttcccccacacgctgttaggtggctggacttaccaagaagtgcgagctggcccaggtggtaaatcacggggtgcaggctgcggccgcggccgggcagcaagtcctccaggccaatggtgctgagcgagctgaagcagaagtagacggcccccagcaggctgcagtcgccctgaaggccccacagcaccagcgctggcagcagcacaaagctgctggccaccagcagtcccagtgcaactgcctgcagcagcgcagccctggccggtgacagctgccagtggaccgctacccaggcacgtgggcggctgagcacaggcagcaggcaatggcgcagggtggccacgagagctaaggaggctggcagccccagggctgcatagaccatgcagaaggcctttccgcctggcgatagtggggccatgtggccataacctgtggtggtgaggatgctggcagcgaagagcagggctgagggaaggtcccaggtcctgccctct

SEQ ID NO: 474433 - DNA, 1000 bp, Homo Sapiens
ctttgaagcatttacttagctcaagtctgaagctgtagatactggaagacaatgcaccttggagggtgggcaggacacagttgattgtctctacagagctgtgacgggggcactgagccccgcgggtgtctgtggagggggctccggtccaggtactgcactggacactgctcatccctgggtgtcaggcaggtggctgcaccctaggccaggcgcagaggcctggcaggcaggcttggcatggttggccggggcgggacgtacactgggtcgccgctagctgcaccttcgcacagatgcctccgagcagcgggtgggcgtgggccgcacagcgcggcagggccttggctaccacacgcggcatcgctccttggggtgcatgggggtgccccgggcacagtggaacgtgtctgcgaaggcggccaggttctgcagcgaccccagtaccctgtacttcaggggactgtggacgtctgtcttgatggattggatggcgaactcgggccggtaggacccgcaccacacctgggcatagttgatgaagaagagctgctcatgggtgagatccaggccgggcagctgctggtccttgccaccctctgccatccacttgaggtaggccttataggcttgccgcacccctccgttgtcagcaatgttttccccaagggtgttgaatccgttcacgttctgttcgtctgccaggtcccaggagtagttgccgtactggtagatcatgcactctgactgctcccggaagtgctgggtggagaagttactccaccaatccatcatgttgccattcttgtcgaagttccggccattgtcgtcaaagccgtgcgtgatctcgtgcccgatcaccatcccaatgcctccaaagttcaaggcctgtggctgctccttgctgaagaaggggggctggaggatcccggcagggaatacaatctggtttcggtttggggagtagaacgcattgaccaccgccgccccgatgatccag

SEQ ID NO: 474434 - DNA, 1000 bp, Homo Sapiens; identical to SEQ ID NO: 160556

SEQ ID NO: 474435 - DNA, 1000 bp, Homo Sapiens; identical to SEQ ID NO: 343277

SEQ ID NO: 474436 - DNA, 1000 bp, Homo Sapiens; identical to SEQ ID NO: 157261

SEQ ID NO: 474437 - DNA, 1000 bp, Homo Sapiens
ttttttttttttttttttttttttttttttttttttttttttttttttttttttttttttttttttttttgagcatctctgttctttttaataatttcagaataaagtctcatttcagtgcagtgggctgggtggtgggggagagggttgaaagccccacttgggtccccgagggtccattgagccctctcaggccagctccaggaatcctggcctggtcacagagcagagttgcttgcagggtcctagtggccatcgggcctgggcaggacatcatctctcagagggtcagaggctcagagctggtgcagctcagcaggtcacggccctccaccagctctgggttctcccgcatcatgtggtggctgcttttcccccaccagggcctcagctccagcagctggtgggtgagctgagcacagcgtacagcaaacacgttctccgccacgcagagcactagggcgatgccccagaggcacaggctggagctataaatgcgtgtggggtcgaagggacagtcaggtgcgagggccagtagttcagagctcccaaaagtgcaggcagccagcagtgccttgccctgggtggcaaaggtcatggcgatggaggccaagaggccgagggcacaggtcagagaaaggagagcacaggccacgctcgagctaaacactgtccagcgcaggggggtgctagggaggtagcgtgacaacacgatggctgcgatgcctgaagtgatgaccacgatggcggaagtgacagagaggatgttgaccacgcagtactgcagagccaccgcatcttgaggggtgcccacgtagcgcagcactgtgccatggaacagggcagctgtgatgaagctcacatggcccagcaccaccagcaccaggcctgtcttcatcagcaccttccggaagtcgcccacactcaggcctccgaggcgcagacacatgtcggctccgcgctggtcccgcccccggcttcagcgcggctcccgaggctg

SEQ ID NO: 474438 - DNA, 1000 bp, Homo Sapiens; identical to SEQ ID NO: 343279

SEQ ID NO: 474439 - DNA, 1000 bp, Homo Sapiens
gcagagatggaaaggattattactgtttattaacacaggaaagcacaggagcctgcttccaaagagggactgtcccgtaattgagagatgctccaaggctgaccatcctccttctcctgctgcacacccagcagccatctatggctggatttggagaatttctggtcaaaccggtgagtatgaggagagcagggcagttggggagagaggtcccagcccaattctgcccagagaagctcccaaaagagagggaagtgtcctgatgaagagcccatgaaaggggtgagacccaggaggctgtggagattgctgcgggctcctctggtcagtaaggaaccctgacaagatccctaggatgggggtcccttagtctcactgaagttcttgtaacttgggatgggggccaggtcagcctcctctgatacccgaagctacacatctggccttccccacttctagaggaggggtcttagatggtgctgtgggagcagacaagccctcagcaggtcgcaagcaggtcccctccaaaacccctcctgctggaatcctccagatgtgaggagtaggagcagacagatcaaggctgggacatctggcagggtttaacatccacagctggagggtgagacctctccctgtggatctggagaaataccttcgggctccagcctattgctgcccttgccttgtcatccatgacagggttccgcgccctgtccagcctccccgggtccccctcagctgctatagcctgacgtgtgagtgctgggcctgcgcagccaaacatctggcaggtctggctggctattgggcagcaccacagggctgccatcccctggcccccctcggcccttccaggacaagctgctgtgatgggaagcgggcaatgatgggtcatacactgtctccctcagcgccagccacagggtgtcccgcttcccattgagctggcctcgctcaaggactggctgcccagtgtcatccaggtcatctggggaca

SEQ ID NO: 474440 - DNA, 1000 bp, Homo Sapiens; identical to SEQ ID NO: 343280

SEQ ID NO: 474441 - DNA, 1000 bp, Homo Sapiens; identical to SEQ ID NO: 343281

SEQ ID NO: 474442 - DNA, 1000 bp, Homo Sapiens; identical to SEQ ID NO: 343282

SEQ ID NO: 474443 - DNA, 1000 bp, Homo Sapiens
tttgcaaaatagtaaaacatcttgttttaatccaagcaaaactttgtcttcagaaatctgtggagggttgggatacatgagtaactttacagtttaccagatgcttttgtatttatagtggtatttggttttgcttataggaaaaccaaaggaatgttgggggagcattcaagagtcaacaaaacagaatcatcctcttaggctggagggattaccattttaggcagtgagagattactgaaatgtacccataagggtcctagtctctgcccacagccaataagatgcaaacttctatctcaggcagtgtgtctagaggagtgaaagaggctcccagatcttggcattttgaaaatggaaaaggaaaacaaacaaaaagtatattcgtgtgaaaatcagatatcagaaaattcaaacaagcaccgtccaggttcctactgtcttgagctctccagagggttatattctgcttccttctcctttagggtttcctaaaaagaagggcagacttggagttaagagcaaagatgtatagttaggtccattcaaaggcataacagccagcatcacaggggacagacgttctttttaaaatgttccttgagacaggggtttatctttcttgaatttggctatacctgttttcctccagcccctcagctggaggtggtaactaactaggaattgctgccagagaggcaatttcttccttttaagtgaagtgctgctatggcaaagacatgctgcttcaagggttaaactttaaaacactcattttgatatacaaagaaattataaacaaagcacaaggcaaagttgcaatttcagtttgtgttcaaagtagtaataatttcctaaactgacactgttgttttgcttagtccagacctttgaaaacaaacgagttttacaaaagctatattagtaatgtaacaattagtgcactaccactattttcccctctttttctgagtctcagagaagatgaagttttcttgat

SEQ ID NO: 474444 - DNA, 1000 bp, Homo Sapiens; identical to SEQ ID NO: 160557

SEQ ID NO: 474445 - DNA, 1000 bp, Homo Sapiens; identical to SEQ ID NO: 160558

SEQ ID NO: 474446 - DNA, 1000 bp, Homo Sapiens; identical to SEQ ID NO: 343285

SEQ ID NO: 474447 - DNA, 1000 bp, Homo Sapiens
ttttttttttttttttggtgttttctcaactttattgtggacaggagaagggtaagtagacttgaaggttttttattttttaatgaagaaacaatttatcctgtgtttgataccagatgagactgtaagggtcacatactccttaagcctacacatcaattccaggtgaagtgcttcaggcttggctcattctgacacctaagaagggccctctaggccacggttgggaagactgtttttgccttagcgccgtgcaggtttgggcattatataaacttttacaggcttgctgaagggaatggtgccctcgatgctggtttccacctgtggtgacatctcaccaccctccatccaggggcattttggaatgcgagcactggagttgtaggccagcagcagcctcacttccacctggcatgcctctgtccaagcggtgtgggagagataaacctgagtgatgagccggtgccgccctgggccaggattccggaagtctgcaggcttggggtgaatcatctgagcctggccatctggatataagacctggaccttaacagtgttctgaggatcctgcacatgctccagggttgcatcaacatccagggcaaccaccaacccagaggtaaaccgcaaagggttgtctgactcgcccgctggctcgatgatggtggctgaggctttgtggatctgctctggaagcgggagatgcagaaaggcactctgtcgcagcatggtctgtagaattttgaccacttctgcaggtttggatgtcatgagtcggggcataaggtcaaggagtttgtccacaaagctgtcctgcaagtggggcaaatcagcgatgaaatacctctgaaaaaagtctacttcctgtaaaaatttttcacacatcccaaataaggggtcaagtcctcgtgtagttcgtgctgttactataagttgcaaagctttggcctgcagcctcatgtgatgtataatcaccacctgcttattctccacacca

SEQ ID NO: 474448 - DNA, 1000 bp, Homo Sapiens; identical to SEQ ID NO: 343286

SEQ ID NO: 474449 - DNA, 1000 bp, Homo Sapiens; identical to SEQ ID NO: 160559

SEQ ID NO: 474450 - DNA, 1000 bp, Homo Sapiens; identical to SEQ ID NO: 160560

SEQ ID NO: 474451 - DNA, 1000 bp, Homo Sapiens
tttttttttttttttttttttttttttttttttgggttcagtttacacatttattatacaaatccccttccagtgtgggtaatgtcttgggtccagatccactggtataaaaagaaaagcttaacgccaggaaaagggggtaggggaacccccagctccgaaaatcacagacaggtatcatagaaaacacaacttgtgtgggtttgcttaaaaagtggtggattggggctgggtgcagtggctcacggctgtaatcccagcactttgggaggccaaggcgggcagatcacgaggtcaagagttcaagaccagcctggccaatatggtgaaaccttgtctctactaagaatacaaaaattagccgggcatggtggcgtgtgcctgtaatcccagctactcgggagggtgaggcaggagaacccaggaggcagaggttgcagtgagctgagattgcgccgctgcactccagcctggtgacagagcaagactccgtctcgagaaaaaaaaaagggtggaaggaaagccaaggaaggtgtgagtggtgagtggcccgtggcccgtaggcagacctcacctgaggatttcactggcatctaccgggtgcccctcctgtggggcctcctgactgggggtggtcagggcagaggccatgggcacagagggggttgggctctttcaggcagacctcccctgaggatttcactggcatctaccgggtgcccctcctgtggggcctcctgactgggggtggtcagggcagaggccatgggcacagagggggttgggctctttcaggcatcccacccagactgcagtccttccaagtgtgggcagagagcccactgccccaactgccctggcgatgcgtggcagggatttctgttcacaccggagtctcctggctgccctaaatggccctgagacccgatatggtccattttatggagggggttcctgaatggaacctggttgggcatgggaacaggaatgaacccaacca

SEQ ID NO: 474452 - DNA, 1000 bp, Homo Sapiens; identical to SEQ ID NO: 160561

SEQ ID NO: 474453 - DNA, 1000 bp, Homo Sapiens
ggtggaatgctagctcccattcatttcccacctgcactggacgttttctgaatctccttgaagtccgggagatcttcattccaaagctcttcacttttctgcagcattgtgaccccatctggctggggaactggaagtcccagcgtgacctcattttcagaattctgctgagttatttctaggtggttcttcagtccaggttctggatccctccatgcctcctgggagctgctcactatctcctggccacccctgctcttctctgcaggaattcccagagccacatcaggcagggcttggcatcccgttctttaacgtaatgtaatacatttcacacgtcttccgtctccatttggattatcaacatgacgtacataacccgttccattgaccggataacaagcagccatggcttttgtccggcccggggacgcgcgaggcggggacgcggccgccgcggggtcggccgcggacttggcctttgccttggctgcgtccccggaggcgctgtcccggcgcctcgctgccttcctggcctccagggcccggtccctggacggcggcgctgcagcgggcggcgcggggccggagtcctggtgagggccccctccgtggccgagggcgccctcgctgccctggcacacgagcttgtgcttcttccagtcctggcgctggcgctccttgcagcagaaggagctgcggctgcagcgcagcaggttctccatcttcccgcacagctcgcagtactgccggtctcgctcgctcgagctcggctcgccgggcccgcagctgtcattggccatggcgaccgcagctgagcaggaggggtgcggccggacggcctcgcccgaggctccagcctctgtcttccaggttctttctgcaagtcttccaccagggccactgcctcctctccactctccggatgctgctgtctgacccagatctggatctcctggagaaggacagtcgggaactgttctaggaccagcaactccag

SEQ ID NO: 474454 - DNA, 1000 bp, Homo Sapiens
ttttttttttttttttttttttcacatctatggaacactttattttaaattcttttaataatattattatttttcagctgagtctgggtctcactctgtcgcccaggctggaatgcagtggcatgatcacagctcactgcggcctccaactcctgggctcaagtgattctcctgccccagcctcccgagtagctgggactacaggcttgcgccacgatgcccggcttatagggcactttagatggaaacaaatgactggatctttaactcctacctttctctcctctcttcctgtaatgttgttactgaaggcaggaagggagactccttggctaaagagcagagcaagagcctcaaagtggtctttgtgagccaccctggactactggttcagtagagggttgagtcaagcaatatttgaggacgggatataaacagtatttcttaaagttgtcaccaatttttcccccgatgaggccatcccagacccaaattagtcataacagagccaggacaataatcacatctcctgattctgagcctgaatgcttcccacaggactgcgtcgctcccactgctctgaggtccattgtgggggagagttgccactgggattccacctcaaggcctggggaccaagcctccaggattcctcttgagactcctccactatttcattaccatcccgccacatcttctagtgctatgccctggttccctttggaatcctctcaatcccaaagaaggcctcctaccacctctaaggcatcaaaggtgttagaaagtgccccaagactcaacagggcatccatctcatcatagaagacactggtgcctggtgtgtaggtgctcctggctttgcagtagtcggtcaggaggtttttgaaccgatagcaacattgctccagggtccacaggaagccatgttctcacagctgctcagccataatccggtacacctggtggtttcgatggcaggtgcggagtttttcgtggatcc

SEQ ID NO: 474455 - DNA, 1000 bp, Homo Sapiens
ttggtactttgacgttacgatgttcattttgtctccaatagaaaaacatagttactcggaacaatttgaaataaaactaagtttcttgattatcggtgggcttgaaaagttgcctgggaattaaattattcagtctcaaattctgaagtctggaagacacttgtggagattctcccaccataaaaattttgcttggactttcatcatcattcacaccacaggttcttttggatgctcgcgattttggtaaatcatcatctgtatctactccatcaggtgaagataattgccatctttcagcaaaggtgagtgtcctctcatcaggcgaagaggcctcgctccaggtgacatcatttgtcatggcgtggtctgtgactacagggagtggagatgctgacggtgtgctgggtcctccactgtctccagagctcttccgtggggacggaaaatctgctggaggtgcgccgctagaggagagcttactttgcaagaaatgtttcaaacgagtttttctaggaaaactgtttttcataatggcattccggagctgagactcctctgcaatcacatacactcggcagcggcccctggtcacggcggtgtagacatgctgccagtgctggcggcccgccttccccaccacatagacaactgtttgctcctcggacccctgaaaagtgtgaatagttcttgcccatgcatgttttatgcgacaatatttcattagtttcttaaaatccacagttacttccaggccagccatattattaatggtcaaagatcttctctttccaaaagttacatcagttacatcatttgttatgaaaaatatctctccattgcacagtcgaacgttactttcaaagtcacgcttatttttagcaaaatcaggaagcgtaccagaaaagtcttcactactggcatctagatcattattttgctgacttccagagatattttcaggtagtaagtctgagaggtatgcattcctggtacaaca

SEQ ID NO: 474456 - DNA, 1000 bp, Homo Sapiens; identical to SEQ ID NO: 343293

SEQ ID NO: 474457 - DNA, 1000 bp, Homo Sapiens; identical to SEQ ID NO: 343294

SEQ ID NO: 474458 - DNA, 1000 bp, Homo Sapiens; identical to SEQ ID NO: 160562

SEQ ID NO: 474459 - DNA, 1000 bp, Homo Sapiens; identical to SEQ ID NO: 343296

SEQ ID NO: 474460 - DNA, 1000 bp, Homo Sapiens
gaattcgggaactacaaaattcatttacaatttaaaaatactgaagattggcattgctttcttgtatcaaaagatgaatacacaaaggccaacatttggttaccccaccctctgactccatatttcaaagcactcaatgctaacataacctttcggtcacttagggcttttaagatttttataagccaaagtttactgagatataattttcatagaggaacatacatctttttaaagtacatagttctgtgagttttcaaatacataaatccacccacaatcaagtcatcccaaggaagatcccttacgcccctctgtggtcaacactttcccccattccagcccctagcaaccactgatttttgcccctacagttttgcttttccagaatgtcctctaaatggaatcatatagtatatagcaggggtgtccaatcttttggcttccctgggccacactggcaagaagaagaactgtcttgggccacacataaaatacactaacgatagctgatgagctttaaaaaaagttaccaaaaaaaaataataataataattacaatttctaagaaagtttacaaatttgtgttggggccacattcaaagctattctgggctgcatgtcctggccgacgagctgcgagttggacaagcttggtatataaccttttggaatttggctttccactgaaggttttttttgtttgtttgttttaaagaaagaagcagctttcccattgaatagcttgctacacagataacattatttaggattctacttcacattagatgaaaaggcagatttaggatcaaaatcattaaagaaataaaaatatcggccacatgaaccagaatatacatgcttataatcaatgttttgtttcaatgggatatatttaggatgctttctgtttttcactaaatgcaaattccttgagtaagaaacttttgggggaataaaatacttagaaaggactttaataatcagcctgacagctaat

SEQ ID NO: 474461 - DNA, 1000 bp, Homo Sapiens
tactcattttccctcatacttcggattgaccacagttgttacggcactcttataaataggattttcaccctgtaatcccaggtactcgggaggctgaggcaggagaattgctggaatctggaagtcagaggttgcagtgagctgatatcacaccactgcactccaggcgtgtcccatttggcattcattttctccttttcaaatttagcaaactcccttctgtcatgaattatcattaaaagcttccatatcagcagtaatgcaaggccaataagaacaattccagcaaccacaccagctacaattggaatgatgtctggaccagtgggacactctggattctccacaacatgaaccatgacctcgttgttcccattcactgaatacgtaaaatagaaccaacagtcgtcaacatccttctccttacaatgggacacaggatcaggttggaccggctggggtaatttgtcccgactttctaccttggtaatgttaaaataggaacattcctgtgtgcatgtgtctttcttttctcctttattgaaggctctgcactgaacacattctttatgctcagcacagacaccaaggcaggtctgacacatctcacacgtttgcccttgaaacttcggatctgtacacttacagacaccacactcgcagatgccccggccattgcagatctgtccgttgctggcttcacaagtactagtatccaaagaacagtcacatgcactgccagtgtagttggggttgcactcacacacacgacacttgcaaacaccatttcctccacaaattaagccattggatctatcacagttgaaattatcacactcgcagaatttgccagaataaatttcatttgtattatccctcttcctacaaacacactgtccgcagacgcactctccattgttactgcagatttctgaactgttttctttcctgcagtaagcatccatgtcttcactgttaacttcatctgtgctgcattcac

SEQ ID NO: 474462 - DNA, 1000 bp, Homo Sapiens; identical to SEQ ID NO: 343297

SEQ ID NO: 474463 - DNA, 1000 bp, Homo Sapiens
tttttttttttttttttttttttttttttttttttttttgcgggtcacccgtgctgtttatttacgcagctgtgttttctaacactaatacaatgcatgcatgtattgtgtgttacatggtgaaacagaacagatcctgaagttacacagatggcgtgtgcatgggggtggtgagcacccgcatggcctccgcaaaatgagtgccgcttaacaaacggccccaatgcccggcagtccggctgggcctttcagggcaccagattcctcgttccaggccaagtcagcgacggctcggggaagtctgcgccccagggcgtcggcacccccgggtggcaggaggccgggccggtgggtgtgccctggtcggggcctgcgctgctgcggctaggagccctcagtgtcggtgttgtcgctgcccgtggtgttctcccggtcctcctccccctgccgccatcctttctgcatcttcctgagggcgcgcttcctgcggtagttctcaaaactctctttgaggcgccgccgctccttctcgggcggctccccgctgctcaggcctgcgtcatgggggttccgcaaaacctgctcctggtgcagagctgcaaagggctgtttcgggctccccccgccggcaaggcagcctttgtctgagagctgggtgtcctccaggtcctgggggagtgagagctcctgggacctcctgggtgagccatcttccaggtcggagctcaggacgagcgtctccagctgctgccgcctgagcctgccctccacggccagtagctgcgcctcacactggaacacctgcagctgcagctcatccgccttctcgcccagctcccgcacctgcttgcgcagcgcgtccttctcctgcaggccccgggcgtgctgtgcgtgcagctcctcccgcgtggctatggcctggtcccgctcaatggcgacctcctccatctgcagcaggatggcctcgatgcggtccttgtacatcttggagtccttacgt

SEQ ID NO: 474464 - DNA, 1000 bp, Homo Sapiens
attttggatgcttcaaacaaactttattttgtgtctcgtatattgaacgctaacttaggtgtaggaggggaagaactgctgaactagagagccagtgaattatatactctcctgaaacttaatgacaggttttcatcccagaaacataaggggattcttgaggcctgcagttgcattcctgccgctcagggtaatcaataaaatctggggcaggcaagccagacaggatcattagggatttgttccagattgtaaatgttggacaaactggaagaatgaaggtcacatcaaaagtatgaagatggagagagttagctgggtcatagaaagacagcatattgttgtcataatccaggaggacacccagacgcttcaggtgtgggggcacatccaccagcatttccttgttgttgtgtctcaccacgaagttactattgcagcgagagaagacccatgaggaggcattcttgccaatccattcattctttggagctgatttgtaggcaatgccaattgcataccatgttgaggaacccatgaccacctcccaatagtggcagccactgtcaatgaatatatttcctgctgccccatagcaccctgtgccactaaacctctctggggtgtggctcttctttagagagctttcatccttctccatctgcaatccatcattggagatcttcaacttcttgtgagtcattttgggatccaatttaaagggttggctgtttgtttttagtcgggtaggttcactgttccggctgccggcttggtttatggctttaacgatgaagatgtagcgagtcccgctctggagtccatgcactgtgtaatggttctgtttaatgttgggaacaatcatccagctgtctactgaattatacaggctgatgaagttagcctggccagtgaatatggtgtactgaagctcataggagctgatgctgaactcatcatccgagatccagtggactgtaatggtgtcatgggaggcagt

SEQ ID NO: 474465 - DNA, 1000 bp, Homo Sapiens; identical to SEQ ID NO: 160564

SEQ ID NO: 474466 - DNA, 1000 bp, Homo Sapiens
ttttttttttttttttggttaaaatagtgaattttatgtcacgtgtattttactgtacacacccaaagtgaccacccagagcagccctgtcaaggggcctcatgcaaaaacccctggtcagaagcgccgcatggcagcagcaccacgggtgacatgctgggttctgcacggcacgactctcatctataaatgagcagaacgctttacgtcagcccaggaaagagcagaggcccagcccagagtggatctgcatcgtctgggggaggtgaagtctgcctgggtcaccccacccgctgccactgtccccatgaggagcccgggggacaggaggggcctcgcacggctcaccatcacaatctgggtgcccgggcgcaaggccatctggtccgccgccgagcccggggtgacccggtggatgaagatgcccgtgaggttcccgccgatgacgctgatctgctccagcaatgcatccccctggaacgccagcatggtgacctggctcaggatcctgcgggctggcctccgccgcatgaggacgccgctctccgagacatcaagccttccaggggagactggctgcaggctgctttccagctgcggaaggtctgccgtgtctaggagctcataatccaggtgtgggtcgcctgccttagctcccggcagggctcccgggtctccctccgggatctccaggcagctgctgaaagaccagggttcttccccgaagtcctcggccacccgcttgtacagggactgctggctggggggcgcggggctgctggagcggaagctgtccaccagctcgcggctggacgtggcactcaggtccgacaagagctgagactctgtggagctgacgaggctgcagtcgctgtcgtctctggggcagatggcatgcatccgcaccagccgctgcttctcccgtggacagggctccctggtcctggcttcctgcttgagcacacccggaggctctgcctgcagctggcgaagctgtgtg

SEQ ID NO: 474467 - DNA, 1000 bp, Homo Sapiens; identical to SEQ ID NO: 159615

SEQ ID NO: 474468 - DNA, 1000 bp, Homo Sapiens
tttttttttttttttttttttttttttttttttttttttataaaactaggcacatttttttaatgagctacaaactaaattacaaataacgttaatagcaagagcactcaaggacaagggtgacagagacaaatcataaaaaaaaatgcttttttttttttagcactgtcattacaaaaccccaaggtgcacatggcaacaaatccacccactatgaccaaaaaaaaaaaaaaaaaagccaactctactattggatataacctgaaatataaatataattgttcatccttcttttaaagaaatatttttacccatgccctcactcaatcacagccctgaaaaagtgtcagcattctcaaaatgatgcctaaaccctaacttctaactcctatggggtaggaggtggacgtcagaggaaaatgggatcagggatccttggcaactgaacaactaagaatactaaaaggaagagaaaaattcaaacatctctcacctgcctcataaggccatggtgaagcaatagattggaatgaagcacaatccctgtctcagggcctcccagattcctcatgcctgtagaagggacaaacaaggggactggggccaatcatttttctgcagccccacccgggctgagtcttcagtctcccagcctattaggtgaggcaaaacactaactagggtataaactgattggatctattttttcaaccgaattctttaaaatagactcctcccagtggttttgttttacttggttctcaaaagcaccaacttagcccccgctatcatttggcctttataaacattgtggcagcaggaggcttgggatcctggtcatcccaaacactggaaataataattatggggcattcagagattggtacggcaaatctaacgtgtaggaaggcttttttaaaattatttttataccaaccctcttcagcaataactaagagaagggggaaagggtggtggaggctaacttaagtgcatctaa

SEQ ID NO: 474469 - DNA, 1000 bp, Homo Sapiens; identical to SEQ ID NO: 160565

SEQ ID NO: 474470 - DNA, 1000 bp, Homo Sapiens; identical to SEQ ID NO: 160566

SEQ ID NO: 474471 - DNA, 1000 bp, Homo Sapiens; identical to SEQ ID NO: 343303

SEQ ID NO: 474472 - DNA, 1000 bp, Homo Sapiens
ttttttttttttttttttttaagagtccaaaaactttatttaatacaccaacaaacacagctcagggatttgggggtgcctccttccctgattgctgaggtcccttggacaaaatccctctgggtgcctcaccacagtcggccctggagagctcagtggccctgcagtgaagcggggactcaccaggactgtcagcacagaggtccccacggtgacgttctcgtacaggctgatgttgtacagtggctggctgaagatgggccggttgtcattttcattgatgagagtgatcttcaccttggcatagcccacatggtcaggcacactctcattggcaaagagatcaaagtcgtagcggtccacggtctcgtagtccagtgggatggccacccgaatacgaatgtccgccttcccctggacggaggtcggggagatgatgaagtggtgggagttgttccccaccaagtacacctcaaacatgctgttcaggcccaaattctcatccttgtccaccacctggatgaagagtggaagggcaaagccgacctgtgccagctcagtgatggccacgctgtactcggagctgttgaactccggggcattgtcattgatgtcaataaccaggatattgaaggtcgtggtgactgtagcgtcagatggggtgcggtcatcgttcagctccgtgcccttcacagtcaggatgaagccatggctgtacagggggttctcccggtccagcaggccattcaaggtcagcactccgctgatgtagtccagggcaaagatgctgttggtattccctgaaacgatggtgtagccaatgccccggggacgtcctttatcctggtctatggcggtgatgatgcgcaccgtcgtgcccggaggagaatgctcgtagatgttggtgctgtaaggcaggttgatgaagatggggtccatgtcctggacatctgtgatgatgatggccaagttggccagggtggacagaggcctggtcttg

SEQ ID NO: 474473 - DNA, 1000 bp, Homo Sapiens; identical to SEQ ID NO: 343304

SEQ ID NO: 474474 - DNA, 1000 bp, Homo Sapiens; identical to SEQ ID NO: 343306

SEQ ID NO: 474475 - DNA, 1000 bp, Homo Sapiens; identical to SEQ ID NO: 343307

SEQ ID NO: 474476 - DNA, 1000 bp, Homo Sapiens
tttttttttttttttttttttttttttttttttttttttactttgtaacgtttttaataagaaaagttttaaacaatttatttttggcaaaaacaggtagggcaaccaccaccccacagccctgagtggaataggaagacttggaaaagcacacgaagagggcagggacatgaggtgtcatcttgtagcagcttctgagaaagagctcagtccaatggcaagttcaagtccacgggtgaaacagccaggatgccctcccagcccccgtgggcctggatccagggcgtgaagctgtgcacgtgctccacgctgagtccggccagggtgccccccagcccggccacgcgccggctcagctccatggctagggccaggcgggccaggggctccggggaaggaggcgggggcccggggcatgctcggcttgggcgagagctgtcatcccggctacagaacagctccaccaggcgggcgaaagagtcggaggacaggcggaccagcttgctgcgcagggcggggtccgaggccagcttctggttaatgacttctgcctcctcctccagcagggccaccagcctccgcagtatggcttccttctctgtcgatgggggaccctgtaattctgggctgggcggagatttcagctgctcttggaccagctgttccagccgctgggccaccaaagcatagaagtctggagtagctgggcctaggtggagttggaacaggagacccggcagcctcaccacgcctaaggaaggcagctaggaccctcagcgtgtcttcccggagccccagctcttcagagcctgccatggaggcacctggtccggggccccaccgccgcctcctccactcaacttgcggtctcctccactgaactcgtacaaactttattagttcaactttcccgcgcctgcgcactgggccgggtcgataaccggcccagcgtagaaagggcggaacgctgggtgcacgctcaatttgcatgtgacgctcc

SEQ ID NO: 474477 - DNA, 1000 bp, Homo Sapiens; identical to SEQ ID NO: 343309

SEQ ID NO: 474478 - DNA, 1000 bp, Homo Sapiens; identical to SEQ ID NO: 160567

SEQ ID NO: 474479 - DNA, 1000 bp, Homo Sapiens
ttttttttttttttttttttttttttttagcagaaatggggttttaccatgttgaccaggctggtctcaaactcctgacctcaggtgatctgcctgcctcggcctcccaaagtccgttttcagctctgttttgcaaacactgagcaccgactccgtaccagacctggtagtgacgatgggggcagggaggcacggaacaaagccacctcctggaaggcattcacacactcctggtcatctgcacctcacccaccctgcccaaggctcaagagggccatcacagcctgtcagcaatgaaaggacccagaagacacaagtgaatatacctggccctcctgcaaactttgcaggccaggtggtaagaatgaaggcaaaaatatgcacgtgactaagaaggtaatgtttgctgacttgccagcaagaaagatggccggaaagaccagctgtcccgagcctagcgcggtggcccatgctaagcagccactcagtcaatatgtgatggctgaatggagttcgccaggcatttcagccctgaaactggacaagagcctgcccttccaaagtcatttcctgcaattagcagcctgcagtctttaggttcttggggctgcctcttctgcccttcataaatattgcctttcccaaggacactgctggcactggcagtgtcgtttcatagcaggagggagcagcagtgacaactgaaataaatacagccgtggcaccgatctcagaggcataagccagccaagtgcaacatcggagaaatcagtctggtggatgtcagccttgctggaaactgacaacctcattttctcaagctgaagatgctgcaccgcagacccttgactcagtccaaccagacagggaatgttcaccttcaagtggtagtgttgttctcatcagcatctccatccctttcagagggggtcctctaagctgcacccccatcacacacacttcaatctaagccaggagtttctgagcctcgcctgtcaat

SEQ ID NO: 474480 - DNA, 1000 bp, Homo Sapiens; identical to SEQ ID NO: 343310

SEQ ID NO: 474481 - DNA, 1000 bp, Homo Sapiens; identical to SEQ ID NO: 160568

SEQ ID NO: 474482 - DNA, 1000 bp, Homo Sapiens; identical to SEQ ID NO: 160569

SEQ ID NO: 474483 - DNA, 1000 bp, Homo Sapiens; identical to SEQ ID NO: 343314

SEQ ID NO: 474484 - DNA, 1000 bp, Homo Sapiens; identical to SEQ ID NO: 343315

SEQ ID NO: 474485 - DNA, 1000 bp, Homo Sapiens; identical to SEQ ID NO: 343316

SEQ ID NO: 474486 - DNA, 1000 bp, Homo Sapiens; identical to SEQ ID NO: 160570

SEQ ID NO: 474487 - DNA, 1000 bp, Homo Sapiens; identical to SEQ ID NO: 343318

SEQ ID NO: 474488 - DNA, 1000 bp, Homo Sapiens; identical to SEQ ID NO: 160572

SEQ ID NO: 474489 - DNA, 1000 bp, Homo Sapiens; identical to SEQ ID NO: 343320

SEQ ID NO: 474490 - DNA, 1000 bp, Homo Sapiens
ttttttttttttttttttactcatatcttgtattttatttcttatgaaaatggctacccaaagaagtcattgtagcaggctactattttaaggcagcaactgtataacttaaatgctaagactcactccataagacagaaaacccttccccagggctgtaatgggcatttaagtttcccaaacccagggacaactaatttttattacctattgaatagaaacaaatggattttaatagttcccctcccctatagctgaaaaactccacaaacaataattgactctatctacatgatctgttgactcacgccagaaatagttactaaaacacttagaattgtgatgttcaaactggcctctggctacttctggggggttatttggtgttacgcaatgacatattgccagcgacatggtgaatatactgtctttatagtcagcaatgtttagttgaggctaatcacgtatttattttttcaaaaggttaaatgtaagcttttcccagctgaaatatatagaaaaccccaatgtatgaaacaagttttaggcattggtgttggcagcggtagtgggctgatgtgtcctccctgcacacagctgggggcatgtagccccttcccctctgggtgaaccctggggaaatcttggcaccctcagcctcactgccttccaatctcagctcaaagactgggcatcctgcctgggaccacgcccccccccccccaatgtccctcaagggagtacaagagtcaccagcatgactgcccatcctgcgtgtcctcctttcaggtaaataagaggtagcatagctgggatttcgcgtgccgaagtctaggtctttatatctagactttggggcttttcagtctttttggtaacaacacatttcaacaaattaatacttctacttgtgttcgtgtagcactcagatccagtggcacctcatttttacactggagtaaacagcaatatatgttcccaaactgtgagaaggtgctga

SEQ ID NO: 474491 - DNA, 1000 bp, Homo Sapiens; identical to SEQ ID NO: 160573

SEQ ID NO: 474492 - DNA, 1000 bp, Homo Sapiens; identical to SEQ ID NO: 343321

SEQ ID NO: 474493 - DNA, 1000 bp, Homo Sapiens; identical to SEQ ID NO: 160574

SEQ ID NO: 474494 - DNA, 1000 bp, Homo Sapiens
ctaaaatgatagcactgtcatcaaaggtactctttgaaccttcgagaaagagtactcattccctaatgcaagatactcgaggaggaagctgcctgtcgagcaatccaacttacactctagggaaaagacccaggcgtccacgtctctgctcgcttcctcacctgtagaatatgagtctgaaacccacagtggtactgctgtcaaagtcgcccctttcagcctgcacaatacactccatatcacctgctctaagggccaggctttacctttctgaacgtggatgatgtccgggaagttagccagatgcccctgatacagcgctaataggtccatgacgggatccaggtcctgcctgggctgctccgcgaagagctcgccaatggcgtcataggcatctccggtgaaggcgatagcctggttcaggcccaccgagaaggcctgctggtccagctcaaaggcctggctgaggccgcggaaggactggcccaccttctgatactcctttttgaagccggtcacctgcttgcgcgcgaactcgttggccgtgtggttgagctgcagcgcgctgtcgtccatcttcttggtgaagcacttgaagccgtctatcttgctctccacctcctgcaggtcaagggcagcggcggggggcgtgctaagggtcaggaagaagttggcgcccaccatctcgtccttctcggccttcctcttgccctgcttccaggctttctcgtcggtgctgctggggcacgtcaggaagtgctggaagacgtcgcactgcgccagcactgggtggctggccatgtggttcatccaccagatcaggcccttcctgcgcttagagatgaagtcctcctcgaagcggccggtggcctgcttctcgggcaggtggggcacggagatgaccgggaacttctccgccaggcgcgcgtacagccagtcgaagtgcttgtagcgccgatgcaccggcacctgcgtgtgcgtgggcaccagcttgtaggag

SEQ ID NO: 474495 - DNA, 808 bp, Homo Sapiens
aaattattaatactttattatattagcactgaatatattaatttttctcctaacattttagatatcaaatataaagtgtagtacatacacacatacattgtgaatattttctgtttccatccgtgcaggtcttattaagagtcctgtgaagtggagggaattgggggtcagacaggacttgttgcagagcactgggtaaggagtggcatttctacagcttcttcagctgagtggatatgcacctcttactgcacatggtggatgacaggggtgacgcaggtgcagccaacagtcaccagcaccttctccaactggaaagaaacagagcagccttggtgcttcctccggacgaccagggtctcttgctggatgggaacggaattcatggagatgtcttcctttccttgagcattgatgcagcccaagttcctacactgggcctgtacaacttccgaggggtaccggttggggtcccaagtgacagtgtaattccagggggaggtggagcggctctcgatgttacgtgacatggaaacgcgctggttttcattgatgatgccaatgtcaagcttcatactacctcctggcacaggcgggcaactctcaggcttttggaaaaaagtatgtcctactttggggattttccgagctgccgcctcactcagaaaggcaagccccaatatcgacagcagcaagtacttgaccatggctgggccatgcagggtcttcactgtcatgttgcgctggtggcttactttgtgcaggaagctctttctgtgaatgtatcttcctgtgtatgcctgtgttc

SEQ ID NO: 474496 - DNA, 1000 bp, Homo Sapiens; identical to SEQ ID NO: 343324

SEQ ID NO: 474497 - DNA, 1000 bp, Homo Sapiens; identical to SEQ ID NO: 160575

SEQ ID NO: 474498 - DNA, 1000 bp, Homo Sapiens; identical to SEQ ID NO: 343326

SEQ ID NO: 474499 - DNA, 1000 bp, Homo Sapiens; identical to SEQ ID NO: 343327

SEQ ID NO: 474500 - DNA, 1000 bp, Homo Sapiens
tttttttttttttttatcaaatgaatactttattagagacataacacgtataaaataaatttcttttcatcatggagttaccagattttaaaaccaaccaacactttctcatttttacagctaagacatgttaaattcttaaatgccataatttttgttcaactgctttgtcattcaactcacaagtctagaatgtgattaagctacaaatctaagtattcacagatgtgtcttaggcttggtttgtaacaatctagaagcaatctgtttacaaaagtgccaccaaagcattttaaagaaaccaatttaatgccaccaaacataagcctgctatacctgggaaacaaaaaatctcacacctaaattctagcagagtaaacgattccaactagaatgtactgtatatccatatggcacatttatgactttgtaatatgtaattcataatacaggtttaggtgtgtggtatggagctaggaaaaccaaagtagtaggatattatagaaaagatctgatgttaagtataaagtcatatgcctgatttcctcaaaccttttgtttttcctcatgtcttctgtctttatatttttatcacaaaccaagatctaacagggttctttctagaggattattagataagtaacacttgatcattaagcacggatcatgccactcattcatggttgttctatgttccatgaactctaatagcccaacttatacatggcactccaaggggatgcttcagccagaaagtaaagggctgaaaaagtagaacaatacaaaagccctcgtgtggtgggaactgtggcctcactcttacttgtccttccattcaaaacagtttggcacctttccatgacgaggatctctacaggtaggttaaaatacttttctgtgctattcagccagaaatagtttttgtgctggatatgattttaaaacagattttgtctgtcaccagtgcaaaaacattacagatgtctgggctaatacaaaa

SEQ ID NO: 474501 - DNA, 1000 bp, Homo Sapiens; identical to SEQ ID NO: 343328

SEQ ID NO: 474502 - DNA, 1000 bp, Homo Sapiens; identical to SEQ ID NO: 343330

SEQ ID NO: 474503 - DNA, 1000 bp, Homo Sapiens; identical to SEQ ID NO: 160576

SEQ ID NO: 474504 - DNA, 1000 bp, Homo Sapiens
caatgcaaaaatttatattttatttgaattcaaaaaatttaaaattgctttcaaattcaggaaagtaccataatgcaggaccccagggggaagcctcatatacagagacagataaattaaatgtatatactgcagacaagccaagaaggtgtgtagattacatatttacagcacttgatgttttctgaaaaccatatttatacattttattacatttacaaaaaaggcttccactaccgtttacctacaataatgaaaaaaaaatttacaccttttttttttcttttttggtactgtacaaactttgtataataaaaatatatctctgtacaaaagattttttttgtctttgttttacttttttttttttcctcatgggatggtgatgggtatatggcgtagatggtgggtgaagggcctcatctgccctgttcccttccaagcctctggaggtggagagaaatgtcaggggtgcggagggtgatgcccagcagagtgctgggtgccccaccagcaggtgctcctcgagcatctcatggaactttacaaggagacgcaggggaggggtggggggcgggaataggcatccgctgggtggtctgagaggggcataagaagggggaagggagcagtcgaaggagaggagtgtaagggggaagggagcataagaaattgggaggggagcttcctgcacttgtttccagccaaggaaagagatgagagtgtgagtgtgtctggattggccctctccctccaggcccaggggggtgccgtgtcccagaggtggtgtggccaggggtaggctcctgcctctgtcagcctccattgtgtctgctggaaatggacgcctctcactttcctctggccactcttaacatcagtcagatcttctaattgttccaatctagaatttgcttaagaaccaggtgtcgctgtccctccgctcctgcacatttctatttgctatttcaatatgtgacatgaatctctgaggccagca

SEQ ID NO: 474505 - DNA, 1000 bp, Homo Sapiens; identical to SEQ ID NO: 343331

SEQ ID NO: 474506 - DNA, 1000 bp, Homo Sapiens
ttttttttttttttttttagtggtttgactaatacttaatctatcagttgggttaatataaaaccagggaaggaagtttaagacagcttccactgtggtcaggtttgttataatggatggatgaaagtaatcatttacatctttgatttcctgggaaacattggccagtcttgacaagccctttctatttaagctgattctctcttcacctgatattctgatagcacccctggccaggttcctgggggcaccaacttgcaaagtagggtgatcttgcaagagacaaatgttttcaatctgctgaggcaggctgatggaatttgtggaccagtttctgacatcccaagtaattatgatgcttaaagtattttaaacgattccaggtctataaaaaatgtgatgatgcctatgtgtataccctatattttttattacaaaaatattgaaataatccatgagttattccactctgcaccaactataaaaaaatactatcaaagtttgaccggcacttttaatgcaacgaaaagcaccatgaccgaggacactgagaacagaaagcggggaacgtttacttgctgtacggaggtatttaaaacccagaagcttgttgtaagagtgcgactttacagatgattcaaatacaaatcttagctggatatagtgataagccctctctcagttcagaagggttttttcatagcatattcattgcatttgtctgctcatacttactaaaaagtgtcccaaagcctctaaaagacacatcactttgaccttggattggggggaggaaaagtctgtacacagtggagaacttgattgctcgttctctcgcctgcttttagggggctcatgccactcattctcagttgtttggggcttccacgtcagtcctgtggttggatggtgtttggcactagaaaggagtggcacggagtcttccagagtcagcatctgcctatggtcacacagagccactcattctgcgtctggaaac

SEQ ID NO: 474507 - DNA, 1000 bp, Homo Sapiens
ttttttttttttttttggggaaatattttattaccaatgtatactgtgacagtttgtagccaaaaactgcggctggaggggtggggacgggacactgagtggtcacaagggacttgggctcacagcacaggggggacaaggggctggagagggtggcctttaaaagacaactgtggttatagaatgagctctctgtcctgtccccaatacccaagaacaccggtcacccaggatgccagggcccaagagcttctgtgagcccagctgtgacctccagaccttcctgagaccctctggcctttctgtgactctctctcagctgagcccccagggtacttcctgtagctgtctttggcctctctgggaatctcaaacctgtgactcagtgggagaggggatggggctggaaccaggcgggtgggagataggaactggggaaggaccaccaacagcatgcaagagacgccccggccacggggccagccactgcgtggagacgctcacactcgttctacctcacgtgctgcccgagacctcacattcagagacgtgcccactcgcgggtctcacacaccgatcctcacccacttgaagcttctgccactcagacttgtatgcagtctctccctgttctggggatctggccccaccggagaccacaacgcaccagtctagacatctcaggagcctgccccagctctcagggggtgggaggtgagggtgctgagcaggcccccgtggtcgcccagtgtgaccgggagtagagctgagggctgtgaggggacagtggggcgtcagggctggccgggttcgtggcctcgtggccacgagggagcttggtagaaggggttcttctgtatttgtgatgggaggggctggaaagacggggacgcaacagccctagaggctgcacaacccctcggaggcctgtggcacgcagaggggaccccttctaggggcctgtgatcaagaagggagcctgagaaggtcggaaactcgg

SEQ ID NO: 474508 - DNA, 1000 bp, Homo Sapiens; identical to SEQ ID NO: 160577

SEQ ID NO: 474509 - DNA, 1000 bp, Homo Sapiens; identical to SEQ ID NO: 160578

SEQ ID NO: 474510 - DNA, 1000 bp, Homo Sapiens; identical to SEQ ID NO: 160579

SEQ ID NO: 474511 - DNA, 1000 bp, Homo Sapiens
ccacaaatcaaactttgttaaatcatcccctattgctgatcaaactcactgctccagcattcaaaaaacagaaggcataaaggtgaatacaaacataagaaaggagtttacatctggtcttgcagactttccatatagtctctaaagtcctgtgaatcccccagccccatatcttggcagacccacttgatgttatcatcgctgtcaaacaggatggagttggtgtatgggccgccgtcctctgggaggatggtggtgtaggaagtgaacttgactctcttcctctttgggcccgaagaattcataggttcatttttaatttctttctcatagacatagtcagagggtctgagtagttgactatgaaaagtcttctgggaactgccattcagaaggaagttcctctcctcgaactgcaggcccctgtctatcatggttgtgcactcctctgatgggagtgtaatgtcaacagggtcctccaaaagttccacttcattcccaagccagacccagtcgtgggaatgggggatgttgccctgctcactcacagcaaaccttttgtgtctgtatttccaggcaaacgccacgcagttgatcaagaagaccagaatggccagacagaagacgcagagcaaggcatacatgccaatctccaagtccgttagcccccttgaggtcactgtgaggtcactaggattattggggtccggtgacttcccttgagtggggaagcttgtaaaggcatctggaccaccacttttgagtaacttattcttcccttccatgggagactggggggttgtgcttttgttggtactttcctcttggccaacaggtgtgccacggtggaaccattcctggactgctctctcctggtttccttcgcgctctatggaattactgaggtggtctttatattcccgatttatgccctcaatatcattgctgcctccttggtgctcatcactacttggttcgaatttgaccttgacatttcctt

SEQ ID NO: 474512 - DNA, 1000 bp, Homo Sapiens; identical to SEQ ID NO: 343335

SEQ ID NO: 474513 - DNA, 1000 bp, Homo Sapiens; identical to SEQ ID NO: 160580

SEQ ID NO: 474514 - DNA, 1000 bp, Homo Sapiens; identical to SEQ ID NO: 343337

SEQ ID NO: 474515 - DNA, 1000 bp, Homo Sapiens; identical to SEQ ID NO: 160581

SEQ ID NO: 474516 - DNA, 1000 bp, Homo Sapiens; identical to SEQ ID NO: 343339

SEQ ID NO: 474517 - DNA, 1000 bp, Homo Sapiens
tttttttttttttttttttaagatcaaatgttttaatattagaatcaacagatttaaaattatattttaataaatacgacaaatatgaggaaaaatagaattataaaaactgtacacattcttaattgaaaatatacatataggcaatttatatagaaaattgctgtttcactcataacttctcatacttccataactgtaactagacagaaagtttaaagtgaaatagcaaattcctcacactcaatgcttatatgcatactttgaaccaataccttacatatcaatatttaaagcttttaatgtgataagtgagcttgcttcttgcttgttaatttgtctaatctaggttggattgatgacaatgctaccctcaggggataatgtatatttaaactgtttctatgttttgttttaataacacttaaagtagagaatccggtctcacagaggtatgttgaggggaaaagaagcagcaattttaaagcaatctcagcaagctcaggatagtcatttttagcttttatccaaaatgaaggaagtgatgctgtattttcaaaactgattttcaatccttcgtcggtagccagcttcaacaacttatcctgtagagttacagttaaatttaagttatcttttgatgaaagaaatggattttggatccacaaatttcctatgcgtggatcttcttttgatggaaaataaaattcaaaacattctaacaaatttgtaagatgttcactgataacttttcgcagatgtgcaatatcaagatcattacctacttcattgataattgttgttaaattatgaaacatgtcataacaatctgtagaaattctgtttttccaagcttctaacttctgtttttgtccttcaactttatctgccattgaaaaataagttgcattcttcccttgcatagaagcattaagatcattaaaaatactgaagatatcagacaaataagcaagtctggctgtccaattcacatctttaa

SEQ ID NO: 474518 - DNA, 1000 bp, Homo Sapiens; identical to SEQ ID NO: 343341

SEQ ID NO: 474519 - DNA, 1000 bp, Homo Sapiens; identical to SEQ ID NO: 343342

SEQ ID NO: 474520 - DNA, 1000 bp, Homo Sapiens; identical to SEQ ID NO: 343343

SEQ ID NO: 474521 - DNA, 1000 bp, Homo Sapiens; identical to SEQ ID NO: 343344

SEQ ID NO: 474522 - DNA, 1000 bp, Homo Sapiens
tttttttttttttttttttttttagaaggagaacaattttatctaaaaatagaacttggtaacaatgaaataccaaaagctggtcattataataaaaagaaaagaagagtttaactttttttttkttgaaaatacaaaattatcactataatatactgccaactctgtttatctgtatttgaattattcctttcatggattattcaaggaaattttaaaattggcttctgcctagtacttatacatctggattgtttgttttgatcttcagataaatacattctcaaggaatgcaagcaaaactgagcatttttttatgcttaagaaatatggtccaaagcaaaatatttttttgcataaccatttccctcaatttttatagataacaacaacaaaaaaacctacattcaaagtacgggtatttgaaagtaacaaattatactacttacatacagagaaaaagacataactaaactacttcaaacccaatgcagaggaaactttcaaggcaaatgatgacttagtacttaaaaagtggtttttctatcttcaaagtgctaaagaaacaagtattcaaaaagaaacttcaggtcggtctacgaagttctgactgacttgaagtagtgaaataccaagaatgcagtggacaaatttaaaaggccttcattagaataaagtatatcttaactacattttgcaaagaaatgaagcaatggttgcacaaccagtcagggccaagttagtaacatacaactcagccatcagcccacctctccttcaaactaaactaatctaaatgtatttttcagaaaatttcctccatactccatgtatgtgttacatacatccaatcatatccatattttggatcatttttttctatattcatcagattattggttaaaatgcacagcaagtagaaatgatccatttcaaaattcttaatatctagcgttctctgtaaaacaaaagctgacaacagttttattgtactcctatt

SEQ ID NO: 474523 - DNA, 1000 bp, Homo Sapiens; identical to SEQ ID NO: 343346

SEQ ID NO: 474524 - DNA, 1000 bp, Homo Sapiens; identical to SEQ ID NO: 160583

SEQ ID NO: 474525 - DNA, 1000 bp, Homo Sapiens; identical to SEQ ID NO: 343348

SEQ ID NO: 474526 - DNA, 1000 bp, Homo Sapiens
aaggacagcaaaaatgtttatttgaaaaaattactatgtattgaaaatatacattagaaattattacttacttccatagcattcccctcccacaccacaaaagtagaaatatctgcttactatgctaatgccataggtaaattcaaacaaaaagtaaatcatcctcagtctcctttactcaaacactagagctgggggccagagaaaggtcaacttgtatctactaatcaataggaatttaacaagtcccagtcttccacagcaagacatacatatttctgctttgaaggttgtgaagagttattctgttctgtctctgactcctcaaaaggtctcttcttgctcttctttgactcctggcttgagatagcttcgtgtttcaacactggcccatggcaatctggggctttctctttatagaactggagtttctcggaagagttcatgtgggtgtctgccaggggacacttcagtggggcttctgctcgagaccgcttcccatagaagcgctgagctgctgctctaggctccgaggtctcccgtggcttcacagcttccgcagtcacacgctcccactgcagaacgatctggtcagcccagccctctgtcttgcagttactatgatcaaattccttcaaaggcactttggagtgaacaaggcctatgtgggtctggagcttgtgcttgacggttttgatgtccttgagccctgtcccagagatatctaagcagtttagtttcctaaaagaaaagaggtatccaatgcctgcatctgtgatctcagggttacatgataagtctaataatgttagattctcaaggcctcttttcatcactcgaactggtgctgtcatcttccgcaccccagcatcagataaacaattatccttcaggtggagctgagttacactagacagggcttcattggtgagatgttctagaagttcatgctcatctccaagcttgcaacaggaaagatccaggcaggtcagctcccgga

SEQ ID NO: 474527 - DNA, 1000 bp, Homo Sapiens; identical to SEQ ID NO: 343349

SEQ ID NO: 474528 - DNA, 1000 bp, Homo Sapiens; identical to SEQ ID NO: 343350

SEQ ID NO: 474529 - DNA, 1000 bp, Homo Sapiens; identical to SEQ ID NO: 343351

SEQ ID NO: 474530 - DNA, 1000 bp, Homo Sapiens
tttttttttttttttttttaaaggtaagagcactttattcttatttgaaccacactgtattgttgattaccgagtgtgaaggtagtatgttcagagtcttgttttatgcctttgtagctgtgttgccagcatttgaaggtaactcctccacataagcggcaggaaaatggccttttttcccattcaaagatccaaaccaccatccttcttcttttttctcgtgtataatcacaatgtcacccttttccaaattcaactcatcatcttgcctggcttgaaaagaatacaaggccttgcaaagtctgctgctgagctgggctgcaccaggggctggagttgaagaacctggattgctctgcccaccagaagatgccttgctcacaatattctctaatctcttcattaaaaaaggccgagatattttcacatagctatgagtatgctccttttccctccacctgaagatggaattactacaaggatggctgggttgaggtctttgctcaagttctgctaacattgatgacagtttgtaggagttcgcttccaaaaggtctagtttcaaattgttctcatccattaacgctgctgtgtctttctggctctttgcatcagagaaggaggaggtgctggagtacgttttaagcattcgttccaggccttccttgtcttttgaggctttttcaatgtctctctgcagtctcaataattttggttttagtaaagactttcgtctctctttatccattgcactgttaggatcttcttcaaagtaatccgttaacaggaactcagatttgttttctgtagataaaattgcagtttcttccattacagcctggatatctttttcaatgtcaatcttgctgatggcacagtgaatctgcgtgtggcatgtggtcagggtttggccaaaaagagaaatatgttggctgtactggtttaagttattgcataaaagttgaattctttccttctccagctccagaatgctctggta

SEQ ID NO: 474531 - DNA, 1000 bp, Homo Sapiens; identical to SEQ ID NO: 343352

SEQ ID NO: 474532 - DNA, 1000 bp, Homo Sapiens; identical to SEQ ID NO: 344541

SEQ ID NO: 474533 - DNA, 1000 bp, Homo Sapiens
tttttttttttttttttttgttaaaaaaatagcttcttttatattgtatgaacaagttggaagagtccccttgcgagtgctcactggccaggtccccactgtgcacatgggtaatctgcaaattcattcagggtctttagtttctttcttacttctcacatgtctgctttaccactctggtaatgatttgggttaaaacaaccgtttctttagtaaatactatctttctgattcctgggagagtcatcaagacacgactggggtcatatcccacaacttaataaccttgtcagttccagaagtcagtaaccatcctctggttgcatcgaaatgcacatgcacaatgttatgtttactgtcatggaaggtggctgtgggtgcacgttcttcatctgtgatggcctcgtggcagctgtcacagaccctcacttcaaactcgaagcccatcagggggatggaggagcgcttggagctgcacttgccacagacggccttcccacacttgcggcagtggtgctgtcttagaccaattttcttactgtcccacatttgcttgaagttccagaagaaaggctgatcacacttttggcaggaatcactgtccaaccattcaggggtctcctgcctctccacgtccatgttccagacgacaatcccaccatcaccgccacaggagatcaattgtcgcgtgtgctgtgcataggagagggcctggactctgtcgttgtgtccttggagctcgatggctgttccttttctcccaccgatgtcccacatgatgacagagtgatctgaactgcctgagaacaacacccgctggactgggtcccaacagagagcggtcaccccacctgtgtgtcctctgaatgttgtgaccagggtgcagttttcttgctccagtttgaggattgttacttggcctgagtggtcaccgataaacacatgccgggtttcaacatcaaattgcaggcctgaggccacagcactggtccgataacct

SEQ ID NO: 474534 - DNA, 1000 bp, Homo Sapiens; identical to SEQ ID NO: 343353

SEQ ID NO: 474535 - DNA, 1000 bp, Homo Sapiens; identical to SEQ ID NO: 343354

SEQ ID NO: 474536 - DNA, 1000 bp, Homo Sapiens; identical to SEQ ID NO: 343355

SEQ ID NO: 474537 - DNA, 1000 bp, Homo Sapiens; identical to SEQ ID NO: 343356

SEQ ID NO: 474538 - DNA, 1000 bp, Homo Sapiens; identical to SEQ ID NO: 160584

SEQ ID NO: 474539 - DNA, 1000 bp, Homo Sapiens; identical to SEQ ID NO: 343358

SEQ ID NO: 474540 - DNA, 1000 bp, Homo Sapiens; identical to SEQ ID NO: 343359

SEQ ID NO: 474541 - DNA, 1000 bp, Homo Sapiens; identical to SEQ ID NO: 343360

SEQ ID NO: 474542 - DNA, 1000 bp, Homo Sapiens
ttatgtttccacatcgaccctgtgctccctgggaagaaggttctccacatgctgagtagagtgtggttgctccattgggtcgatgccagctgcctttttgttcctccccacctctggcttatctgctaacgcccgttggagaatcactctgagagattccttcagccttttctttctgaggctccccacaaagaaataaatgatagggttggcgctgctgtttataatgaggaacaaggaaattaaataggaggtggtgacaaacattttgaaatctgttatgaggggtgccacgctcaggggtagggcccagagtaggaacatgggggccgagatctgcaccaccgcatagaccctggtggccttttgctgctgggagcagcacaggaatctaatgagtagagtcagactcgacacacacatcacaagtgaaaggatagcatggaagagcccagaaagctttagaaatatgacacatgcctttacatgtttccagtaagttaggaaaagtgattttactatgttgatgcaaaaaggcaggccccagatgagggtgcagacaacattagatgtgtattttgggcggtggcatctgtaccagatggggaagaggacacacacacaccgctctgtgctgatggccaccaggagacagagacacacctcaaaggagaagggagacaatatggccaggaaatcagggataaaaaacacgactccatgataagttagcagagtcacctgtaagaaccccactgccgagcagcaaagatagatcacgtcagcagcgaccaggtggaggatgtataccatgtagggattcgtggccccacagcaaagcagccagaagacagtgccattcaataagaccccacagagggagaccagcacagccttgggggcaatgatattcaagggcagggcctgctgtcccactgccatgctcatctgcatatgtatggtttcattcgtctcattttgaagaaagacgccacagagc

SEQ ID NO: 474543 - DNA, 1000 bp, Homo Sapiens
caatttgagacatttaatagtatccatagaaaaataaactctaaattgacaagtttagttatgcttatccatatatcaacattctaagaagaaatggagaccaatttaaagcgtacatctgcctttaaatattaaaaatacaagattgcttcacttgggtgtctccagccaaaatgcagttaatcaatattccatagaacggagcattgtcggaggtgactgctgtcctttctttccctggtatgtacatcattcctgggccacacttaaggaacagcgtctttttctgcatagccttgtgatacactcagaatcatcccggcaggaggctccaataggcctgagggaaacccctctccaaaatggggtcattctccgtggccttctctttgccgaactcacttctggtattggggagccatctatctggcccaacagcaacaggaagatcatgaggactgcacaaagtttgaggtgccacatcttgacagggggaggatgttggagcctgaaagccagggacagttcctacttccttttatagactgacatcaactcttgcattgttactgggtgagatgggggcaaagtttatatttgtaatcagaatcaatttaataagttaatgtctaccggaggaatgtgctcaagggccacctttcaggcacgttgtatttactgatccctcatctggactttgagtgattgtgttgctggcatggaccctttcgcccattttaccaaaagtcagcactgcccttccttccctttgaaagccacgtgaaaccattgagggaggtcaggcaactagccacatttctattccaaaatagctcagtgagatcactcccatagaattccaataatgaagtcttcagaaataatgttggcccctttcagccttgtctaggaaagaagcactgatctattgtgtacagccaattggataaggcccttatctcctttctgtgggaggatgcttcagcaaggcctacagttc

SEQ ID NO: 474544 - DNA, 1000 bp, Homo Sapiens; identical to SEQ ID NO: 246572

SEQ ID NO: 474545 - DNA, 1000 bp, Homo Sapiens
tttttttttttttttgacagtttaactctttattctccttcacagcccagcagaccccaaggcgggcagagggtgcaggccgtccccaggatgctggtcatgggccagggtcatccttgcacctgcggcagtaggggcagcagccatgctgaagcaccagcaactcatagtcctcagaatggaacatctggaagcaggaggggcacatggtaatggaggcgtcaggcagcagtgagcggaagtattgccacctcaggggtgggggccatcgcttgatgaggacatcccggcggctcatggagcgcagcaccagccggctcaccaccactggcacgaactctgagccaccttgctcaaagctcagcttagctgtgaacgggtcctcatctccgatggagtccttggtctccactagccgcagaatctgggagctgttgtttgcaatctctagctgtctgtcatcccgcttgggtctcagcacctccaggtcgatgagggagatggcttcttcatcagtgatcccttcctccaggtagaactcaaccaggtgtagcacgtcgtaggaagaggcggagaagatgaagggctggcggcagttgatgcagacgttgcccaggttgttgagcagcgggttgttggtggagcagcggtagcacaagggcaccaactcctcactgtcgtggaagggcttggcgcggatggtcagggtacccagctcaatggacttttggaatctggcagggatgtacaggccacgcagcttgtcataggcgtgccgggccagcctgtaggcaccgagggccttgctctgcttggccaaggtgaagagtattttcactttagagatgcccgagggggtgtccttgggcaggctgtgcagcaggaacctggagatgttgaaaagagtttcaggacgatggacactgaacggatcttccgtgtggcgatggatggcatggtaaccatggtacagctctgccaaacgctggaagtggtagaa

SEQ ID NO: 474546 - DNA, 1000 bp, Homo Sapiens; identical to SEQ ID NO: 343365

SEQ ID NO: 474547 - DNA, 1000 bp, Homo Sapiens
ttttttttttttttttttttttttttttttttttttttttttttttttttttttttttttttttaaagaaggaagcggtttattcggccaggagcatcagcaagactgctgtctcaagagccgagctccccgagtgagcaattcctgtcccttttaagggctcacaactctaagggggtccacgtgagagggtcgtgatcgattgagcaagcagggggtaggtgacaggggctgcatgcaccgatggtcagagtggaacagaacagaccgggaagtttcacaatgtctttctataatctatagataacatcagttgctaggtcaggggtcgaattttaactaccaggcttaggtcaggccggcccaggcctggtttcgggtctggttccttggtttcaggtctggttcctaggcgccaggctacctgcctttagttttgcttctttttccttttctgagtataaaacaatataaaacagtatgagagggtctgtctctcttctctcagagtattcaatttccttaggattttgagcgttattcctaatacacccttgaaacccccacactcacacagatacgtacacagagggcacatacccccacacccatgcatgcaggcttaacacacatagcacacgtgaacacatatatacacacatgcgtgttcctgtctggcgttcacttctggggctacagagattggaggaaatcaggagaggagacagggggagccaagggggagtatggcagcagaggagaggggtccattagaagaggtcacacttcccaggagaccagggagctctctttcctgctgcgactctgtaaaaccctacatttctcttcctggacttgggaatcgattctccaataattaaaccagatggactccaagtttatgtctttctggggttgaattcctgtggagacttgaactgaacgtttgagttctctgtggcccttctggactcttccttccttcagtgataagggaaga

SEQ ID NO: 474548 - DNA, 1000 bp, Homo Sapiens; identical to SEQ ID NO: 343368

SEQ ID NO: 474549 - DNA, 1000 bp, Homo Sapiens
tttttttttttttttttttttttttttttggaaggaacaggatttatgttgcatacttgaactacagcgagtgtaagactggtcctatttacagggcagaaacactgcaggtggagcgcgggggtggcagggtgggcaccagagtcctggccaagggtacccttgcctgccatcttccccacctctcccagatgcatctctgaggccccgctgggattctccggggggaacgaggcccactcacatgatgctcgctggggtgaagacagggcccacgcacagggtgtctgtgatctcccagccgcaggacagaggcttgcacacaccctccacgtcatcctcctgttctgcagccatcagctgccttcgcagcgcttcccaggccacccgggacatggcataggtgatgtggcaggcctgggtcccccaaaagggggaacccatgcccacagtgtaggcgcccatgttgtcaaagaccagccagtcccctacgtgtagttgcggcagccacaggccctcagccacgcaatcacagccatcaaccgccgggccccacaggctgctgctgtacaggggctgctccgtggatggtttcttctgcaggatgggggtagggcagatgttgtcaaacaggactgagttgaagatcccatacacgccctcatcaaggtggtacacgatggtcttggaggtggaaccattttcctcctccctgccaggctggtctagcagaacctccttcttggcaatgatgctgactgccacagtgaaggccgaggtcacgtagtagcgccccagctcagcaaagatgtccacgccacagccctctgggaagtacaggtccaaggctgagttgatcacggaagcaatctcttcaaatctcactttggccccttctgtgccagggaagccaccaccaaggtccagaacgtgcatcttgtgacccagctcggtgcccatttcaaacacgagccgggcgtctgcgatggactgagcatag

SEQ ID NO: 474550 - DNA, 780 bp, Homo Sapiens
ttttttttttttttttttttctcgataaaagcagcagccctaattttatggtcacatttaggctggaatgggtgacagcatgcgagctcgggggtgggctcggaggcagcgattcgacagacacgtgcatctgctagggcgccgggctggcttcaggcgggcctctgcggggcgtcggggccggtttcggggtaggcgtccttggcgggggaaagcttcctttcaacttcgactcccaggaatcttttcaagttggtcctcatcttcgtggtgaccacaaacgcatcgatgcaacacacgattaccgctgtgagacacagggaccccccgacatagagtaaatgccttcttttcttttcttgcatggccaagatggcaactactgaaaggaacacagctgtaatgatactgttggtaagatcaagtaagggccaatgtaaataggtcagcaagtggtgaagggttagcacatatattagaataaaaaaaacgacaatgcagatttccagacttgtgattgttataaatgactcattggcttgggtgatgatgaaacaagctaatgctcctaagataagactcagtctcaggatcttcaacattccagtgggcgagaaggagaaacgtttgaggctgtccctgaatttgtacgggactttggctcggccctccacgcgctctttgatcgccatctcatttaagagtttggattcagtgtgtgcagagggcgtggggggtgggagtgtgggctttgggggtgggcgtgtggtggctttcctt

SEQ ID NO: 474551 - DNA, 1000 bp, Homo Sapiens
ttttttttttttttttttgcattaatatatttattcacatcctcactgtcttaaatgtgtatttacagactccagcaggtaattatgtcagtactcctcagactcccagaaatttcaaatgatccaggcaactcttgtgaagatcaaattttcaaaatcctcaccaaggacatccttcaggtcacctttatgctcccagatggtattcagctagcagcagtctacacttcaggcatccatcttccacctgtagggtaggtgatcactcccgacgagcaccgcacgtggaaacagctgtaaccaggcacgctgcttttaagttattttatacgggggcagggcaagcataaagtcagttatacggtaaggccttttcactgacgaaaataaaaccaggcttatctggagaactccctggcatagtcgatgatgtaaacacaaatcgacgaagctccccgtttccaaacgtgggaacgcaggcctgaggccaggccgctgcccttgttcacggccccggacacttcggacacaggccgccgcagtcgactcaccagactcagggtggccgcgttcccccgcccggcgcccctgcgtgagagaccacgcggccacagccaggcgccatcccagaggacccagagcaaaaaccacagcaagctcgcaccaaaaggaagaaaggacaggcttccgtcccacaatgcttttctacaagtggaaggacccactgtccgagagcgcgaggggggagcgggctgtaccatcggccgctgcgctatggcgagacgccgccgtgtggccggagggagaagtgccagtgagggaccgaggggcgtgtcaccaaagggaggaggagcctgggttctcagcccgagtcacctctgcggatgtgtggccagttctttccacagaggaggtatccagacatccccccacccgaccagggtcaagagcatatgatcagtgctggcagcggcaggagcccaaaggactttagaccacg

SEQ ID NO: 474552 - DNA, 1000 bp, Homo Sapiens
ttttttttttgaaacaaacaagaaaaagttttattttgaaaatacagtctttaaagataaaatttggcttccattttccatatctaagtgcatccaacaagatcccaaagcaaacaaaacaacaaaacaaagacccacaacattatgtacagagctctaaaatgagctgtgaatatctacaagaaactagcatatactctttgtgaagggatgtagtagtgtgtggctttctacagttctcagtcccccagaagaagagttaactccctggagctgcaggtgcggctgcagcaagggaagagctggggtcagtgaagggctagggatgcgaccccctgggtaggagacgtggagaggtgtctggggaggggagcagcggcggcacgggacagatcctgggcttctctagaagtcctgccgcggggtgtgagtcaggctgtgccgccgcagatcacagtttcgcctgaacactttgccgcactgctcgcagctgtagggcttgatgtctgcatgtgtaaagttttgtgaactgctagagttctagactgacaaaatcctttcccacactcctgacatttgaagggtttttctttggaatggatgtatctgtgatcccgcaggtgatcttgcctccggaaggccttgtggcagatgtcacacgtgtacggcctctcgtccgtgtgggtcctctcatggatgagcaaattgtaggatttggtaaagtgtctgccgcaaaacttgcagataaactcttttttcgttttggagggcaaccttcctcgagagggctttctgtccggagtcaatttactgaggcccgagatggggctacccagtcctgggctcagcttgctcaggtctcccatcccaggcggatcctcttgcgtggcagccaccgccaaattggcaaagtcaaaacggggccggtccttgtgcagggctgggaggacgtgggcaatggccccctgcttggggtggaataggtgggtggtaaaaggca

SEQ ID NO: 474553 - DNA, 1000 bp, Homo Sapiens; identical to SEQ ID NO: 160587

SEQ ID NO: 474554 - DNA, 1000 bp, Homo Sapiens
ttttttttttttttttttttttttttttccatgtctccacactgcaataccatttaatcacgtagctacctcaataaaactccatgtctccacattgcaacaccgttcaatcaagtggctgcctcagtactttccttgcttgtcccaggaagtccccatcacatagcagagttccctcagccctgctgtggcctccccaggccaacatcctggttggggagaaggctgctagggctgggtccggaaccatgttcttgcttctcaaggctgctggaggtgcctcttcgtcatatgaaggtcacccgttcccagggctcctggcgcagacacacagccccgcctcttctccccacccagataggcgcagttaaaatggctacaggtctgattatagctccagagagtcaccaagctctgggctccatcctgagagaatctggtaaccaaaaagacttcatgggggggaatcagcacctcgcgctccttgggaaagacagagaaggcctgtataggggccccaaagcaagttgttagagagaagagggtggcattaccaaatctgtgggccactgccttatccagggagctggaggcaaactggcccaagcggacagagtctcccagcctcttgggttcaaagcgaaggctgcccacacctcggaacaccacctccccaggtcccctgctgcagcccccactgcctcgcagcagctgcagggcccggatcaggtagaaatgcagggccttgaagggaaagtgcctcatgtagagctcccgggagcctccgcccgtccgcacggcctgattcaactcccagtacaaggtgttcgatgagttggtgtagaccataatggctattccattctgggctttgaagccagggggcaaggtaagccctcgacgcttgtcctcccaggtctcctgggctgcctcccaggattcccgcagcagggcatggtgggccatttcctcctttagcaggggggctgccttctcctcc

SEQ ID NO: 474555 - DNA, 1000 bp, Homo Sapiens
ttttttttttttttttttccatgaagacaacttttattttttttctttacatatttatttttaatatgccttacctagaataagagaaaacaaagatttgaaaagcaaagtatcccttttattataatttctttttacataaccttttcaacctatattcaggtaactacctgtctctcccatgaaaggagaagggtcctgcacattacaacaggcaaaaaaggcttttaagaaataaaatattttaaattgatccattacatttgttcaattttcttgagtacattggaaagtgggaaaaacacaaaaggagaaaaaaatggtatttcaaacaaccagactataataatcttagttagattggtagtacactcattatactttttccccaaacaggtacaaaggaggttcaagtgctctatgtggatgctagtctatacctcgatatttttattttactcccagtactcccacggccatggccagtgtttgcctaaattctctgaagcatatcaaggagtctcagttacgcaaaacaaccttgggcaaccacaaagaagagggatgcacatctcccagaaatattaaatagctgtatctcaactacagtttcagaatttagaaccaccaattcaagatggaaatatgcagtgggaagagttattaaaaaggtaacagaatttgactaagagcatgaaatgtagaactttaagattaaaagagctccctggaaggacaatgaggcatatggagcagaagggaaagcagggaaacggctgagatagtttaattacaccaactctactatgcagcatccctttatcaaaaggaaaaatataaagtctataaaaaatattttagtattgcaaactgctgcaataatttattgtaggcaaatggtagctataaagagggtccttgacccctaaaagaaaagaaaaagtacagcaagtttctaattagtagaactaactagttgtttttttgttgggagagcggt

SEQ ID NO: 474556 - DNA, 1000 bp, Homo Sapiens; identical to SEQ ID NO: 160589

SEQ ID NO: 474557 - DNA, 1000 bp, Homo Sapiens; identical to SEQ ID NO: 343372

SEQ ID NO: 474558 - DNA, 1000 bp, Homo Sapiens; identical to SEQ ID NO: 343372

SEQ ID NO: 474559 - DNA, 1000 bp, Homo Sapiens
ttttttttttttttttcttcagaacctttttattcatcatctaaccaacagaggtggttggctcgaactcaaactaaaatggcctcaaaaggcccacctcgttacgacatgacagggcaaaaccagaagtagggacagagtttagcctcagttctctgcagagaagaccaagcatgtatttacacacaggtgcctcattaagaactgattggcaatgttccaccagcacagacccagagtgtgcagaaatccgtgggggctctgtatatgtgtcattcagacaatccgccgattcctcagccataaacaagctcttgctttttgggaggagggtgatcagcatgttatcttgaatgatggcaccatttgtttactctggaactttgaaggggaggtgacaacttattttctcccctgaatctgagatgcagtggcctgtcagagtatctaaaaatgtgtcctggaagacaggtggtggtggttgccctaacagagagtttacagggtaattgtgttgggctctttcagtacttaatcctgctgtttttcagaaaccctttgcacctgggccccatggagccagcagggccccatggagcatcccacaggcctgtgagtgaagtgcctctcagagcagtcacccagggaagggaggagggcagggaacggggctaggggagatgcagggacagaaatcagcagaaacactccatgctggttctgactcgctccatctcgtgcaggaagctgtagaactgaggcaaggttaattctatatacacatttttggtttgatttcctttcttaaccaccaactttagttgtaaaaatatacttcccactttctccaattcgctgctcccagatgtcactccaaatttccactccatatctatgagctggttaatcatcagagtctgacctatggcccatcgagcaagggtgggagtattctgcttccacttttcagaaaagtaagtggctttctcctcactaagac

SEQ ID NO: 474560 - DNA, 1000 bp, Homo Sapiens; identical to SEQ ID NO: 343373

SEQ ID NO: 474561 - DNA, 1000 bp, Homo Sapiens; identical to SEQ ID NO: 343374

SEQ ID NO: 474562 - DNA, 1000 bp, Homo Sapiens
tttttttttttttttttttttttttttttttttttttttttttttttttgaaaaccgtgtgcttgtaaactttattttccatacagtagagaaacatacagtacaagcaacactgggaatccatttacagcaaagctcacaaatgccccttgagacacactcgttccctggatgaggggggggggcccagcagcctgcatgcctctgggcggcacttccatgcgagcggctgctgcatcccaaaactgcgtgggaaggggaagccggctcagtcctcacaccccgcagctccacgtccactgtcctctgcaggctgccccatggccgccttggggaggaaaaacttccccaggcagcagccaactttccacgtgctccccgcggcctcctgcctgcctggggaggaaaacctcatggcagggcggggctcagctccgcagccagggggcattcactcagtgcctgctctgggctggaccccacccccgcaccccaaagggatcagatgtgacctgtcctccagggaccccaggctggcaggcagcagccctggccctacagcttggtaagtcctagggcagagggaagctggggcctcaggtcaggtgggcgtttgtcaggggggaagaagcttggcagcccagacctgcagtaggaggggcaggagcaggggatactgcagatgggtgttcacaggggcagaggcgggaagctaggagaggaggggacctccatggaaggcagttttgtgaatatccggagaacttggaagtgactttcaggatcatctgtacaaggggatgttgggcttccctccccggcaccgggatgtggatccaacactccccaggcggaaattcgggcccctggccaagcccagcctccgctctgccccggacagccaggaggaggctgccgccctgctgaggaccgacggtggtccttcgtcctgatctcgggggggcgctgccctccgttgtctgcaggctctgacgcttgg

SEQ ID NO: 474563 - DNA, 1000 bp, Homo Sapiens; identical to SEQ ID NO: 343375

SEQ ID NO: 474564 - DNA, 1000 bp, Homo Sapiens; identical to SEQ ID NO: 343376

SEQ ID NO: 474565 - DNA, 1000 bp, Homo Sapiens; identical to SEQ ID NO: 160590

SEQ ID NO: 474566 - DNA, 1000 bp, Homo Sapiens; identical to SEQ ID NO: 343380

SEQ ID NO: 474567 - DNA, 1000 bp, Homo Sapiens; identical to SEQ ID NO: 160591

SEQ ID NO: 474568 - DNA, 1000 bp, Homo Sapiens; identical to SEQ ID NO: 160592

SEQ ID NO: 474569 - DNA, 1000 bp, Homo Sapiens
tttttttttttttttgttttttttttttttttttttttttttgaatctgaaaattccatttattaaaacacatacattgtccatgtgggatgaaaatgtgcacatcacattcaggttttcctgctttaacatttctgtagttctctctttgaaacacacactccacagatcttatataggaaaaatgtgaacaacttttgggctgcaaaacattaatgcatacataacaattcatcattgccaagagcagctagaagcaaatattaaggaagaaagacaaagaagtataaaaattcctaaagacagcatgctttattttctcaaaattccatatgtgactatgagcgtatggagaaatcgtttgatttttaaatttattgttttgtccttggtaggcaatctccttcaaatattattagcaaaatcaaacatagatcaaagtatgtatttgcatcttctgattgaaattaaacagtacttggtttcaaatgttttaaaaataacactttttaaactggagttgatattgaggatcatgtaaaattattctttatagactttgcattctaaatatgaagtttattgttactacttattagttaattccacggcagattttcatttctatcgaatatattatatgtagaaactagggccttaaataattaagctgacttttcctattagttattccttaagataaaattatgctggtgaaaatgactgttgaatttctcaagaaattaagctctatagaggcataagtaatcgaaagactttttcccctgaataagtacaaataccaagaagccaaaactcatataaagattttcgtattataattccatactgtaagacataaaattatgaaaaagccaaaacattttccttaaaatgctccctagaaattgtaattccatcttaattgctccaaagatctagatttacatggaaatataaagagtccttctgagaaaaggaaatgctgtgaatagtggaa

SEQ ID NO: 474570 - DNA, 1000 bp, Homo Sapiens; identical to SEQ ID NO: 160593

SEQ ID NO: 474571 - DNA, 1000 bp, Homo Sapiens; identical to SEQ ID NO: 343385

SEQ ID NO: 474572 - DNA, 1000 bp, Homo Sapiens
tttttttttttttttttttcatttttctctccttttatttttatatggatatcttcttttgaagtatttttatttcactttttctaacagcaatatagaaacaaataatcataaaaaataaaagtataaatcgtccattgattatgtaatagcacttggtattgctacagggtgtgggtcttgaactcggtcaggcatcgtcaagcctgcccaggccctccaggcctctttgatagctactgagcccctgaaggcatcaagacatgaccacgcatggcagtgtcggtggagagtttgcgttttacacccagcgatgcttggggatggcagagagatggatggataatgagtacaactgcaaacagcactgtacacatgtggtgagccaggaggctgggacggaggttaggccaatgttgctgctgactcatagacccacagagagcagggacttcacaaagctgaattaatgtggttagttgtgttcactgtgcaaagtaaggaagccagtcaacactggacgatgtttagaaaacatcgctgtccccctccacttctcatcttgggtcacctcctcatcccataataaagttctcttaggataaaccgagcaaaatagctcagacatttaacttatccccaaacatgtgtcttgatcttagtttccacccagagaatgaagaaagcaagcaagcactgggttacccaagcaactaaatcactcagttgcatccaacttaattggactgactacattcagctaaatctttccattttcgctgaacccaatggtttcggttactgtaatgactgatttccaaaaagaaagaaaaacctaatttggcattttttcagaatatgggatgggctttcctgcatgggttcaaggatgtttatggcatgttctctgtcgtgtgtgtgtgtgggggggggtgtgtgtgtgtgtgtgtgtgtgtgtaggtcagcccgagacctcaagggcttatctggaaagaggttg

SEQ ID NO: 474573 - DNA, 1000 bp, Homo Sapiens; identical to SEQ ID NO: 343386

SEQ ID NO: 474574 - DNA, 1000 bp, Homo Sapiens
ttttttttttttttttttgatgaaatgatatcaacaattttattaaggtaacttacctttataatggagtgaagacaaaaggaatgtgactatctcaatagattagagatagaaaaaaatcacaataaatgtcaaaatatttctagtaaaaattataaaatagcctttaacaaggctacaacaaacataatgtttaaataaagaaaatttctaagcattccctgtaatactgggaacagtgtaagaatactcactatcatgactatgaactgtttaatgtatacaggaggccctaaccaatgggtaaacataaaaaataaatgagcataggtattgcaaggaaagagaaaataaaatgttattatttatagctgacaaaatcatttacatagaaaacacaatagaatcaacaggtaaactagtagatctaatgagagggttaacatttcaccaacaccatatcctattagaaatgtaataaaacataagatatcatttacagcaactagaaataggaattaatctaacagaatatacaagacttcagttgggaaaatttatgactccatgaaagggcaaaaaagatgacccaagaacatggatgtggcatgtttatgcatgggaaaacatcacaagaacgtcagttctctcctatttacaaatttgttgcaagttcattaaaaattccaaaaagaggttttaagcaatttcacgtatttattataaaatgtatatagaagaatcaaggtccatgaatacctaagccagttttgaaaagtaaaagaggacatttgtcctacctaccagacccagggaatagtagccataaattgctgtgaccccaaatctcacaatgctccacactttggggctccagccacagtgtctgttcatctgttcatattacctctaagtcgagagctcctctcttttaaaactctgaagataagtccagtggggtgaaatacattactacaatttgatgataggtaagagaaag

SEQ ID NO: 474575 - DNA, 1000 bp, Homo Sapiens; identical to SEQ ID NO: 343387

SEQ ID NO: 474576 - DNA, 1000 bp, Homo Sapiens; identical to SEQ ID NO: 343388

SEQ ID NO: 474577 - DNA, 1000 bp, Homo Sapiens
tttttttttttttttatactttttaattttaatgaacagacattgttctatctgaatgtttatattttcaattctctatttccaacaattcccttcattatcttttgctgggcccaaggatattgaagccatccattgctttacttgtcttccaagttcatcagtgcctgcactgcaaactcttgtaacttcttacgttcctctaggttatactgaagcttttctagcaactcaaaatatcggaagagtgagtctctgggccaaacacggtcatcctgatccatttccattagcccgggcagattttcgtgcacaagagtctcccagtccaaacgaccaatagattcagaaaatctggattcagaagaggaagaataggaagaggatgtggaggagacacaggaggaagactggtactctctcttttttgacaaggtctcttctgtttttgatgcagatgttattaaatcctcttcagtggcaccataattagactctacttcagacacttctgataagtccaaactttccctttgttgactagctcctctgtcctctattttgctatggcttgacgtcagtgcttcatgtgacatgttttttctcctctggatgatctgccgcttgaacatgtcagctttgagctgaacctcccgacgcgccatctcctcattcagctctttcctgatattctgaaagttagtaaccatcatggctactatgatacttcgaaagataatggagccaagcaacaaccaaaggatgaaatagatgctgctgaagatgcgactgacttcaggcaccttccagacgtcctgaagcagtgcataccaatgatccaaggtgaagagaatgaacactgttaccagggaattcgggaggtccgagaagaacacatggtactccaggtcctgacgaggtgaacgggtgtactctgagaagacgtagacaccagtcacagcaaaaatgtagaagaagatgagcagcaacatcaagagga

SEQ ID NO: 474578 - DNA, 1000 bp, Homo Sapiens
tttttttttttttttttttttttttttttttttttttttttttttttttttttttgactgttaaaaactgtatttgacttttaattttgaaagcaaattaaatacagttaaattaaaacagaccagatgcagctgcctgggtgccaccctcaccccagcctctgttcttagaactcctagcccctggcctcactcctgtgtggtggggcttgccagcgagggagcagggaacagactgggtttggaaaacagtggtcatcatggacccatttctgatttataacaaactcattcccaataaagatgaaggctgcagtccaccagggttataattataaataaatatacatgcagctaaaagaggatattaggtgaaaacaactgacctagcatctgcccaaagaagtccccattttgttgttcattatcaaagtcctgaaaatgaaccctaggtttttggctaagaaggtggcctcagaccagccaagctgaccttggcacttggctggcttctgtgaggcagtagagtgcccacacataagctcaccacctgtgcccacctcctcccttctctcccatgccaccccacttgcttccaagggcttggtttccaaagtgacatccagggtgtaagaggttggggaaaacgtcctgcaaggtggctcagggatctgattccatcagatggtctcatgaatactgtgggagattaaatccatctcaaaataggcaaccaatgctatattctgaatgttaggtctctggactgagtcccacccacccacccactcaggagtgggttctgaatggccctcagacctctcctggtgagtcttaatggggtgggaggctgttagttaaaaaataaacacctcttcagtaggctggggccctttccttttcctccacttggggggaaaattgtgcttccaacttgcaggagaatgagccggatcaccactagagagcccggctgggccagggggtcagagccctttcc

SEQ ID NO: 474579 - DNA, 1000 bp, Homo Sapiens
tttttttttttttttttacttagcaaaacagctttaatgctttctattatcaatacattgctacaaaaagttttaaattctcagtctcaatttaatgtctaagagaaaatatactcaaatccacagcgaatttttccaaaagggaaaacttatagtcaagaaaaacctcacttgttttttgcacaaccaattttcctgtttacctatagctaggtgtatctgtgcacatcacttaattacttaggagtagataatgggttcatttagtttcattcttccatccctaacactttatactcaaggaactgatctctgccttttgccgtttaaggagggttttcctaatatggtttctgatgcaactactacgttggatttatttgatcccttcggaattcaaccccccttttaagactcaatgcagtaaaagagcctgagttcttctctataaaatcttcaaagcactgaagaatgacatgagcaaataatatatttatcaccagtttaaaccttaaaaggggtcatgctagaataaacctaatataaagattccttgccttgtagaaggagcaccaatgggagtcagaaaagaactctggagttctcccactagtaatgtgtttaatcatggaagttattagcctgttttctcacctgagaaataatatggttggacctacatgacttctcaggtagtttatgttttaaaattgttggttctatgatgaacatgttctcccagttccttctgaactacatttcaagatgacttatttttgaatacttttaagtgtggtggatgtgactcatatggtatctctaattatatctttacttagtaggtacttgttgcccaaaatctttggccacaagatttttaatgttctcaacctaacaaccaactgagaaaaaggcagtgatgtcttcatacttctctcattttgaaaaaggccattcctgtgagcaatgaatcagatcctgcctgatgttgtggtcctat

SEQ ID NO: 474580 - DNA, 1000 bp, Homo Sapiens; identical to SEQ ID NO: 343390

SEQ ID NO: 474581 - DNA, 1000 bp, Homo Sapiens
gtcttcagtctttgtctttatttatccctgtccctcccaacccccgggctcccaagttctatctcactcctccaccttccctgtcctctcacagctgaggttccgggctgtaatgatggcaatgctgcccagcacaacccctgcccccatgatgtcagaaagtgccacagtctcatggagcatataatactgcagtataagggccacaaccacctcggaatgcaggacagcgcacaccagggcagggtgggccttggtgaccgcatagcccacacatgtgaaggagaccaaggcgaggatcccctctgcccccacacaactccaactcaggaggtcactgggcaacacgggggtctgcagcacaaagaggcctggcacacagcccagcagccccaccaagccagataggaaggccactgttgggaggcaggagggaaagtgcagagaacgatagaccagaagccccagggacagcgccaggcctcccaggaaagcctgcacatagcccagggtggtgtagacacctgtggtcccctcctgtagtgtccagagtccaggtcccagaatgatgattagtcctaggatgctgcccaacagtccacaccactcgtagccaccgagaccctggctctcaaggcagagggtgaggacagcggagcatacggtggaagaacctttgcgaacagtggcagcgttgccagcgggcaccacctgaactgcactgtaggcacatccaatgctgaggacgttgagcagggcacagaagcaggcccagcctcggatgtcaggaggtcccagaagggggtcgccacgcagtttaagtagcagggcaatagggaggtggaagaggcatcgacagatgagcagctccagcgagggcaggttggaaccctggtaagccatacgagaaagggggcccacgaagccagcaggcaggcccccacccagcagggccaccagcaggccattggtggcaccagagggctggcagcgctggtgc

SEQ ID NO: 474582 - DNA, 1000 bp, Homo Sapiens
tttttttttttttttttttttttttttttttttttttttttttttttttttttttttttttttttttttttttttttttttttttttttttttttttacaattaatattttattctgtggaacacgtaacttttaaaaatatgtgcaatttaattaacaaaataaatgctccgagttcttcggaataaaaggtaaatctgacatacagcctgtcctccaagaacatggagtctataagaccactggaaacttccaggacgaattagagagcccccagagagggaagattagaacaaaggcaaaggggaaggaatgggaaggcgtgtagctgggattttaagggatggcatgtgaaaggaaaccacaggaagacagtgtacctcaaactttaaatatgtgttgacattgatttatctaattataaaacttaatttcatgtttgcaaaattcaaaagtagtgaaagcaataaatttagtgactcaaatctggtaaatggagacttttcagaggtttaacttaaacattaaccagtttattcattcattaagccattcaacaaagatttattaagctagggggatattctaaggtctgccaaaatgaaagacgactgctcttttggagctagttttaaatttaattcttctaattttgttgagacagaaattgtacggaagagaaaaagaaattaattaaaaatataacattctttgagtccctatcaagtgcagtgtccaaagaaatgtagatcttttctgccctgctttcagccttctgcgaaaggtaggattcattaaaagtgggaacagtcatggaccgcagagttggcaaagctctcatagggctgtggtggaagcctgtgagtaaggcagttccagagacactgcacttagtgtttgtttcataggcactgtctcacttaatcctcacaaggactctcttaactgttttaaaatcaggactgagaaagttcagcaaatcagacagacaggggcaaag

SEQ ID NO: 474583 - DNA, 1000 bp, Homo Sapiens; identical to SEQ ID NO: 343391

SEQ ID NO: 474584 - DNA, 1000 bp, Homo Sapiens
tttttttttttttttttttcgtatatattggatgtatttctggaagggtaattggatacattgtagattcttccagaagttcacaattttcttaatcggagccattgagagaaggcaagggaaggaagcatgttctttttgcttgtgtcagtaactcttcctctagctggagttttcatcaccttcaggcagttattggtttgggctttatgctatccactacagctgaaataactgctccagcagccttcgctccttccatcagggcgtgctctacctgctggctccggggtacgccatatctgaggccattgacaaagtgctcacagttcccttcaatcaggctgtactgcacgatcttgttgaccatcttttttgtacgctggatgatcttgtccaccggcaagggcaggtacgtcccatctagcttgttattgaccttccaggagcagccatgcagcacatcctccagacgactgtatttcaccacggcccgattgctaaagatggaagtaatgctgcccacctcaaactcctcacttgggggagccagatggaccacgcaatcatcttctacatagatggcccagtgctcatagccaattcgaaaaatctcaatcaggtctccaggtctgggtcttggttttccctcagctgcttgctttattaacttgccttcattctcaggctttggaattgaactccagtctgctttctggctgggtgtggtctccaagctaactacagccttctccccttgctggatgcttctgccctgttctaatgtgcccggcggaggctgcttggctgggagctggaccaacgctgcgaatcccacggattcttctaattcaaggggggaaatgctatttagacctgagtggggcacagctgaacgtctgagcgcaggcggctggtccttgggcccggtaccggcggttcgcgaggcgggtttggggaggggtgggggaatcctagggaggcggagcgcgtactcccc

SEQ ID NO: 474585 - DNA, 1000 bp, Homo Sapiens; identical to SEQ ID NO: 343393

SEQ ID NO: 474586 - DNA, 1000 bp, Homo Sapiens
ttttttttttttttttttgacctcagcaattttattaacaaatttatttccctaattgggtaacgtatctcagtgcttgactcaagggcatcgtaataggtttccatactgcagaagaaggaattaattagaactgtttgttcttattccatatttacacttgtccaccagtcttgtaaacattgcccctggtttcctccgtcctccaggttcttctgactccccaacccacccccaaaataaataaatagaaagcagagagtagagcaggacgtcagtggtccctttttatgtgcgttcacccccactgcaagccgcgtctcatggtcagaatgtggcagaatggggaactccaaagtctgctaagagattcctcattttaagagattttgggggaaaaaaaggaaaaaaaagcctgtaaagggaccctcctttccacaggcaaaaatggagaatctggggtcttgctttgccagagctcatgcctgggcttggctttgtccacttagaagctgggtgcagagcagatgagatgggtagatctcttctgcttcatcctgtgtcacctaaaactccgcttaggaagataagaggcattcatgagctctgcctgcccttggagcgagcagtccatacaaggagaaaaaccatgagctcatgaactcactcttcaaggctgcttcaagtcaagttttctgcctcacagcttgtgcggactgcagcatggcaacgagtaaacatttttagatgcaaatattccagaatgtcagcaatgctggcctctaacttgggctgccccctccagtgtactccagaaggtgccactttatcctggctgtctgttctccgatgagcagcattagagcataatgccaggggatgtggaatcacctccagagctgatttgttcagcagctgttaatatagtctgccatatatagagatggtttttgaaggtagataggactattatgaagacatctaaggggtgtctggacta

SEQ ID NO: 474587 - DNA, 589 bp, Homo Sapiens
tcaagaagagcactgaagagtttatcattggaaatagtgaaaattttagacttctttacacagctgtttctattaatagaattacatattggtggggggtgggagggtcactgtggtgttttcagtgctttatctgtatgtgacttagtttatcactctgaggacaggggtgagtgatagccgagaggaagtcatgagctatggtgaacatttggaagagaggtctcagttccccttcccgcctcagactcttcaaccatatctttcttgctgcttacttcaaagtagtctgtcgtgaaccttactgttaaaatatcatcaataattcctggtgttgagtcactcaagggtgtgggagatgtcgcaggaactcgcctgtggtcttcattggatggaatgcagcaagctcgaagatttttgcatgtatctttcactgcttctccatctttgcattgtttcctgcagtgccctgatctgttccagcattttttttcaccactataggctgggatcacttggggtaggagcacaagcataggaagagccagcagcaggagtttcatggtccttgggaagcaggaggtggtag

SEQ ID NO: 474588 - DNA, 958 bp, Homo Sapiens
ttttttttttttttttttttccagaaatgcttttccttttatttcagaagaaaggacataaaggcagacacttccccctccccctccccacccctcccagctcctgcctcacccagaactggagtgaaaggccagggccaggaccagggtcccataaagcttgcccttcccccaacccttccttccctcaaagtggcaaggttagaaaaaaattaactatgttgttcctccctggcactggataaaggccccactgcagccaaggagaaagaggggggtccaggctcccctcccaggcagagaagctgcctggctggctagggggagggtggaggtaggttatgggacagagaggacaagaagtgccctgaacaccttttccctttaacctgacatatttatatatttacagttattagggagggaaggacatctggggtgacatcagttctgcaaaggcagggaataaaagccaaatagcacccccatctgggtcacattttcctgcctcctagcttctaaaaccttcagtgggaaaaggggaaagtggaggtgtcctggacatccccccccatcaaaaactcatccaggatgaagtaggccttctcaaagttgaagatgatgtccagctcgcacacactgccaaagtatttgtctaagagctccacgtatcggtggatcagctccagtgtgatgagctcattgtcttggccctcgatggcgcagcagaagtagaggctggcatatctcttatagacaactttgaggtccctccactccaggaagctgcacatcttgggctttcgagccaggacaacctgcatgagctcgcgcaccatcttcttccgttccttgtccgaagtggccaggtaccatttttgcagccgcagttttccctgccggctgaataatagcatgaaccgcatcatcctgcagcctccggctcggcgcgtcccac

SEQ ID NO: 474589 - DNA, 1000 bp, Homo Sapiens; identical to SEQ ID NO: 467659

SEQ ID NO: 474590 - DNA, 714 bp, Homo Sapiens; identical to SEQ ID NO: 160596

SEQ ID NO: 474591 - DNA, 709 bp, Homo Sapiens
ttttttttttttttttttggcaggaagattcaggaacctttattgagtgtcctcagggaaggtgtctggggccgtggagcctagtgctggactctccggatggactgcagctgcccagtgtgggcctgtgtgccgagctcaccgtaagtacagaactctccgctgtgccggtcccgctccaacacatactggtagcctcggtagcctgggtactggtaggccacccacgctccggagctgactttgagggaacccacatccttgctggcccagcccatggagggcagggatgggtagtcatcaacgaggtcaaacttgcagccttggaagttgtccccctcaaacagtgtcacacggctgtcattgtggttcgcgcagagcactggccggaaggacagcagctggttgctgttgtggctgctgctgccactccaggcgctccagcgaggatagtctcccttctccagaatgaactgctgtccctggaagtcggggtactcaaaggccacccaaacgccgttttccaccttgaccgagcgcaccctgggcaggcctccgcgctcgcagacgttcgcacagtcgcttagcagccgacagcgacggccctggaagtcctcctcgtcccagagcgtgaggctggcgggcgccgggcccggcgcgggggcgctgctcatgccgcgggtgggtgagcgcggcacgcgagggaaat

SEQ ID NO: 474592 - DNA, 1000 bp, Homo Sapiens; identical to SEQ ID NO: 464778

SEQ ID NO: 474593 - DNA, 1000 bp, Homo Sapiens; identical to SEQ ID NO: 343396

SEQ ID NO: 474594 - DNA, 1000 bp, Homo Sapiens; identical to SEQ ID NO: 343397

SEQ ID NO: 474595 - DNA, 1000 bp, Homo Sapiens; identical to SEQ ID NO: 470955

SEQ ID NO: 474596 - DNA, 1000 bp, Homo Sapiens; identical to SEQ ID NO: 343398

SEQ ID NO: 474597 - DNA, 1000 bp, Homo Sapiens; identical to SEQ ID NO: 343399

SEQ ID NO: 474598 - DNA, 1000 bp, Homo Sapiens
ctatacggctgcagtcatggggttcttctgccgggaatcctgggttcggtaagggtactggtctgggctgcccccacggggccctggtctgcctgtttcctgataggctggcattctttggtgctggggaggggaaggcggaacgtcttgtcgaaagggtcctttgtgctggggagctggcgggggtgggtagtgctgaggataccggagatctgccaccctgagctctgtggggcggggatagctccctttgggagggtgcataggatgagcccctggataatagggaagctccctttccttgtagagcccccgaggtgctgctggcagatagtctacaggatctgcgggtcctcccctgggtaaggatgcgtactgcctctccatcccttcaaagcggaggttgtgtgcattcccatctggaccccttccaggcacccagagtaggtcatactcagatggccttgctcttccttcgtcgtcttcatataaagggaaaccttccctccgagcctgataatactctttccgcaacttctggatacggtcagtgcttccacccgtaggacggccactgtcagctggaaccagtggatggtatggcttgttgaccttggcatagagaccctctaagtggtctctttctggagacagtggatggccatcccgagggtaaccaaatggtccagctcgagggggagatggagatctaaagacatttgctgatgtgcatggttcccgaaagtggttcactctggcataattggggtccatttcatcatcatccatatcatacactgatccaattgcaccagtagcataatcaagaagacctcttgcctgcttttcccttagctcctgatgttttgctccaatcctttcacgctcttctttcattttctccagctcttcttctctcaggccaccatgtttcagagtacctttctgctcagcctttccacccttatcctctttcttctttccaaatctcagcatggcg

SEQ ID NO: 474599 - DNA, 1000 bp, Homo Sapiens; identical to SEQ ID NO: 343400

SEQ ID NO: 474600 - DNA, 1000 bp, Homo Sapiens; identical to SEQ ID NO: 343401

SEQ ID NO: 474601 - DNA, 1000 bp, Homo Sapiens; identical to SEQ ID NO: 160599

SEQ ID NO: 474602 - DNA, 1000 bp, Homo Sapiens; identical to SEQ ID NO: 343404

SEQ ID NO: 474603 - DNA, 1000 bp, Homo Sapiens
ttttttttttttttttcgagattgggttatttaattctacaattttgacagtgagatatttgaggatgatgctttacttgtgacatttgaaatgaattacacttaaatgttaggatttctttacatgatgctttatctaaatcattacatccttatctttcaaagaaaatcatggtactatgtatgtgtgaaactaaacatttaaaacaatttgttttattatttattatagaatatactttttaaattgtaaaaccaacctatattagtttccataaagctgccttagggaactatttttttaatatgttgaaaatacatccaaactcaatgaaatgtttgatatatagttagcttatatgtttcatagagttattaacataagtattattaaagctcttcccttttggttacattatttttccacatacagtgaatcaaggtaacaaggggtcgtttttccattttgttttctgaattggttatttacacttttgaaaccacaaagacaactcccaagtctccccatattttattttgcacaaatcttgccaataactcctcagggctcataatctaaatctagaggacattacagaattttttttttctaagagttttcaaatgtgcttattttcagggtcctgacataaggaatttcattattgcaagttgtatgtaaaatataaattaaatgctagtacatttaactatgaagaacaaaatttctttagtgtataataaatgagtagagtcaactcaaatccaatatttggaatccagatgcaccttgtgcaagaaactatatgggttgcattcagtggagtgaacagagtaactcagttgtatgaaatcagttgttgcattcaatgtcagtggcccaaaaaacttggggtaaaataaagactctatgtcaggtgtctggtttggttttcattttagtttataatgcttatgtaaaggggtaagccaagaagattattcttgaccacacttgaaa

SEQ ID NO: 474604 - DNA, 1000 bp, Homo Sapiens; identical to SEQ ID NO: 343405

SEQ ID NO: 474605 - DNA, 1000 bp, Homo Sapiens; identical to SEQ ID NO: 343406

SEQ ID NO: 474606 - DNA, 1000 bp, Homo Sapiens; identical to SEQ ID NO: 343407

SEQ ID NO: 474607 - DNA, 1000 bp, Homo Sapiens; identical to SEQ ID NO: 343408

SEQ ID NO: 474608 - DNA, 1000 bp, Homo Sapiens
tttttttttttttttttttttttttttttttttttttttttgagttgggagttgctgtatttttactaagggatggagagacacagcccccaacccccagggagctgggctggctctcctatggctcagcccatagctccagccccagggatgtccagaggatcagaaaactccctccctcctttaaagcagctactggcagagtccgtggagctcttgggggctgggagacaggcaggaaacccacctggcaggcaggcaggagcccatgggggagggttgatctttgatcttcctctgatggcccaacgggaactgtgagcacccagccgctcactgggacatctcggtgcagggaaagggctgaagctggcgcagccacggcagcatcccctctcgtggcagtgctccagctccagcgcctgggggccaagtgtggactcagagcttctgtccagcagaggcccctgatgtgcagctgcaccgagacacccaggcagggcgtcacctgcaaggtcagctgcaaggctgggactggggtttgtaatcgctgttgtctcttggcctgcaggatcctcacgcgtgccgcttcggtcctgatgggcaggacgcaggtctctcactagaccagtgtttccctctgtgaggcctggagaggagccttctggccactcctgattaacacagttccttattggtgagggattctctactgtggtccttctgcagtcccaccccatacatgaatggcttcttttgaagcttcctcctttgtacaggtgagtatctttgtcactgtcttactctgttttgtgctgcttctcgagaggctgaggcgggaggatcgctcgagtcctggacgtcgaggctgcaatgagccgatttcgcgccattgcgctccagcctgggcgacagcgcgagactccttctcaaatatagaattttaaaaaggccatctcgactgccgcggggctcgcgtcctctccatccccgaccttgg

SEQ ID NO: 474609 - DNA, 964 bp, Homo Sapiens
ttttttttttttttttttttttttttttttttttttttttttttttttttttttttttttttttttttttttttttttttttttgggaacggccctggcagtgcaggggaagttcacagagccatttattgagccccacaaccgaccagagggaagggcgtccaccaggctcaggccatggtccttgaggggccggcgctctctacttggcccacatgtgtcctgaggagttgtggcatgcccgctgccctggtcagagctggccgccatcttccagctgcatctgccgggccagcgtctgcccgatggccaccagggggctggctctgtaggccggactggccagcagctcctgaaaccgggtcctttcttcctcgagaagctgctgtctctgggctgcgctcatccggctgagctctgagggccggggcttgttgctctccctgctgcgggcttggcgccggctgccagcctcgagccccagcagctcgggcagggcatccctgagagggtgcaggtcccccaccaccaccgtggccctccgcctccgctcctccctgtgcttctgctcagccagttttatggcttcgattttctgcaaccattgctcacgcctcagcttcattttctccttcttgggcaaaacggtcttggcctctgcacctctcctgatggaagggacgctccgtgcactcgagcctgcctcacctctcctgacggaagtgacactcctcacgtccagctccagcttctgcaccaaggcgctggggtctatcttggtcctggcaaagatgttggtgttgatgaacgcccagtccttccccgcggccgaggccggcggaggggtcgcctccggggcagggggcgcggggccgggggcggcctcccctttcggcctcacggcagcctggtgcactcgggcgcgcaaccccctcactttccccatcttcccggcggagcacgg

SEQ ID NO: 474610 - DNA, 1000 bp, Homo Sapiens; identical to SEQ ID NO: 343409

SEQ ID NO: 474611 - DNA, 1000 bp, Homo Sapiens; identical to SEQ ID NO: 343410

SEQ ID NO: 474612 - DNA, 1000 bp, Homo Sapiens
ttttgagtgaatgaatgaaaattattttatttttatttgagctttggttctgccatttgctagcagtgtgactcaagagaagccagtaacccccctgagcttccctagttcacaaaatgcttgtcatgaagtcgacagcttccggaggctgcgaggctcgcaagaaatgcccacatgaatgtgcgcttagggcgtgagtgctcactccagaaaactccaacacagtgaaaaggcagaagcggtgtttttcttttttacatttttataagaatatataaaaaatgatataaatggacatttacggtagtgggggaaggcatatatctacgttaaaaggcaggacatttttaaaagctctattttctaaatgaaaactacgaaagcggggtgggttgtggcgggggcagttgtggccctgtaggaccttcggtgactgatgatctaagtttcccgaggtttctcagagcctctctggttctttcaatcggggatgtctgagggaccttccgcggcatctatgcgggcatggttactgcctctggtgccccccgcagccgcgcgcaggtaccgtgcgacatcgcgatggcccagctcctcagccaggtccacgggcagacggccccaggcatcgcgcacgtccagccgcgccccggcccggtgcagcaccaccagcgtgtccaggaagccctcccgggcagcgtcgtgcacgggtcgggtgagagtggcggggtcggcgcagttgggctccgcgccgtggagcagcagcagctccgccactcgggcgctgcccatcatcatgacctggtcttctaggaagcggctgctgccctagacgctggctcctcagtagcatcagcacgagggccacagcggcgggcgcccctggcgctgcccactcccccgtgagccgcgggatgtgaaccacgaaaaccctcactcgcggcgggccgcacgcgcgccgaatccggagggtcaccaagaacctgcgcaccatgttctc

SEQ ID NO: 474613 - DNA, 677 bp, Homo Sapiens; identical to SEQ ID NO: 160601

SEQ ID NO: 474614 - DNA, 444 bp, Homo Sapiens; identical to SEQ ID NO: 343412

SEQ ID NO: 474615 - DNA, 1000 bp, Homo Sapiens; identical to SEQ ID NO: 160602

SEQ ID NO: 474616 - DNA, 990 bp, Homo Sapiens
ctataacacggcacaaatccccaacatcatgatgaggtggtggagaacatctgagaagctatagagactggaaaatcccctgctccgcagggagagctccacgaccaggactcccccggtctggtctcgcaggaggcgcttccgtttatcgcaggtcactgggcaggagagtttctcactgtcgcagatgaacgtctcacagtgtaaccacaccttggagagtttggggatgttctggaaccggaaagcattgaattggaaggttgccctgtgatctctcccattctcatgcacgaggacggtttcatccgtggggcagcccttgttgatcagctgccactgcaagggatacatgaagtcagccgagggggtggcccaacagctgttcaagaccactttaaacctaatgcttaaccctttggcttccactcctgcaaacagatctgaaccgatttcggatgcctccaggacaaagggagcttctttcttgatggagaacttggcattagtgtagaagttgagagacagttggctctcaaatgtgcccatgctcccgttcttcacgtgaacagtggccactctctggtcaaaggcagcctggttcaccaagtaggtggagtggtaggtgcaggagaaggagtagttgacaggctggttttttacaatcactgtggtgtcattggaaacgatgtgactgtagaagtgatagataggtggcttgtactcagactgggttccacaataggacttgtttttaggtgataaatctgggatcacaaattggtagtaacctccttcgtggaccccattgtaacacagccctccgagggccagctgatgaacttcccatccatagggacactcggggattttggtgatgatggttttgggatagcaaaacacaagaatgacatctgctttatttggagcacacgattttgcagaggcttctgcaaagatggccaacaagacaaaggccttcgtcaccat

SEQ ID NO: 474617 - DNA, 1000 bp, Homo Sapiens
ttttttttttttttttggcaaattgttagaaaaaaagtttatttacagtattttgcttttccataccaattctagtgagaagttcacattcttaaattcccagtcagcaactgcatttctcccctccaatgtcctctccatgacttatctctgaagtttcgagccaatgtttaaaatgtacactatttacaaatgaagtgtccaaatgccatattcccagctctccagtcagcagggggacccttctgaagtgttgtcatgtgctgggattcagaacttgaacaagttgataaagtcctggggtgaaagtgaaacggagcagctctctgggttattggcagtgcacggatggtcagtgcccttccaggaaaggatgtgacagtgtttgcagagctgaagggtatctccatactgctctttccttgggtaacatcggacaagtttgaaatacatcttcttccaatccagctgccctttgtctgacagaattaatcgtttgcggatctgccgctcggagaagtggtactggcagagtttcttccacagcagccggtcttcgctgagcacgtgcaggtcgggggcagcctggcccaggctgaccaggtcccgcccgtcgctcagcctctgcatgatgttcagttgtaggcacaaaggcaggtcagtgaaggtgaggcctttgaaggcaggcctggtgatctgaatgttgttcagctgctgctgccagtggagaatcgtctccatccgatacacccacatgttaatgttcccgaccagcacagacttgccgactctttggaccagtgtacataaggatgtgtagagggtctggagtagttcccttattagtctaatgttttgctggtcttcaaggactttcagtaccactttttccaaaatattcatgaagttcttttgggcgatgccactcagggatgtgagctgtgactttgctatcagctccaacagccggaccacgtagttaaatcttctggaatccaga

SEQ ID NO: 474618 - DNA, 1000 bp, Homo Sapiens; identical to SEQ ID NO: 343415

SEQ ID NO: 474619 - DNA, 1000 bp, Homo Sapiens
atctcattaacctatgttttattttgagtaaattcattattcattatttcacattataaaaagtaaccacacatacatatgcattcacaaattagatcatctttatcatacatcaatatattttaaaaaacaaatatcttctaatatcaatatagttatatgctgattgcattttgaaatagagaagctgacaatagcttcacacggtatatctcaagaactgacagtttaaaattaagaactgtatatattccacaggcaaattttgatggaaatattagcattagtacaaataaatgctgttgacatagcttaagcatgatagcttggaataacagctgattcagactagattcatcattttaaataaagacaagtacaatctaaaatgtaaacaaagtatttataaaataaattctctaggaaataaagaaaatcatcaatctattatttttaaggtatttatagctcaaagttaccagaaatctttgtggaattttcactgccaaatttaaatttgggaatgtccgggtacaacatattgtcaccacaatccggagggccgccaaaatcgcagacggctatttgcatcctttcagtgtgacttttcaagtgggcttggagactcatgagaaaatgcagtatctttctcaccttccaagtccccctccaagtgcttatcaagctaggacaattcagctgatgtagactttcatacgatttttaaatgctaaaactctagaacaattaaatggctggtttcctgcacaaataaatgcagacttgtctcttttgcagcagtggttaaagcacattcctagagatgtttttcattacacttcactataacattggaattccgtaaccacattattactcaagaaatatatattatacctcctagggaatctaatttgaaatatgaaaagtttaacatcagctgtcattatgtctctctttctgctcattaacaacaacaaaaaaaaaaacccaaaattta

SEQ ID NO: 474620 - DNA, 1000 bp, Homo Sapiens
ttttttttttttttttttttttttttttgagacagagtcgtgctctgtcacccaagttggaatacagtggcacaatcttggctcattgcaacctccacctcccgggttcaagcaagtgtcctgtctcagcctcctgagtagctgggattacaggtgcacgccaccacgcccagctaatttttgtatttttagtagagacagggtttcaccacgttggccaggctggtctcgaactcctgacctcaggtgatccacctgcctcggtctcccaaagtgctgggattacaggtgtgagccaccgcgcccagccattgataggattttcaaaagaaggaaagacggcatggaggagcctgtccatggctctcctccaaggcccggtcagggctgtgtggtctgaagagcccctgcccagctcacttctaggacctgcaggcaccgcgtggtccccatcaaccccaggctgcctcagctctgcaggggcagagggccggccaggtggggccgggaaaggaaacagagggtgtctaggggatgggctgacacagagtacggagttaggactggctatgtgttagtgccgagaatcctcttctgatactaagaaaacataaataatttgtgtcaacatctgtccccaccgccccagggcccagcggcagacccagcctgggaactggtctggagaggccagccggcgtagcttttctgtgtccatgccgccaggtggggctggggacgctcagtctcctcatcactttgctctctgggatacaggtgtgtcctggacgttcattttcccagagagaagaaagagaacttgccgggccccgtcggggagcaccaagacccctggccttgctctctgggtgggtcacgggtgctgttctgccgcaggaggtgatgggaggaggtggcaggaaggagccccagggaggcgggcagagggcgtgggccccggccggtgccctcctgcacctggagctccccgcttctgcac

SEQ ID NO: 474621 - DNA, 1000 bp, Homo Sapiens; identical to SEQ ID NO: 119932

SEQ ID NO: 474622 - DNA, 1000 bp, Homo Sapiens; identical to SEQ ID NO: 343416

SEQ ID NO: 474623 - DNA, 1000 bp, Homo Sapiens; identical to SEQ ID NO: 343417

SEQ ID NO: 474624 - DNA, 1000 bp, Homo Sapiens; identical to SEQ ID NO: 160603

SEQ ID NO: 474625 - DNA, 1000 bp, Homo Sapiens; identical to SEQ ID NO: 343418

SEQ ID NO: 474626 - DNA, 1000 bp, Homo Sapiens; identical to SEQ ID NO: 160604

SEQ ID NO: 474627 - DNA, 1000 bp, Homo Sapiens
cagcttgctatctttatttctttatttgcactgggaaataacatctttgtctactatttctagcatctgagatccaggtcagttgtgattaatttttctctgtattatgcaatgtattttcctgcttttcatgcctctctactggatgctagacattgtacattttaccttcttgggcactgaatatttttgtagtcccagaggtacttttgagctttgtcctaggatgcagtgtgatcctttcaggtcctgctgtatagctgtgtcaggtggcagtgcccatctagggtttctcacttgtgttttctacccagtgccccataaatcatgaggttttccagctagggtggtgggaacaggccctaccctaggtcctgtgtcagcaccactgttccttctaatcttctcacatggctctttctctggcctgaggtggttccttacacacatgcgctgatcagtagggctgtgctgcctagttgagggagctccctctggcccccgacttagatctgtgtgtctctctccagtactgtgaccgcgagttccggccaccttagtctccctggatccctggcattgttttcctactgcagggaggctggcaggctccacctgggttccccccgcatgcacactgcagctgggaccctcctcggagcatgagctggacaatcacagggctcccctcctgagtttgccctctcaagaatcactatccttcactccctggtatttggtggcttgcaaaccgttgtttcacatattttgtccattgtttgcttgtttcatgcaggagggaaaagtccagtacctgtttctccatcttagccatatgagactcttaaattattatttttttcctttcctagcaccagaaagtttgatgcaggcattggaagacttagattatctggcagcactggataatgatggaaatctttctgaatttggaatcatcatgtcagagtttcctcttgatccacaactctcgaagtct

SEQ ID NO: 474628 - DNA, 1000 bp, Homo Sapiens; identical to SEQ ID NO: 343419

SEQ ID NO: 474629 - DNA, 1000 bp, Homo Sapiens; identical to SEQ ID NO: 343420

SEQ ID NO: 474630 - DNA, 1000 bp, Homo Sapiens; identical to SEQ ID NO: 343423

SEQ ID NO: 474631 - DNA, 1000 bp, Homo Sapiens; identical to SEQ ID NO: 160607

SEQ ID NO: 474632 - DNA, 1000 bp, Homo Sapiens; identical to SEQ ID NO: 343425

SEQ ID NO: 474633 - DNA, 1000 bp, Homo Sapiens; identical to SEQ ID NO: 343426

SEQ ID NO: 474634 - DNA, 1000 bp, Homo Sapiens; identical to SEQ ID NO: 160608

SEQ ID NO: 474635 - DNA, 1000 bp, Homo Sapiens; identical to SEQ ID NO: 336641

SEQ ID NO: 474636 - DNA, 1000 bp, Homo Sapiens; identical to SEQ ID NO: 160609

SEQ ID NO: 474637 - DNA, 1000 bp, Homo Sapiens; identical to SEQ ID NO: 160610

SEQ ID NO: 474638 - DNA, 1000 bp, Homo Sapiens; identical to SEQ ID NO: 343431

SEQ ID NO: 474639 - DNA, 1000 bp, Homo Sapiens; identical to SEQ ID NO: 344612

SEQ ID NO: 474640 - DNA, 1000 bp, Homo Sapiens
ttttttttttttttttggttttatacagaacctttaattgcaaacaacttggaagcagccatcccgggggtggcaggggagaacccaccacaccctcccctcagtattcttcgccttcttcagcctcagcttccacggaatccacgcccacctcttcataatccttctctagagctgccaggtcctcgcgggcctcagagaactctccctcttccatgccttcgcccacgtaccagtgcacaaaggcccgcttggcatacatgagatcgaacttatggtccaggcgggcccaggcctccgcaatggccgtggtgttgctcagcatgcacacggcccgctgcaccttggccaggtctcccccggggaccactgtggggggctggtagttaatgcccaccttaaatccagtcgggcaccaatccacaaactggatggtgcgcttggtcttgatggtggcgatggccgcgttgacgtctttggggaccacgtcccccctgtacaacatgcagcaggccatgtacttgccgtggcgagggtcatacttgaccatttgattggctggctcgaagcaggcattggtgatctcggccacagacagctgctcgtggtaggccttctcagctgagatgactggggcataggtggccagggggaagtggatgcgggggtacggcactaggttggtctggaattccgtcaagtccacattcagggccccatcaaatcgcagggaggctgtgatggaggacacgatctgcccaatcaggcgattgaggttggtgtacgtgggacgttcaatgtccaggttgcgccgacatatgtcatagatggcttcattgtcgaccatgaaggcacagtcagaatgttccagggtcgtgtgggtggtcaggatggagttgtagggctccaccacggctgtggagacctggggggctgggtaaatggcaaactctagcttggacttcttgccgtaatccactgagagccgctccatgagcag

SEQ ID NO: 474641 - DNA, 1000 bp, Homo Sapiens
tttttttttttttttttttttttttttttttttttttttttaagaaagaccaccatattttattaaagttggatgtgactgccctttgcaattaatgtttcatgcaccagaaaagcataatttctggttgtcaaaacaataacttccttgctagttcaaactatagttatacagctctaaagaaacattaacaatttgtataaatgggttgaaaatgtgattattttctattcaaattaataatgcaaacacgaatacaatgttacttcaaacaattaagaaattttatccagtcgttagctaagtaatgaggtcgagtaatccccagtaacttcctgtgataccaaagggaatgtatgttatctctaatgaagcacacctgggtctgtcatgaactaacaatgtgaaggtgagccctttggcttctgggggattttatttcctctgctgtagaattgaaggactttgtttaaggtgtcttacaaagacttcttgctttgcaaaaacgtgttgggtggagtaagaagtaaatttttaaaggcatttggactttttttctatctgtagaacagcataattcagaactattccacactgttgttctggaaaaattttcctcatgcaatgtaattgtaatgactgacattaaaaagtctgaaaatgaaacatcaaacaataaaaatgtggtttcaaatctttaaagtgcttgcaatatttgggttaaaaatgatgcaccactaccagttagaatatcccatctttgaattttaagagctaagagtctgagaaggggaaaaatgacaaagagattgcattattcacgctattcttccatacatgcattcagtgcacaccaattgaaaagtaaacaccttgaaatactactaagaaagcaaagaaagattattccttccatcaaacaccatacaaaaaccacattatctacacacacacacacacacatacacacatgttgtctcgaatgaatcaaacaaaataa

SEQ ID NO: 474642 - DNA, 1000 bp, Homo Sapiens
tttttttttttttttttaaggagtgggaaggttttaatgagcatcccagagggaccaggggatacaaactccaaatccagcctttatatcatcattatttcaagcaacaggaggaggctcagccttgcttagctcattcccagatgaagaggcagctggagggaagtccctgaaagtgcctctctacccagcagaggggctaagggaaagtggagaggtctctgctgctgctgctgctgctgctgctgctgttgctgctaccactgccaccaagagcagggagacctcaagcaccaagctgacctttggaggtcaggacggacccagaatcaggcaggaatttggcaggaacatcagacattggaaggttagatgagactgaacaggtgagaaaactcttagggtccccagacagcattgagatctcacagaggggccccaagggcctgcgactccaggagctgagaccccccagggagggaggtacctctagactgagacactcacaaagggaccccagttcagcaagggtcagaggaaggtctggagggagaagagagtaaagggccctgggtgggcaggaggctgaggagggagcctggggagagcaccagggcggggcatcaggccagtgcctggaaggtgtggccaaaggggtctctagctgctgctctgctgctcctgctcatggatgagtttggcgatggggccggtgatgccgcctatcaaggtccagtactcatcgaagctgatgcgcccatcatgattggcatccaggttctggatgagcttatccgcagccttccggttccctgtgtccgacagcatgtggttcagctctttctggagcatctcgcggaagctgctcttgctgatcttgttcttgaccaggctgtacttagacacatatttgtagaagttttccaccaggacaatgactgccttctccagctccgtgtagcagtctgacatctccctgcttcgcctgctggcggggcct

SEQ ID NO: 474643 - DNA, 1000 bp, Homo Sapiens; identical to SEQ ID NO: 341992

SEQ ID NO: 474644 - DNA, 1000 bp, Homo Sapiens; identical to SEQ ID NO: 343435

SEQ ID NO: 474645 - DNA, 739 bp, Homo Sapiens
ttttttttttttttttttttttttttttttttttttttttttttttttttaaggcaggagggaatttagtggagctggggaaggaagaaagtggggttgggagaacctccccaaccccatccctgctggcccggggacgggcatcggctctcagcaagagaagtattcccgggatgctgagcgcttcattctgtctccaggactcaggcaggtaggtcccagctccgccgcgcccccggacctacaggtcagcgtggtccgaagtttcctctgggggcttcgcgggcgcccacacgtactcggggggcacctgcgcgtcgggcgccgccttgcggtagaagccgagctcctgcactagcgcattgatctcttcgcgggtcatttcactgagtgggatgcgctctagttcctcgtagcggcggcccagcagcacgagctcagggtcggccccagggaggtgtttcatcaccaggttgtgatagaatggaatgtcctgcgtgacgaaagccttcacctcctttaggcggttcagctgtcatcccccgcaggtctctacccgggcgcgggttaggccgctcagacggttccagtccggccggtaggcagtggcggctgtggctggggccacaagcgccgcgagaagcagcagcagcgccagcggaggcaacaggaggctcatcgggacccggccgcagatgatgcgcaagctggaggcgaacctccgagtcgctgcgccacg

SEQ ID NO: 474646 - DNA, 1000 bp, Homo Sapiens; identical to SEQ ID NO: 343437

SEQ ID NO: 474647 - DNA, 1000 bp, Homo Sapiens; identical to SEQ ID NO: 343438

SEQ ID NO: 474648 - DNA, 1000 bp, Homo Sapiens; identical to SEQ ID NO: 339302

SEQ ID NO: 474649 - DNA, 1000 bp, Homo Sapiens; identical to SEQ ID NO: 343440

SEQ ID NO: 474650 - DNA, 1000 bp, Homo Sapiens; identical to SEQ ID NO: 343444

SEQ ID NO: 474651 - DNA, 1000 bp, Homo Sapiens
tttttttagcctttgtctcttctttatttgcggatataattatgtaccgcactctaaattagagatagatttttttctgatatacatttcatcttattcaccacgagcacaccacacgcacagtagaacagttccacacctgataaattgcacaagatgagagtttagattcctgaaaaccggcaggcaagctggccccgccgcggcttctcgccttccggcttcgttgaaggaaattgcccacccaaaatggatttcccagtcagcctttcccgctgcagggttgaaacgtctccggaatgggaagcgctcttgctggaaatggctggacgctgtagattccgagctctggatggatgtgaaatattcccccaaggtcaagttgccacgcctgcgagctgcgccccctctccctcccttcccaaccccctcgatgactggaaccaaagtgtcggggccccacttggaaggacagagaaccctgcccgcaaatgcaccccgcctccccccaaaaccagggtgttgtggaaaagaaaggacaacagaaacgcagacgcgatggatcgtgaatccctgtcccctcccatcccccccatccccgaataatcagaaactaggaaccagagatgtttaaagcttggcctcccaagcgcggcggcagggcgcactgggctggtgggggcggggtgaggggagaagggagagagcgcagaagcgcggcgggggctcgcccttgcgccctagtcctccgcgttggttcggtaggcttcgatgaggccctcgagggagtgcacgaagccggacacgctgcagatgccgccgatgacgaagatggcgacgtcgaagaagacttggtgccacagcagcttgcgccagagcaggcgcaggtgaaagaggctgggcagcaagaaacagaggccggcgcccgtgaggctgccggtgaggcccatgagcagcgcgaagtgcggcacataaatggccatgagcagcgtgaagacga

SEQ ID NO: 474652 - DNA, 1000 bp, Homo Sapiens; identical to SEQ ID NO: 343445

SEQ ID NO: 474653 - DNA, 1000 bp, Homo Sapiens; identical to SEQ ID NO: 343446

SEQ ID NO: 474654 - DNA, 820 bp, Homo Sapiens; identical to SEQ ID NO: 160613

SEQ ID NO: 474655 - DNA, 1000 bp, Homo Sapiens
tttttttttggggaacattctaaagcctttatttagcatcaggtagattatttcattataacacttgttaacttcaagacagcaattaaaatcacggactggcagctacctaggcccctgggagcagtatctcagtctggggtttgggtggataaatactataagatttaagatgaatgtgccccaattaaaggggcaaaactactgtacagtaggtctccacacatattttaagtacacaggtactttgcaaacttgaaatgcacaaggcctccttttatatagtttgatacttacatgagtgcaacttactttccctagtggcatttgccactggaagtggaagcatttaacaaggtttgtcattatgtaatggtgattaaaatctatatttctagggcatttttgtgaattgctagattttatacatattttcagttcaaatgtaaacttaaccattttaatgatactgactgcagaaaactgtaaaagtaaattcagagcactaagtaaatgaaatacttttccagtttaattctttagaattttcaaatcagaaatatctattctgaatattcaggcattttttttcttcttggaagatggaaggggtaacattgggaggattagtatgaataaaagccatcttatcaatgaagtctttataaaatgacataacctctatatctgagaataaacattgtataggaggagagttctaaatatgtcaaaggttacatctaaaacattcaagcatgacagcataaaaatattcaaaataacttgatttgggattactatatagttccataaagctaaagttacatttaggtataaaccttcagtaaatatggcaacagcaaccataaaaagcatattccccagcagtgttctcttacctctatataaaatagtattccaaataagtacattttatagcaaaattatgcatttttcctaagactttcatcaccaatatcgccttataccctgcttttgt

SEQ ID NO: 474656 - DNA, 1000 bp, Homo Sapiens; identical to SEQ ID NO: 337928

SEQ ID NO: 474657 - DNA, 1000 bp, Homo Sapiens; identical to SEQ ID NO: 343447

SEQ ID NO: 474658 - DNA, 1000 bp, Homo Sapiens; identical to SEQ ID NO: 160614

SEQ ID NO: 474659 - DNA, 1000 bp, Homo Sapiens; identical to SEQ ID NO: 160615

SEQ ID NO: 474660 - DNA, 902 bp, Homo Sapiens; identical to SEQ ID NO: 160617

SEQ ID NO: 474661 - DNA, 1000 bp, Homo Sapiens
gacaggcagcttcttctgtgtctctttaataccctccaggcccgtcaaaccctccactctccctccctcccctcccgccgcctttaagggtgggccccctcccccagcccaaggactaaggcaccaggtggctgcagcaggccggcccggacacagagacgcacaggttggggacgctgactgcagacgcggacgagcagggcgggcgcgggaggcagggttcaggccgccgcggggctcccccagcctctgggcccgtcctggggggcgtggaaggcgcagacagcccccgaagggagccagtcggaagtggggagccacggctggactgcatcctcacttgccgcccttgcgggacagacaccgggggaggcaagagaaagtctgcttgacgcgcgccagcagcggcagcggccggtgggcttcccggggcgtgcgcggcaccaggcgctgcacggttccctcggaggctgctgagtgcggcccggcggaggaggccgaggtcgcggagccctgccggcagcgcttgcacagcggcagcagcgcgcgcaactcctcctcgtcgcggaaggggctctcgccgaagcgctcctccagctgccggcgaagcttctgggaactggcccagccaaactcttcaagctgctgcctaaagcctgggttggggttggcgatgggcctggtggccttgatggcttcaagcacgtcccgccagcctagccccgtcacagtcatcacatacgctgtcacaatcgtggtgctgcgagagatgcctgcaaagcagtgcacaaggcagttccccccattaaggcggcagcagtggatgaagttgatacattctttgaagtgctttttgatgggtacctcaggggtatcagcgaccgggatgcgaaggtaggtgatatcctgcagcagaggctggggtgactcatggatagagatgatgtgtgtgatcttatttcggcccagctgatccaggtctttggcatcaatgaagttt

SEQ ID NO: 474662 - DNA, 1000 bp, Homo Sapiens; identical to SEQ ID NO: 343451

SEQ ID NO: 474663 - DNA, 1000 bp, Homo Sapiens
gctttgccatgggtgtgggtgaggtcctcctgcttggcgttgcctagggaggtgcctggtggtgtccctgtggcagcactgggatctgcaacaggatggcctggccaagggctagcggccacagggtgcaccaggcatgcagaggaacagccagcctggcacctgtcctgcccctactggccccagcccacatcagtgtagtgatatggaatgttaggtatggggatacatccttctgatcagacagacacagactagcaatctgtacaaacacaaaagaatccattttcagaaaaataaattactaaggggagaggaagaaagggtccactttgcttttctcaataaatatgcaattctgctcacctaagacttgaaaggtaattatctgggggtgggattctaacatcagggtccacgaaggtgattctaaacagagctgcagccccagcgccttgtcaggggagcccccaacccttccagagctgccccgttggcctcttccaagcaggtcagagcacccgtgtggtgagattccaaaaaaaaaaaaaaaaaaaaaaaaaaaagtgtccttgtgcccaaagtctcaggtgcttggagtgtggctagaaacagctcttttggatcccacctctttcaaaaacaaaatgtaccaactggtgaggcaggaagccaggtccaggctgggacagcctccttccctagggcagtgcgctccaggtgccggtggggtcagttctgctgtaggatgaggttttccagttcatctgcagagcgcagcaggaaggcagcagactcccggtagcccgcgatgagctgccgcacggcgctgatctccgtggggctgagctgagcggtgggcacgggcctgctggtgctggtgctggagggggtgggcgtgggggtggtggaggtggtagaggccccgcctttcatgctgaggtccgtgggcccattactgtggtttcctgtttggagggaggcagggggctgcaggttg

SEQ ID NO: 474664 - DNA, 1000 bp, Homo Sapiens
tttttttttttttttttttttttttttttttttttttgcaattttaagtcatttcattttattgaattatgtaaaacatctttaaataacagtaaaaaaattaagaaaccattgcacaaattcagtcacaatgatggcatactacagcccacagaatttaaatctcatgtgagttgagttaaattaatttgctggtacaaagagaatataatgctcttcctgctgggaaattatttccacatattcacattgtatagggattctgaacttgtgatattttcaataaaaggtccatatcttaagaatttgaatttagggcttatcaatgatcttgaaatacaggggtggagacaggttggcagcaaaacaaactgctcaactaagcaatgaagaaaaatctgcctctgtatccagatagaaatgaatttcaagtgttaaagaggcatctctcacgctgctcgagggtggaaaaatcttgtcaactggcaaaagggaaatactcactaatcactgggcattatgaaaaagtacaaattccttacaggtacacatttgccttatctgattttatgtttcttctcactctgccaattattttacaaatataaaaagagtagttttagcagaaaaaagggttatggagtgaaatactaataagcaataatggaatgtaaccagggcaatttcatacctgccaaggagcataattaaaagagaatacaaaaatctaaaggtgaaccttgctcctataccaaagtaaaatcgatttattccttattttctagtctaatctagtatttcatttcctactcagttttcctttttataagagtaaaacattttttggttgaatttagaactaattaaaagcattatggtagctttaaattttgtagaaaattcatttgtataaaaacatttgtctttaatgtttaaaaccatatattattagaaatatcatgggtgtatataatgcaacataaaaatgtccagctttgac

SEQ ID NO: 474665 - DNA, 1000 bp, Homo Sapiens
tttttttttttttttggagttcaagtgcgtgatcccccactggggcatataggttacagccgccagggcaactgaaactcctcaggctccagagggctgaagtgagtcgcctccacgttcttgaggtgcttccgagccaggaacagtgcgaggcgccggcgccgccgcgagctcaggccctggcccaccagccatgggaaggcgggtccgtgtggccccagggcctcctcgccctccagctcctcttcgcagcgtgcacggtaggagcgcagcagcgccaggcaccagtcctcgtccacgcggtagcgtgcatagaaggcggcctcctgcgccaagctgccagcgcgcagccagcgggtgacgacggcgcggccctctcgcgccatcacgacggggtagcggtgctccagcaggcgcagcagcagctcattgccccggttgccctccacgtcaccaggtgacagggggcgcaggcggcccgaagtgctgaccacgtcatcctgcgtgcgtcggagcagcagcaccggccccgggtagcagcacagctgctcggccacgttgaggttgaagtgctcgcgcacggtgcgcaccaccagccccttccaactgtggggcatgaccttcagcgccagcggcacaaggtcgtcgaaggtggcgtccagcaccagtgcacccagctccgggtaggtcatggtggcccaggtggccgtgaagccgccaacagaccagccgtagaccaccaggtgcgcgggcgggaagtgcaggcggtgcagtgcgtactcgaccaccacgtccatggcgttggcgtcgtgctgagggaagggcacgccagtgctgctgccgaagccggggtggttccagcccagcacggagtagccggcctcgagcggtgcagacagacagcccatctcgtagaagcccgcgttgccttcgcagcagatgacgaggcgcggcccgtgcacgtggctgcccgggtgctggcggcggtccatgaacatag

SEQ ID NO: 474666 - DNA, 1000 bp, Homo Sapiens; identical to SEQ ID NO: 343454

SEQ ID NO: 474667 - DNA, 1000 bp, Homo Sapiens
acccaagttctcatctaaactcagtgacttctcatgctctgggatgagacctgtacctcagtttcctcacagcaaaatgggcgcactaacccatgtcctgccaaggctgcctcccagagttgtccctgagaggtctgaaggagatgtggggtgggaaacgatttcttttttgagattgggtctcactctgtcatccaggctggagtgcagtggcgcaatctctgctcctgcaacctccgcctcctgggctcaagcgattctcccacctcagcctcccgagtagctgggattacaggcacgcaccaccatgctcagctaattttttgtacttttagtacagacagggattcaccacgttggccaggctggcgttgaactcctgacctcaactgatccgctcgcctcagcctcccaaagagctgggatttcaggcgtgagccaccatgcccggccaggggaaacgttttctatatagtaaagtgctttaggcgggatgtgcaggggatgatgataaccattgttattactattattatggaagaagtagtgggagcttggggggtctggtgaggctagaagcaggggacattctagataggaggggagagggagaaagagcctggacgctgggtgggccagaggagaagaggctgggtgatgaaaccataaaagtgcatgcgggtggacatgatggaaccatgtcagcaagggtgtaagagggtcaagtctttgggcccttggccttgtcacatcggaagccaaccggtagaagagtgcacctggggacacctagaggtgggacccatcttgagttcatagaaagcaagacctcttagaggtcagcctttggtgggaaataaactgggggaaagggctggcacagggtcagaggattggattctgatgtctcgtgtgtgcaggcctaagagccactgatgcaccaaaatgacttgatttgcattccaatgaagtcatcattccaaaaggggctgatttggct

SEQ ID NO: 474668 - DNA, 1000 bp, Homo Sapiens; identical to SEQ ID NO: 160618

SEQ ID NO: 474669 - DNA, 1000 bp, Homo Sapiens; identical to SEQ ID NO: 343456

SEQ ID NO: 474670 - DNA, 1000 bp, Homo Sapiens; identical to SEQ ID NO: 160619

SEQ ID NO: 474671 - DNA, 1000 bp, Homo Sapiens
ccaaaagaggcgaaaccgtttatcaagtcggcgccggggcggtatctacagtatctacagtatctacatgtatctacaccgcctgcaggcggggctctcgggctgtctacactgcaactgccggccgggccgcgggcgacgcggtctcggggagaacaataaatatcacttccttccgcctccgaccgggcgctttggcactggcgggcggggacccccttggccctcggggccggggaaggacccgcggtggctccagggactggggaaccggatacttcgatagcccaaggggctgggggtggcgagggggcccccatggcttcgaggctggggaaggggagagccgcggtggcccctggggctgggggaacgtattccttgcttgcccttggggcagggtggccgggcccggcgaacttcggggctgtgcaggaccggggcgggagcgcgacagggcccgtgttatctggggcaatagtcgtaggagccgggcggcgcggctccggccgacgagtacatgttggcggccgcggcagctgcggcagcggcggcggcggccgcggcggctggactcacggggtggtggtggtggtgcggatgcgcgtgcgggtggtagccgtggccacgcaggccgggcagcgggtagggcgccggccggctcttggccccgagatagtggtcgtaggcggcggccggatatttgtaggggtggtggtgcagcggctccgatgcgccgggcgcctccaggcgcagctcggggttcgggggactgggccggcctccgggcgcgccgggcagcgggactaagccgccggcgccgccggccccgggcagcgaggggcttagcacccgggccagcagctgcggaggatgcgccgggtccccgagcactgctggcccgcccgcgtcgcgctggaattctcgccgggcctcagccgcgtctttctccgtgccgctgggctgcgtcggggaagccacggggttccgcgagcgcgcg

SEQ ID NO: 474672 - DNA, 1000 bp, Homo Sapiens; identical to SEQ ID NO: 343458

SEQ ID NO: 474673 - DNA, 923 bp, Homo Sapiens; identical to SEQ ID NO: 160620

SEQ ID NO: 474674 - DNA, 1000 bp, Homo Sapiens
ttttttttttttttttttttttgtcaagacagtgtctcactctatcacccaggctggagtgcagtggtgtgatcttggcttactgcaacctctgccaccttggttcaagcaattctcctgcctcagcctcccgagtagctgggattacaggtgcctgccaccacgcctggctaatttttgtatttttattagagacaggatttcaccatcttggccaggctggtcttgaactcctgaccttgtgaatcaccggcctcggcctcccaaagtgctgggattacaggcgtgagccaccgcgcccggccacaaacagcattttctaggaggcatctgttgcagtgtctgctacaccagggctggtttgaaaacctgatgtaatacaccttcaagagcagagtgtcctttctgaaaagacactgcacattgatgcacagtgtccacatcacctatagaaggcaatcaaaaaaaaatgaggggctttagaggaccacatccattacacaaataagcaactgagtccagggatgtggcaaacagaaaatccagatcatgtgtcttttctactgtgtatatgattagcagtacttgtttcattcaattgcagatgtttctgactaaattttttaatgagggttccaggaattaatgccaccatggcaatggccaacagcttaaagacagtgtcccaggagaaaagagcatccagagaggttagggttgacaggatggaccctgtctgcacacagatgaaattatatgggatcaaaccgataagaactgagaagaagaactgcacgatgggaatgttcagaattggggccgagaggttcaagaaccagtttggtgtcatggggaaaagtctcaaaaacaataagaaaaaaaacaagctgtttctgttctcctccacctttctctgcagcagggccactttatcaggaaagtaggacaccaccaactgtttgccaaaaatactggagagcaggtagcagcatgtggcacc

SEQ ID NO: 474675 - DNA, 1000 bp, Homo Sapiens
ttttttttttttttttttttttttttttttttttttttttttttttttctgagcattaatttgggctttatttcaaagttaacactttagctatccaaagggtatttcgtgaagaaaaacagaacagtatcagagcatcaaagaggaggaaacactactagtttcctttccccaaaaaacttaaacttttatggtttagtggttcaacactagcttcacttcccagaggcttatataaagaactttctgttggtgttagcaccaaacaaggccattcgtatttctggcatcttttgcttggctgagagatccagtcggctttccaaggtatttgaaacctttattctctgattgccactgtagacctccacacctccagctgcattcacagccaggtatgcctctttatcaatctggacctccacatgtttctgggaaattgtcatgtactcggggatggctttttgtacagcagcctccaccaggaggaggtcttgtggccggcagcgtacaatcatcacaggttccagcagtcggagcagaccctggagcaccagtttatccagcagcccctggtagacctctgggtcctccacaatcctgctgagtctcagcttcgcctcactgagcaaatctgagatgaggtcatttcgggctctcaggactttcagcctcgcctgattcctcatggtggacatcaggattttcttctgctgctctatctgcttctcctttttctcataatactccataatcttcagtcgttgggtttgcacgaggcgtcctttctcaatgttaaactcttcctcagccttggcatcgatttcctctgctttctcattggcttcctgctcaatgaaagccatcatgtgcttaatctgctttttcacatcgacatcactcagggccatggctgctctcagaggggacggcagagagggagctcgtacaccgtttggctcctttgacttaggacaatttcaggagtgtctctggagtt

SEQ ID NO: 474676 - DNA, 1000 bp, Homo Sapiens
atataacgtctcagttttatttttaaataattctcaacattacggaattttgccttcaataactagtgatttatgtcagggcaagccacttccctccaaaagaaataattttttttttcttcaaataattggattaggtctactgccactaattaaaacagtgaatatattgtctcccagaagtatcttacattcctagacaaacaacaactaggtttgattggcatggtaaaattagcttaatggagttagaagataagaaggacttttagaggaaagagcaaactattctgcatgtgtaaaataattttgttttatagttacaaatttcaaaaagatattacccaaagttttataacagtcacagagatttattttgatttttgaatttattcacaaagatctctttcatgttatatcatgggatgaagtaaacttttttaaaaaaacaaagtaattgacttctaaacaaatatggttataacacacatacatctaaccaatttccttcttataatacttggatgaagaaggttatatcatcttcaatttactgaaattatttacttagtactcttattaataccattaggcattagattcaacaataaagataaaaagttagaattaaaatttaaaatattgtcctacaatttaaacatttttccacatttgtaaaactggattataataataaaagcagtaccactctaaatatgtaaaaatcacaacagaagacaaattgaccacagaataagtatttttaaaatttcgaatgtgtgtgatccatagaagaatatattaaaattaaaaggaaaaaatgcagccattcaatgaacatcttcactcaattaaactatttttggacatatatcatgcgcaggtattcatctagctcctggaaaactgaacaaaagaggcaaaaatccctgcccttatgtagcttacaatccagtataagaagtaaacaacaagttgaaagatataatggaaagagatc

SEQ ID NO: 474677 - DNA, 1000 bp, Homo Sapiens; identical to SEQ ID NO: 343460

SEQ ID NO: 474678 - DNA, 1000 bp, Homo Sapiens; identical to SEQ ID NO: 343461

SEQ ID NO: 474679 - DNA, 1000 bp, Homo Sapiens; identical to SEQ ID NO: 343462

SEQ ID NO: 474680 - DNA, 1000 bp, Homo Sapiens; identical to SEQ ID NO: 343463

SEQ ID NO: 474681 - DNA, 1000 bp, Homo Sapiens; identical to SEQ ID NO: 343464

SEQ ID NO: 474682 - DNA, 1000 bp, Homo Sapiens; identical to SEQ ID NO: 343465

SEQ ID NO: 474683 - DNA, 1000 bp, Homo Sapiens; identical to SEQ ID NO: 343466

SEQ ID NO: 474684 - DNA, 1000 bp, Homo Sapiens; identical to SEQ ID NO: 343467

SEQ ID NO: 474685 - DNA, 1000 bp, Homo Sapiens; identical to SEQ ID NO: 343468

SEQ ID NO: 474686 - DNA, 1000 bp, Homo Sapiens; identical to SEQ ID NO: 343469

SEQ ID NO: 474687 - DNA, 1000 bp, Homo Sapiens; identical to SEQ ID NO: 160621

SEQ ID NO: 474688 - DNA, 1000 bp, Homo Sapiens; identical to SEQ ID NO: 160622

SEQ ID NO: 474689 - DNA, 1000 bp, Homo Sapiens
ttaatttcctgcaataagtagtcatttaattaaagaacaaaattaacaggaatcaaaatgttgcagctgtattttttgttagacattatataaaaaaggaaaagtataatacagtaaatcatcttgtataacatgaacttaaagagttttcaaattaattatgatcaggataaaaatgtcttttgaacataatactgaatgacactgtcacatgtccctcatgtcagaggcctgggagtggtgagcctgcacatgcacgttgcccgtcctccattacactgcagaactgtaaaacaaggttgaaaggcaaacaacagttttcttctgatagagttatgttgggtcttaactgaccccaacagttcacactcctcagacaccaaagaaggaaggaagtgtgtcctctggttactcctcttgcaggtaagtgtggtcaagattgcacctgtgtgtgtgatcctactcttctcacaaacacagcaggtagggtagtcttgagctgaacttcaggaaagttccctgatgaatgttcagtgttggtatcaaaaaattaaacacaaattcttctcagaagaaaatctctatggcctgtggaatcttgtcaagtgcttgcttgatgcatgtacctccatttcattacttttgtactcatttaattctttacgaattgctgccttatctgctgctgacagtctcgtccagggtttgtctgccctcctgtcatagtcctgcgcttttgctacttccacgtaatcactgaatcgtatcagaatttttctgtctcttaattcatcaacagtgggtctctgattaagctttcttgtcaatctttgcttgatttctcttctttcttcctgctctgtctgatcattcctttgtttcaagatatttcttctctccagctcttccacggcaggtctttggctcagccgtttggaaagcttcatctcgatctgctgccggatctcctgtctttcttcatcagtccttctggggaaaa

SEQ ID NO: 474690 - DNA, 1000 bp, Homo Sapiens; identical to SEQ ID NO: 343476

SEQ ID NO: 474691 - DNA, 1000 bp, Homo Sapiens
catgttttaaggtgtgtttttatttacaaagtgagataatgattacaaacagatgatgcagtaacaaacagataactgataactccattttcatgaaaaagtatataaatatattacaggaaattctatatagtaaacattagaaattgatacagtaaacatttgctacttttttctatgccaatattactgtcatttaaagcttaaatactggtttcaagtatcccctataaaataactactttattaaaatattggaaaacatttttgctataaacaagattggtgcattaaaaatagactcaccatgtccttgtaacaatgtctgctatcatcaaatgctgcctttaatcatccctaagatctgcattgtttggttagtgttaaaattttgtaaataattatcataggttaaagtagctgtaaaaatacagcatttcaatattttttattttcaagaagaatacccctctaagatagaggagaacatgcatgttgtatgaacttgctgctctgtgatcttattttggatagagagcaggagtctgctggaggttaaggagagaaatggaaatgcatccagaggctcttttcatgtcacttcagaagctgaggctgctgtttttgctcttcttctgcttgaagacgtgtcaggacataaaggatgacttgatagcagaaaatatattgatcctctgtctgaaccattccgtgtctttgtagtctcatgcagcgcaccaaatcagagatgtcaaaatcaagatcctgactgattaatcccagaaccacatctatgcaaatcagggtccctgaacgtccaatgccagcactgcagtgcgtaatgattgggcctgatctgtggatgtgtctcatgtaggagataaaagtaagcagatcatctggttgagaaggtgtatcatggtctggccaggcagtgaaattcagatgagaaatatggcgcacctctctggtctgaatatcttcaagggtcattgccctc

SEQ ID NO: 474692 - DNA, 1000 bp, Homo Sapiens; identical to SEQ ID NO: 343478

SEQ ID NO: 474693 - DNA, 1000 bp, Homo Sapiens
ggggcagtacacagagtgtaaacgtgccagtgggatggcagggcacagctcatgtcaccggggaggcagcagggaggctggtgccgggatgtctcaggtcttctccaggttgccctttgtcctcagggactggcgtaggtgtctgagtccagccccaaggcagccccccgggggtggtaggggagatgctccaggatgctccagggattggtgtctcaggggcaaagggatgctgggtccctggggagcttgtatccagagctcctgggagctgtgtggctcggccatgctgatggtcctctgatcccgttggctttccaggaggctctgcagcatctgcagggtcctggggtcctggtaaggggcttccaggagtggagaaggggggcagtgaggttgggccagggtctgggccagggttggggcccgaggccttcttgatgcaggacacacagcagagccggtggtagccgggaatggagcagtagcgatcgagcacttccatctggcagaagacagacctgtctcccgtgcagggctccgttgatgatatcttgttaatgggatgtaggggttcagattgtggcacccactgcccctctggcgtcccaagttcccagacatcggccctcaccgtggagttctggtgatttcctccacaggcgggcaggctgcagacctggacagtgtctggcctatccccctcgcaatgcccgaggctgttggcgttggtcctgcacaccacctgccgctgctggatgccctctccacaggtggcagagcactgggaccaggctcccagcctccactgggctgggcagggcactcggagacagggccgtcgggcctcaggccggtccccggcgcaggctttggccggcatgaccttgtgggttccattggagaggggcagcaggcactgtatcccccgtgtctgcacccccagcttcccacagctccggctgcaggcaccccactcctccgtcacccacacaggctg

SEQ ID NO: 474694 - DNA, 1000 bp, Homo Sapiens; identical to SEQ ID NO: 343480

SEQ ID NO: 474695 - DNA, 1000 bp, Homo Sapiens; identical to SEQ ID NO: 160623

SEQ ID NO: 474696 - DNA, 1000 bp, Homo Sapiens; identical to SEQ ID NO: 343483

SEQ ID NO: 474697 - DNA, 1000 bp, Homo Sapiens
tttttttttttttttttttttttttttttttttttgtgtgattccatttatttaaagttcataaacaagaaaaacctctgaggtcagaataagggatgccttgttgggagcatttgactgggaaagggctcaaagactttggagctacttcttgacaatagggagctgatgagatgtcactgtgaaaaacaacctgacagttgatgacattgcttgctagcatctacagccacaatgcacatatggcctagcctcacttctgcctttcggaactcctggaagtcagtcgaacatattttcagctagaatccttgctgcaagggagtctggaatctctagtgttcatagccgtcttctttttagtttttacaggagaagactgagggtcagtgttgctaacaataacggaagccataccacttgatcctggctgaactgaagtttgaataataacttttgtttcacgagggaacccttgcagttgctccggctttttaaatgtttgatggtccttggttttgtgctctatttcctccttcaacgtcaaaaactgtagccggcacttggaacactgaaggaccctccttctgctgtgcctccaacaatgattcatgtatggtattgcagttttgaaaagtttgagacaaaacagacaaagcaaattctttgtgttttcatggcacgttctaaaatgtgtttccacatcagcaaagaccgacgatctgtaatggcaaacctggcacacgtagggcatttcgccaggcttatgatggtccttcatgtgttgtaagaggacctgatctgtttcaaatgacaattcacagattttacagacagcagagggccccatggcgatgtgtacactatcaatgtgacactgtagctggaagggagtgggaaactgccggtggcagtgctggcaggtggtgtggtcttcccagctgtcgttcctctgcttctcaaattccaaatgatgcttcatgtgattcataaacttaat

SEQ ID NO: 474698 - DNA, 1000 bp, Homo Sapiens
ttttttttttttttttcccttgtttaattttattaaaaacaactttaatatgaataaaaagttacaaataagattcttcataaagagcagcaacagccaaagatcatcctcattccctttgtccctgaaaacaggcccttttaccagaccgattttgtctcaccctaacctgaggcagggattcatctttgcagagcaaataagatctgatctcaggggctgggggaggaagagggtgaccttgcagcacggagataactttggccttgaacaacaactgaggctcccaaggaatgccaaaagtagggctgaaaaggggcagattgaaaggactgtcacacagtggagttcccttcctctctactgtaacaatattcctagccccacctaggaagacattggctaaaatgctaaaccctagtatgtcctgcccactttaaactctcacacttccaaggagaagtgtttgtggtccaatgcttcagctaaagtgcttcaataatgcatcacagctgtagcaggagggaatccctccccttcttcttgctttccccagaggaaagggaggcggcccacgtccttaaagtctcctggctgctgaaagagctcagatggctgggaggggccagcccagatatccacaatcttgcgcagggtggagtagcgttcctccagctctggcccctcggtctgcatgagcaggtttgctaactccctgcttaggtcctgaatcatgtcgttccgtccttgcttctcaggctggcctgtgtttgggaccataccacgatcctggagctccccattgggcccaaggaggtactggtacttcttctgccaccggcggcacaccatggcttcaccaaccggctgctggctggtgtgcagcagagccaaaatgtgtcggcatggcaggtggtaccattgttgaaaggaacagctgcagctacagccatctttgctaacctggtgagagtcctctagcagctgaacgtccactgaa

SEQ ID NO: 474699 - DNA, 1000 bp, Homo Sapiens; identical to SEQ ID NO: 343490

SEQ ID NO: 474700 - DNA, 1000 bp, Homo Sapiens; identical to SEQ ID NO: 343491

SEQ ID NO: 474701 - DNA, 1000 bp, Homo Sapiens; identical to SEQ ID NO: 343492

SEQ ID NO: 474702 - DNA, 1000 bp, Homo Sapiens
tttttttttattacccagaaatctttattacaaaaatattttgcaagccaaaaagtttaagttgcaactatatacaaaatggggcctgtttccttcccagcagtcttaaaataaactcctgaaaccatgctccttccgcagggttggttcgacctcttccttttcctggggttcaatacacaaggtatgtggattctccaggttgccaggctaaagctaaagctatacatcttccttggccttattcccttatttccccctccaagaattaaaaaataaaataaaatgaaaatggcaccaagaaaacattcttttaaaatactgaatgtgtgtgtgcatgcgtgtgcacacgtatgtgctgtctctgggtaaaagagagggagacgaaggtttacaagccaatcttttggaatttggaactagcctgagccaggtggctgggtcactgtggctcccagatgccacacgggagctctggccaaagctgtccacatggtctgttggctcagctaattcctggatgccatcattgaaatcaccaggtgaccatcccccagagagctgggtctatgctgagctcctgcagtttcacctgtaggacctccaggaatgggcaggatggctcagctacttttacagcctgagccagaaatcccttgggcatcccaaggccaggagtcatgaacattagcgtctcaactctaagagttatagtgaagactgaataaatagggcttgcgacatctgcttgccctgggcccggtcaggccctcacacccgactggaagggtgggggttaaagggtaactgggtcacaccctctggccaaccttctgggacagagggggaatcagcccgagcttcacagctgcaccatccccctggctgtcttcaatttattccagtttgatcccagtagggtttgagagcagaaatggaagatttcttcttcaaggatcagctcagaaagccgggatgggggcggtcactaaaggggtag

SEQ ID NO: 474703 - DNA, 1000 bp, Homo Sapiens; identical to SEQ ID NO: 343494

SEQ ID NO: 474704 - DNA, 1000 bp, Homo Sapiens; identical to SEQ ID NO: 343495

SEQ ID NO: 474705 - DNA, 1000 bp, Homo Sapiens
gaattgccatgtttcatttcctttaataatgaaaatccataagggtttaaaatactcttagacacacctagcttagcaaatatcatggacctctacatttatgtgaattcacacatgagctagccagcacctcagttctggctggccccctttggcaccaggacacaataatttattaagcttcgatacttaataaatgtgcacaaatatcatgcagacattacgaccaaacaaaaaatgtattagagacataggcttatacaaaacatcttgtaaacaaaagggaagaggttgatattttctgtacaaaatatgcaggtttttctttcttttttaataatctgtaagatgcatcatacttctggcattttcaaaaagtgaaaactgtataaaaataaatattctatgtacaaacacacacacaggccaatccaaggttagaggcatcacttgttccagcagccttggactggtaagccatcttcgcccaatgggcagggggcatctaatccaggcgctccttggtctcccttatcccctttaggccctctagagcctttcttccccctctccccccggtttcccttgtccccgggtggtccatgtaaaccaggaagcccagctgctcccgttggtcctgtcatcccagggtctcctttgctgcccctctcgccctttggtcccgctgggcctggaactccaattggtcctggagtacccggtggcccaggcctgccgtccaaacctgaagctccgggtagtcccaggggaccacggtctcctttttctccctggaagcctttctctccttttgctccatctagtcctgcttccccctttggtccaggaacaccttggagccccggaggtccgggaggcccctctggccctggcagcccaggaacctctgctcctggattgcccttctccccggcttctcctttctctcccggtgagcctgcttgtcctgtctcccctttttcccccttctctcctgggc

SEQ ID NO: 474706 - DNA, 1000 bp, Homo Sapiens
ttttttttttttttttggagaaacaggtgtccatctgggctgcacaacagaccctgagcaagagtgaccacctcacccacatgaacagcagtcacttatagcacgcccacgagtaccatatgccacacagggcacttccctacccactgtctcgaagcatcgccatgaccccagaacaagggtgaggaagctaaggttcagagaggaaaagccactgtcccggggccacccagcagccaggcagcccagccccgagctctcctccgccactactgctgtccacacccacatccggccctctcctcctcctcctcctgtacttcagccttagctcaaagtcaagccactggtgtctgggggtccccagtggcatctctgtggcagggccagtgccctttccacagggcttcttagaaggtgggggcgatgagccctgccaggccctcagtgtgtctgctgcaggcaggaatcattctctgtgtccacagagccgttgtgggtggacgctgggcgcggggttctcttcagcagctggtgcaccatgccggccacatccagagagctgtcatgggtggatgctgggcgcggggttctcttcagcagccggtgcaccatgccggccaggacttggcggaacggccggcggagcagagagtacgtgaacgggtcggccaccgccttgctgtaggtcaggcacttgctgaggatgccccactgggcgttcacggtgacgaagggcacgagctccgccagcctggtcatgacatacggggcaaagcagatgaggaaggtcgcaatagcaatgccaatcttcctggtggcgcggtggcggcgccgcttctgctggatgaggcagcgctgccgcacactggggtgcaggtcggcgagcagcgcgagcgccttcatggtgacggtgtccatgcgctggcagtgtctgcgtgccacccggtgcacctggagcgaggtgaggcagagcaccgccagcggcagcacgaagccc

SEQ ID NO: 474707 - DNA, 1000 bp, Homo Sapiens; identical to SEQ ID NO: 160626

SEQ ID NO: 474708 - DNA, 1000 bp, Homo Sapiens
acaggtaagacaatcaggccaggattttattcagtaccagactgatcttacaatttcctcctgccctttacccacccagaaataggatttgtatggactcagctaggctgagcttgtgtgaatagtgagcttgtccacacgctagctgatggatgacttcgatttctgctcctgcactagacgtgggcagtatttccttggagcccttggtctgattatcctccttccagtgatagaaacactttccttgctattctgatccaaatccaaagagggtgaccgtgtctttgctatcttccactccactagggaaccagaccatcttccaaaatcttatcacttagagcatctgaagtccacaccaggtcagagagcttccgcagtagcatctccagctgcatccaggagccctggtcgctggcattcctgaaaaccacggggtattggtcgatgtcgttgccaaggctggagccctgcgggatctgtgggcgccccaacagcacacaagtcccacaatagaaatcaaaatggctcaccgagagcctgggaatccctttaaacagcttcctccacaatttcccaagctcgctccctgagttcatgccctggaaacagcaagagggagattgggggctgggcccaggggagagaaaacagagctgggtgggtgagatctccatccagaggctgtgaagacagggccaagggcagggatttgggcggaaagtgggagatgggtgaggcccggaaagcatgggggatatggccgggcccagtgttgaccactgaccaaccaccagagcacagtgtcagaggtcatagactctcttgtcctcatcaggtaccccatagtcttcctggagcacgcatcaagccagttccattcgtcggctgtgtggtggcaggaggagcagttgagggtctcagaagggcagccacacttcccggaactgaaccaagggcagtcgcaatgcctcaaaacggtctctgactgggcatg

SEQ ID NO: 474709 - DNA, 1000 bp, Homo Sapiens; identical to SEQ ID NO: 343497

SEQ ID NO: 474710 - DNA, 1000 bp, Homo Sapiens; identical to SEQ ID NO: 343498

SEQ ID NO: 474711 - DNA, 1000 bp, Homo Sapiens; identical to SEQ ID NO: 343500

SEQ ID NO: 474712 - DNA, 872 bp, Homo Sapiens
tttgacagggcagggaggccacctggagcctggcacagtggcctcatttattgtgctgctctgctgctcacaggggaagccagtcccccagagtccccttcctggtcctggtgagtatcttgtccctggattgcttgtcagccttgtcctcctggagcactcagtagccggcaggctccccgcctttcctggagtccgaggcagctgcccagccaccagccgtgcggacgatggcttgcaccacagcgatgaaggtggacgcgatctgggtgtgatggtgccgggtctccagggctgcagtcactgcctggtcaatgtttctctccactgtcgtgacgttgggcagaagctggttgtgcagccggggctcctccacggcccgcttcacgtcatagccgaaccagaggttgtagatgatggccagtgcagtggctgtggtgatctgtgtgcccccagcagctcccaccaccatccggacctggccgtcctggcccaccatgatcgtcgggcacattgacgagagcggctgcttccctggctggatgaaattggcaggtgaggggggcaccccaaactcgttggtgatgttgggagagctgaagtcatccatttcatcattgaacaggatctcgctgaccggggagcggaccttggagccaaagtagaggttgatggtgctggtggcggacacagcactgccgtcctctgcgacgacagacaggtgagcagtgcccccatcaaccggcgtgtagaactcgggcttgtagtaggagatcgggtgagtggtgtcgtcagagatctgggcccggagctgggcagcgaagaactcagaggtcatgttgtggaccacctgccgagaccccagagctggc

SEQ ID NO: 474713 - DNA, 1000 bp, Homo Sapiens; identical to SEQ ID NO: 337127

SEQ ID NO: 474714 - DNA, 951 bp, Homo Sapiens
tcaggagtcactagctgagatccttcgcccaatgagaagggctcggagtgccccctgtacatcgcgattccagaggctgtagatgatggggttcagcatgggggtgactacagtgtacatgacagtggccacacggccccactctgcctcgcgtcgggatgtggcctggaagtagactgcaatgactgtcccatagaagaggctcaccacagccaggtgggagccacaggtggacacagcccggagcctcccagaggctgagggcagctggagcacggcagctgcgatggccccataggaggcgaggatgagcaggaagggagtgaccaccactgcggcgccctcggtgaagatgagcagctggatgtggtgggtgtcagagcacgagagccttaagagaggctggtggtcacagaagaagtggggcacttggtgggaagcacagaaggacaagcgagccatgagcaggatatacaggagggagtggacgtgggacaccagccatgccattcccaccagggctgcgcacatggcccgggacatcctcgtggcataggggagggggtgccggatggccacgtagcagtcataggccatggccgccagaagacagctatcagttacccccagggcaaagaagaagtacatttgggtcaggcagccagccagcgagatggagtggtcatgggccaacaagttggccaacatcttgggcacagtgacggaggcgaagcagaggtcagcaaaggacaggtgggccagcaggaagtacatgggtgcatgaagggctggactggcctggatggcagccacaatgagtccattacccaggaggctggccacatacaagagcaagaacagcacaaagagaggccgctgctgtccaggacttgttgtcagtcccaataaaacgaatgagattccctctgaagactcattggcagcctccat

SEQ ID NO: 474715 - DNA, 1000 bp, Homo Sapiens; identical to SEQ ID NO: 343501

SEQ ID NO: 474716 - DNA, 1000 bp, Homo Sapiens
gcacgcagagacagagtttgtccctctttaggaggctgaacaggtataagggtggcaggagagggaggtggtgggccactagaatcactggttcttggcatgggacctggatggatagaggggccatccacttaaacacaggaggagaagggaggtgaaggccgagtctgggaacaggccgagtctgcagcccttcctgctggagagagggtctgaagctcaggtccggctagaggtcagcaggtgtctcaagaagcccatggaggagtgaggtggaccaggacagcacgtggagtacagaaaagaggggcaggcaaccaggcgcagtggctcatgcctgtaatcccaacactttgggaggccaaggcgggtggatcacctgaggtcagtgtgagaccagcctggccaacatggtgagaccctgtctctactaaaaatacaaaatcagccaggtgtggtgactcatgcctgtagtcccagctactcggaagtttggggcacaagaatcgcttgaacctaggtggtagaagttgcagtgagccgagatagcgccactgcactccagcctgggcaacagagtgagactaggtctcaaaaagaaaagaaaagagggccaggaactggtcctccgcagttggaggcggggacaggtgggaggggcagaacacaccatgggacagcctgacatggggttcactggatgcacccctccacacgcagcagcaggtagtccctgaggagcgggggcagtggcagccgggtggcaccctgccggcagcggcttcccaaccgagcgcgcacagctagtcgggccaggtgctgcagctgccttggctggttcaccatgcacagggccgagctgtagaaggcttcgtgctccttccacagctctgggagcaccgcctccacccaggtctcacaggatgggacacaaggataggcattaagcaggacttccagggcccgagggaagttggcgcagtgtttcagcatctcaggg

SEQ ID NO: 474717 - DNA, 1000 bp, Homo Sapiens
ttttttttttttttttacagttttttcaatccctgtttttgaataaatattctcagcgaccaggaagttgtgaaatactggtgttgtgggcagcaaaacctccagaaaatgggtgcagctgaggtcctggaggacccccatgtgtgaatccaccaacctcaattaggcctcagccccttccacatgccagttctggggcttcaggaccctttgggggtgaagtcgtccagcctcctacttctaataccaaactggtccagttgtcttctgggcattttagaagcaggtggaggagtttcagtagctttgtccagactctccttggtgcagatgtcagggaagtccttctgagtgtctctccagtggttcttcctgctgtggctgtaacccagatactgccctgcttggcggatcactttggttgtgagcccttagggccctcttctttgtgacacctgcccatcttggcctggggaccacctgtgagtttcacaaaccacctatgctggaggggcccttagagatgctgcagggtgcagatgggaaagctgaggcctaaggaagggtcggcctatgcacagtgctatgcagtgttgggcccagaccgcaggattcctggctctcagaagtccgtgggcctcaccaggcagcagacaccctttctcctcctgttccagacccagatatccagcagggcacctgctgtgacctgtgcaggggttggatgagcccccacggaaaccaccctcctttctcctgctcaggagagagaactctcaggtggcccctggtatgcggggctccgccctcctgccaactcgggggtctgttctggagcctcagaagggcctacggcagggccctctgggggtctctggaggcattgcaagagtgcccgcgggtgccaggcttgcggagtgcaggcccgcacaggtccaggcagtgcacggcgagagaggcggcccagtgccaagcgcacggggcgctgcagcagcccgta

SEQ ID NO: 474718 - DNA, 1000 bp, Homo Sapiens
aagattagtaacattttcacttttgtgacattggacaaaatacatttttgcttgtagttcaggaaaattctatgcagacaaaacagtggaaactacggaaacggtggtcattcagcttttggctaaagcatcgattttcaaatacagcactatggcaactaacaccaaaggcgaataaaattgtgtcattctctgtaggccaacattttgctctcccatttgctgtggccatcacctctaatccagtcaatgagagttactgaggattcaaactctgcaatgtttcatgaggaaacaatgacaatgggccacagacagtgggccggagaggaagatttctcagctccttcacgattcctgtgacctttacagagctggaacagagacctctgcgagaactttgccttcaatacatctgatagctatatcactcaacacatttacagagggcagagggactaagaaattgaagagaaaatggctaaaaggaaaaacaaaagcatatcaagagattttataacattttgaaattcacaggtaaatttgccagaagtttggcagtagaagatattatctaaaaccaattatcctattttaatcatctacatttgtttatcaatcctgatgctgagaatgtttctcaaggaaaatagttgcaataaatccagaacttttaatccaaagagaaccctgttttagtgatttgacttaacatcccctcccaaagacaactgaaagaaaaatacagagaccttggcaaaagacaccacctgcagttggagataaaaataataataaaaaagttcttctctttaaagagaactgtgtcaattctttttcatctcttacaaaaaggccaataaaatttttgtgggagtacatctgagttttatgagacttcctgcactggtaaatgaagtttgcatttaaatccatagagcaagcttccttttggcttaaaggattttaatgtaaaccagtaagaatgtagaagcaatgt

SEQ ID NO: 474719 - DNA, 972 bp, Homo Sapiens
ctattggtataggaggaatcgttcgagtggctctggcagatgtagcttgtggatggcttgatgacatgctcgaccgagacacttccggacacacaggcggcagagctgggaaagagcaggtgggccttcacggagcaagagtgcctgctccacgctgctttttggagccgccagatcaagcgcacttttgccctgagcatttctacgcttcaggttagctccatagtcggttagcaggtggatgacctccacattggactgcctcgctgcagcatggagtggggtgtccagccactggccatggtcgacactggctcctaattctagaagtttcttcacacagtctaccctctggtaggtgcaggccacatataggggagttccgagctgaggcacctcatggtcaatgttaacattatttgccagcaggatctccatgcactctctgtgacctctcttcactgcctcatggatgggcgaggccaggtgcacctccaactgggccttggctccgaactccagcagcacattgacacatgcagcactgccgctgcagcaagcattgaagaggggtgtggctccgtgaactgtcactccattgacgtgtgcaccattttccaataaggctttggcacaggccacgtgacctccaaggcatgcctcgtggagagaagacacccggttaattgtcacaaggttcacattgacaccttgtgcaattaaagttttaagggccagtaagcgcccctgagctgcagcttcatgaagtggggatcgatcagcccagcaatctgaaattccaccatagatctcttctgctatcctagccgcttcttttctatttcctttgacgatatagaaatgggttaggagagccaaaaaaactttaattaaaagcttaaagaaaaaaaacgtagcaaacattgtaataaaaatgtttttaaagccatagaaaacaggaccatcttccat

SEQ ID NO: 474720 - DNA, 1000 bp, Homo Sapiens; identical to SEQ ID NO: 343503

SEQ ID NO: 474721 - DNA, 1000 bp, Homo Sapiens; identical to SEQ ID NO: 160627

SEQ ID NO: 474722 - DNA, 1000 bp, Homo Sapiens; identical to SEQ ID NO: 160628

SEQ ID NO: 474723 - DNA, 1000 bp, Homo Sapiens; identical to SEQ ID NO: 343507

SEQ ID NO: 474724 - DNA, 702 bp, Homo Sapiens
ttatgtggcagctatccgaaaatcaggcattatgccactgacagactgtattgccaagaaaccagttccctgtggagtgataggatcccaaaaggctgctccgcgatgcacatgctgtggggtatactttagaagcctttgtcttccattgtggtcttcgatataacagagcgggatggtctgaaacctcctccaccctacagaaaatatgattggatctcgggacttgaggattttcttataccagcgatgtttcttcagacgcatctgcacgtatccaacatttccctcgctgttgcccaagccacccaggataatggggtaacgggggtcaaagttctacacaaattcacagggaacattttcaatctcaacgcagacgtacatcccaggtcgaaaaccctcatactgaactctggcttcatcatcttgatcttcaaattctgcatgattcagctgtgcttgtttctgcatttctcctttaagatcatcaaaatatgtgctttctccttcatcatattccacatcaaacatctccttcaattttctcttcttatccaaatgctttttcttggcactttcttcttcgtcagggtcaatttcttccttgtttctctacatcttcattctgagtatcggggcccgattttcccttgtgcacgtcccctgtttccaagtcttcaaagtcaccgtagagctcct

SEQ ID NO: 474725 - DNA, 1000 bp, Homo Sapiens; identical to SEQ ID NO: 160630

SEQ ID NO: 474726 - DNA, 1000 bp, Homo Sapiens; identical to SEQ ID NO: 343512

SEQ ID NO: 474727 - DNA, 1000 bp, Homo Sapiens
ttttttttttttttttttttttttttttgttttaacatgtttattacaacagatacaattcacatctgactagctctgtttcctctttcccctcccacaaccacgttcattgggccatttccttatatttgagcaatcaatgtactttgagcacacatgcctgtccagcagtacttttaagtccattcttacagggtgcaaatggatttcaataatttatacaaacaagtaggttatgctcaatcactgcaattttaagctactgtacacaggaatgaaaaggttatagaaaagtgccatagcaacagtgccttaagaaaggagataaagaggagccttaaaaaaatggataaaatcagaatttcagaaggaaatggaaacacacgggaaatgaaaaacatttctctgcaaaacaaatggagaagcactgctcttgatcaggtgcaagtgtggaaacagttgtttcatattttgtacactgcccatatggttcaaaatcgtatccttagacacaaatcgcctggcgcttgcactgaatttttgaaaatgcaagatttctgaatgataaattaacccccccaatttttttttttttttttttaaaaaagctaattttgcagacaggtttacatgtaaaaggctaggtatttagccacctcagcattgattagttttggatgtctaagctctgttacacatggcttcccatggcttcactctacaaaacatatttacaacgtgaaggatacatctacaagaaatctacatttcaagggttttacaaatcaatcttgtatctttcccctgaattgactctcacagaccccgtccccttgtcatttcctttgcccagcttaacggtccaaagtctacttaaatgcagctcaaaaatgttaagattgggcaacagatttacagttcctgttctcaaaaccatgtgcaattattcacatcttcacaccatgaaggaattctgattttttagcttttcaagttcctt

SEQ ID NO: 474728 - DNA, 1000 bp, Homo Sapiens; identical to SEQ ID NO: 160631

SEQ ID NO: 474729 - DNA, 1000 bp, Homo Sapiens; identical to SEQ ID NO: 343514

SEQ ID NO: 474730 - DNA, 1000 bp, Homo Sapiens
ttttttttttttttctgagaagcctttcctacttctgtaaaaagaaactctcattccaaaggaaagaatgggaggctgaagttattgaaaatgagatgggaaatgggaagatagtcactttgcaactccaaattccaggtctgatgcttagggtgttagtcattaagcaaattcttcctgataaccaattacagagaggaaaaaagagagtaagttttttactgccccctacctcctcctcccccgtgccccgctccttacccccaaccaccagtgaaggtgttttagttctccccagccacctgagctaggggcaggagaccttcccttccaatagagttccttggtgaaggtgacttcttcatccactggatgctttcccagggcagttttgttgatcctccaagaacatcaagtcactgtgtatgaatagctcccacagaagtgccgagtgttaaaagaacccttcctcatgacctgatgggatgggcggcagtgtgtccacacttgggcctgacgttatacttggggaaagggtggtagtctgagtgtctcagagcagggcactggctaggtgtgaggtttcctactgctctgtaggctgctcatgctggagtcctgagctccaccaggagtccctctgggctgccgagcaagtggatcttccaaggggcccatcagcctgctctgcacaagagttataggaattgtagagccccagcacaacagtcaagaccagcatcactgcagccatcatccagatcacttgccagtgctgacacagtttgggatacatgacttgtaagaaatggaccaattcttcaagtttgctgcttcttgggcccttttcctcttcctcagtttcttctacctcttcaggttcctcaggactctcactcttctgttcttcctcctcctccttcaggtcttgaagttctttggtcttctttagaccttcttggaatcccttgctgtaggcttcttcctccatcctggcctt

SEQ ID NO: 474731 - DNA, 1000 bp, Homo Sapiens; identical to SEQ ID NO: 342628

SEQ ID NO: 474732 - DNA, 1000 bp, Homo Sapiens
tttttttttttttttttttaagttatttcatatttaattcattagttttattcatctgttctttaggatcgtagggcatcagaaaaacaaaaagaaatagagagagtaaaagagaagcaacagaaagaactcaataaacaaaaacagattgaaaaggtatacagtcctaatgtctggatctttatgtgttgtttgtgaagacttaattcagcactatgactttcagatttgaatttccaaatgaagggctgtttctgcttgttcagccacttcataaacagatgattcataccatagcagaaaagggtcacatctgttttttgatatgatgtttacattatagttacgttgacatgtaatatgactgtttcaaaaatataccagaactttaatatttcagaggaggttgtctctgtcaaagcagttgagaggctgtgtagacttaactgccattgttgaaagccattttgccttctatgggggggaaataaataaatatatatgttatatgaaatatataatgaaatgtatatttttaatattgccaggagtgtcaaatcattgtccatccaacagaataattttaaaagacaaatttcagagcaaaacttgaagaatgcattaaatgatccatgaaattgtaagagcgtgttatgggttgtagattgacagtaggaatagaaaagaggagacagctgggatgcttagaacagatcaataagcattggctgtgggctggctctctggacaaagaagagggaagtggcaaagatgacattgaagtgaggctttcttgataggcgaggctgagggaaggtgacacctgatttagcaaagatgaattggacagggatggagaaaagggctggagaggggaagggaaaggagtgtgggggtgatccctttcgagggttttactataatatatagtgagagatgattgatgatgggctttatttggttgttggtcataaaaaaagaaagataaaatattagattt

SEQ ID NO: 474733 - DNA, 1000 bp, Homo Sapiens; identical to SEQ ID NO: 343516

SEQ ID NO: 474734 - DNA, 1000 bp, Homo Sapiens; identical to SEQ ID NO: 343517

SEQ ID NO: 474735 - DNA, 1000 bp, Homo Sapiens; identical to SEQ ID NO: 343517

SEQ ID NO: 474736 - DNA, 1000 bp, Homo Sapiens; identical to SEQ ID NO: 343517

SEQ ID NO: 474737 - DNA, 1000 bp, Homo Sapiens; identical to SEQ ID NO: 338567

SEQ ID NO: 474738 - DNA, 1000 bp, Homo Sapiens; identical to SEQ ID NO: 160631

SEQ ID NO: 474739 - DNA, 1000 bp, Homo Sapiens; identical to SEQ ID NO: 338545

SEQ ID NO: 474740 - DNA, 1000 bp, Homo Sapiens; identical to SEQ ID NO: 160632

SEQ ID NO: 474741 - DNA, 1000 bp, Homo Sapiens; identical to SEQ ID NO: 339824

SEQ ID NO: 474742 - DNA, 1000 bp, Homo Sapiens; identical to SEQ ID NO: 343519

SEQ ID NO: 474743 - DNA, 1000 bp, Homo Sapiens; identical to SEQ ID NO: 343522

SEQ ID NO: 474744 - DNA, 1000 bp, Homo Sapiens; identical to SEQ ID NO: 343523

SEQ ID NO: 474745 - DNA, 1000 bp, Homo Sapiens; identical to SEQ ID NO: 343524

SEQ ID NO: 474746 - DNA, 1000 bp, Homo Sapiens
ttattgttagacgaatttattttaaaactctgcatacacatcatttaaaatgagttaaaaacttaaaaagtgaactctgagctttggcaaagttgcaaaggtgatgcagcaaagttttctgtgtcattaaaactatgcctgaaactacaggattccttccgttggaatgaagttttcccttcagctccaagaattcagcctcccttaaccaagttgccttcagttttaggacctgcgctgtcagtcaggcccgacctccgcaacggcctccgaccaccgcctgtggagcagcacccagaacaggagcgcgccccccagcagcagggccaggcccagcctccagctcctgggggacttcagccacttccacagccgggccgacagccaggcgccccatggcctcctctgcaccctggctgccacgcgctccgccacccgccggagccgctcctcagggcctgcccagcgcagcacctgcgccagctcatacacctcgttggagtaatgggcgcccttgtgctccagcaccaagccctcgaccatccccagcagctgctccacctgggcttcctgctcccggccggtggcccggttatcaaaggcacagacccggcccccgcactcggccaccagctcgcgcaaggcccggttctctgtgttgctcacgtaatcgtgcagggagcccccggccaggtcctccttcctggtgaagacgatgaccatccattttaggacgtcctccccgaacatgtccctcacctgcctcaccgcctgctggtcctgggcggtgaaccgacccaactgggtcaccaggagcagcgcgtggggtccgggggccgagagcaggtagcagtgacctctctcctcacagccaggatctgtcttggacacttgggagctgaaaatgtccggagtgtccacgacttccacgtggcacttgtcccacctgcggctgcccgtggtgcaggccctggtcacagacgtggcccccagcctggag

SEQ ID NO: 474747 - DNA, 1000 bp, Homo Sapiens; identical to SEQ ID NO: 343526

SEQ ID NO: 474748 - DNA, 1000 bp, Homo Sapiens
ctccgtcactgcattttgcttaggttatattaaattattttgtggccccaaagcttgacagatgtcagggctaagggtgcttggaattaaaagtgggaaattaaattaccagtaattgaaagttgacctttaaaatgtgcttacaaacccatcatcaggaggattctctaagaactgtatacaagaggctgctgtttcttcaatggattttgaccagccaccaagatttccagcaaagtaaggaaggatgctagcagacatatggttaaagtaagatacgatgcatgaattgctgtcaatagcatggatgagaaatccggcacatatgatttcacttctgatgtactgtggagacggggggaccgatggcaaaatgaccgacttcactgccactgtgtaagtgttaccatctttgaggggttttcttcgtgatacgagtactaccaagtctttgggtttgtcatcattcagtataggacaggtgatgtgatacagctgatcatcttcactcacccagtctatgacttcacaggacacaaaatgggggtcccacaaaggtcgctttgtaaagtcagacaagagacgataagccaaatgtgctggacttcccacgtgcttttcaacccaaacagataaaacatcatgctcttccagagtatatatttttatcttttccacagtgctggtaacctcccaaccccttttggctgccagttttttgagggcctccacattgctgtcactcagggatgcctgcttgctgatatcccagtgtatgcaaagtggaacctcttctttgtgggaaataacatattttctgcctaggcgaattcgcttgcgtgcaatagctccccgatagcgtctgaaatcatcctttgaaatgggttggattctgggaaacgtgatgagattttccttatcatcagcagcattgtaaatgagaaaagcactgttgatgtgacgccctcggccctcggcccattcctgacagtcaaaggcc

SEQ ID NO: 474749 - DNA, 1000 bp, Homo Sapiens
aaaaaagaaacaaaagaaagctcaatttatgaacactttacaaatcctgtacgattcactgacaaatgaacacactttaaaaaatgtcaaagatattagatataactttaattttgaatgtgatttagatacgatcaaaccaaaaaattacttatactttactacctaatcacaattaacataaacataacaaattgtatttataagtcaaagtaacaaaccactttttaaaaaaaaactccacattgtcaaaatttttcctatggaatattggcaaagaatgtaaagttatattgtgctgcaaacagttaaaagcaatgatttttggatggttcaataagatgtgtatatataacttaaaacaaatatttggattatttcctctggaaagttagcttgcaaatgaaaagaagaaaaccgaatccgcatatggtaatagctgtcctcttcaaaattctactattccatgtagatacttcttcccttaattgtatatgagttggatcattttcccgttcattttgcaacttttgaattaggtcttttagtttgcagaccttttcactcaaatcttcaacattattaaccaattcttcacaaactgaagtaaaattctggggagaagcccattccagtgttatcttttgagaatttacaggtaactcagtaataacattctgtacagctgttattaaatggccacactgtttatttaatttgagaagaaagttgaggaactcatcaccactgatttccaactttgtctcttcagatagctctccaaattgtatctcttctacctgtagttctttaagagcagccagaattttctgctggtctttactggtaattccattctttgtaaattcatcttccctcatggtcaaaagatgtcttaacgttatatccctttcctttagtaaatctgtcatatgttcaagtccaagaccatgtaaaaatacttccagatctccaaatgctgtatatgaactaaaaatgt

SEQ ID NO: 474750 - DNA, 1000 bp, Homo Sapiens
tttaaacttttatttcaatttctttatgctgcagcaacatatatgtgtgcgtgtgtgtatatatatatatgtgtgtgtgtgtgtgtgtgtgtatatatactcacatatatatatacatatatacacatatgtgtgtgtgtgtgtatatatatatatctcagtataataatcccaggaatacctagctagcattcttacaaaattggaggaggcattttgaagatatggaacatctacttcctagaagctttcttgttacctcctagtttcaagctgctatttccatgcatcccctagctttatgctatggtgtgctgtcccaacgtgtcggccccaggagagagtggtaagaaaggaacaaagtagttttggtcactactatcagcaatcatatatttgaaaatactcagggtctaagggtcatagtgaaaaagggtgatgagttaaggcaagggattgcttatggtaaagaaagcaaaccaccacaaaccaaacctctcttactctttttacaatgccaccaaagcaaaccaggcctctaggttcttctctccctgccctgggttctatggtaagaatagacttgagctggggaggatgtcaggaatgaccgtcatgtgcctaagagctcaggttcaaagcaagcctgaaccaccaagtggttggaaaactgaacagtgcattttagaaactggaagtacagaactgaacatgcaggagtgcacacatgtgtctcttccttgtcttgaatggcgaagtcagtctcttgagtggtcgttttcacccgataggttcatcagagaggaaggcagtggccatggctgcctggtctcttgggctggatcaagggaattgatgctgtggtggatgcaagtatgttccagaaaagacatggcaagcagaaaataaagagaatgaccaaatcaaaagacaggagagaagagggggaggagataattgaacaacaagaaaaaagagtagtaggaaccctgcagtttct

SEQ ID NO: 474751 - DNA, 1000 bp, Homo Sapiens; identical to SEQ ID NO: 160634

SEQ ID NO: 474752 - DNA, 1000 bp, Homo Sapiens
gtgattcacagtgcactgattttatttacagatcaaaagccacttaaataatctgcagacacaagtgctgtccagggcagaagcctggggtccaaatcagccttatccctcctcatgcccacagtcagcccaatgctgtctccgttccatgggccagcacaggcaggcgccactctgctgacatgaggacctggggtagctcagacatttgactacccaagcccagaaaggagctgggtccagcccttacggggaattcctttaattcccccaggccaggtgagtgctgactcagtgatgacaacagctgtagaagtaggggtttggcttctggcccagatccacgcccttgtcctctgtcatcacctggaaggcagccacactgacgtaatcctctgccactttctggaagagctcgtccacactctggcctgtcttgctggatgtttcaaagagctgagctttgatatctgtaaagagaagtgactaaagcctcatacctgagaattagataaacagacaaaagggagggctagcagttcagggagtctcctggaccccacagttcaaggaggccaggaagacctcctagagcaccttgccctggcagccaaggcagtccctattttctttgatccacccagacagccacacacccccaccccccaaagggctgaggagcagctactgtctgcatagtcctggacgtcgtggaagtccacacgtcgacgcctccggtcttcttccagcaggtcactcttggtgccacataagtagatttggcagccctcctctaggctgcgcagttccttcacccagaactttgctcgctcaaagctgctgctgtctgtgaggtcatagcagacgatggcagccttggcaccccgatagtagattctactcatggcctcatagcgctcagagcctgctgtgtcccaaatacctaatgtcacagtccggtctccgaccgacatcaccttggccacgaaggcggccccga

SEQ ID NO: 474753 - DNA, 1000 bp, Homo Sapiens; identical to SEQ ID NO: 343529

SEQ ID NO: 474754 - DNA, 1000 bp, Homo Sapiens; identical to SEQ ID NO: 343532

SEQ ID NO: 474755 - DNA, 1000 bp, Homo Sapiens; identical to SEQ ID NO: 343533

SEQ ID NO: 474756 - DNA, 1000 bp, Homo Sapiens
aaccaaatgtcatgggaaagagcttgatacggtaccaaggaggacaaggatggttgtaaggacggatgtaaatagacagtgcacacctacagccaagccctagcatagctgagtgggagagaggttttatttaggtatttcttttaatgggtgctattggctgtcttccccctcagtgtttaggaacgtccccaagacgtctgaagacaaccttgaggagggagcagttacttccgatctgcttcttcatcaagcgcaaagtctacacgtggactggagaaaggaaagggaaacaaggcccaaccccaaacagcaaaacaaccccatgacggagacagtggagcatcaggttaaaaccatagaaaaatacgagttaattctatcaggttaaccattagcgtagctacagtaagactctgtacagaaaagcgttttcttgtagcccctcaccatgttgaacgtcctcattacaggaagtagcaagcccatatatgaacacgcactgctaaaacaatggtgctgtaactgctgcgtccatggcactgcgacgtgagacagggtgtgatgtccctaacgggaacacagaggctagtgtgggcgggtctcatgcttccgcttggtggctggaatctaggggccggtgtcctgtgggctcgcgtggggcctgcggccaccatcctttgctctgttccttgggggaggggccgtggcgtgccggtctctcgggcgccgggaggaggcgctgctgcggggacagcgttgtccctggtgccatggaggccgtgagtgatgaccccggggaaggagcttgtttcccaagcaaaactgccttccgcatccgagacacacatgctatggaacacccggccccgccccgccccgcccctccgagggaagagggagggcagggaaatccctcggttgcatctggttgtagaaagagccacgtttgtgcttagagcgacctgagcttagtcctcctcctcgtcctctttcgctg

SEQ ID NO: 474757 - DNA, 1000 bp, Homo Sapiens; identical to SEQ ID NO: 337570

SEQ ID NO: 474758 - DNA, 1000 bp, Homo Sapiens; identical to SEQ ID NO: 343537

SEQ ID NO: 474759 - DNA, 1000 bp, Homo Sapiens
tatcaatccagcaggatgctgatggttttatttgatattgaaaaggcaaggaaagagttgttagatttctgttattatggccacactggaatcagatgttgtgagtgtttctatttcatggacagtgcaacccgatgtgaaagaccacacagtgccaacctgtggtcatttgttggtgggttgtgttgattagctagagatcagctgcacctcagcccactatacacgaattcacatgtgcttttcaggcatgtggggtgaggagaggaacctttggtgctgtcctcagcatggttggtagatagtacagctgccattggaatgcagtgacaggagccattctgctgtgctctctgtgcagaaaggcttgccgttggtaaagatgaaaagcattgcagatgtcatcttccaaaagctgtcccctgttttaggtagtccactgaaagtccagtgatccaaaatgattgctaggaaactggtttcattatactgtctccaagtgttattttgttcaaaaccccaagtttcagggaagaggagtcctctatccacacaatggatgtagataaacttttttttttaattttgaaaattgatttcctctgatgtttgtgcagcagctgtttcaacttgtccttaaaaaagttggttgtgagagtatagaggattggattcaaagcactgttaactggaaggaaaaaaatcactatccaggaagtcattgtgtctggtatttccacccggaagagggaaaggattttaactacaaatacaggaatccagcagatggcatcagagaacactataaaaaagaaacgatttgcaacagccacctctcttccaaaacaattccttacttctgtggtctgcaaggcggttttttgaatggaacagaacatagtaatataggaaaacacaatgatgagaaaagccagcaagttcacacctaggaaaattccaagagaataccctttgcttccaatatcttctgtttggtcat

SEQ ID NO: 474760 - DNA, 1000 bp, Homo Sapiens; identical to SEQ ID NO: 160635

SEQ ID NO: 474761 - DNA, 1000 bp, Homo Sapiens; identical to SEQ ID NO: 343539

SEQ ID NO: 474762 - DNA, 1000 bp, Homo Sapiens
ttatttataaatcttttattttaaaattctaccttgttaaaaattaatcagtaagtgtcctggtaactataccaaaacatattttgttacaagggcaagcttaattcagtaacacaaaaaagtatacatatgtattaatatgaagaaataaggaattaaaatagattcttatttagatttacttattcagaaatgattcaagtcaaacagtttattttctatagatttataatattttgccctcaacagaactaaagtactaaacagaaagcgattctgtacaactggccataatatgtacaaagatgcctccagttgtttttaaaaaacttataacaatacttagttacttctaatagtcattaagattttagttctgttccttgaattacattccgaatcttctcagcatcaatttgtacaattttgttggatggatcaatcttaagtgccgcttcataatcctgtaggccttctacatacaattctagttgacagaatgctgttccacgtcgtacatgtgccttcattcttgcattagcattgtctgtaacaggtggcatcaataattccagtgccttagaagaatcttcaatagccttgtgtaagttttttagttttaggtggcaagcagcccggttcaaatacaatagtggcatcttattatttagtcttatggctaaattatatgcattgatagctgccaaatagttttccgttgcaaacaatttgtttcctttatccttcaaccattctgggttcttttcttcttcttttaaatcgcaaagttcagctatgtcagtattcattgctcttcgtgcctcagcttgtttgtgtagccactcctcctcttctgctacttgtgattcacgaagagctgttgggaatactcgaggggtaaagttgattttaatactgccaacagagcgaggagcaggaatactgtcttcctttaacttctcagtaaatatattttctgaatttctcccttttggagcaa

SEQ ID NO: 474763 - DNA, 1000 bp, Homo Sapiens; identical to SEQ ID NO: 343540

SEQ ID NO: 474764 - DNA, 1000 bp, Homo Sapiens
tacatgtatattatttattgttgattctgtacaccaaatggattacaagcagcatccagcagaagacagaccccccaaccctgcccaccagggctcacactctacaaaaccctgagggcctagaaatctgtaaatgcatcgccaagcactggggctgatttgcagtaattctctaagcaaggcaaacatgatctagctttgaaggcagcatgaaggcagcgggttggtgagaataatctctccttaagagaagaagaaacctggggcggaaggagttttccccggaagtggcttgccagcccaccctctctgaaccacagccatggcttccttcccaaggccactgctggcttcccaacaacgcagattcagttctgactgtgggatctgggggctgaatctttgagtggtttatagctaaaagctaggatacatctaacatctgtcgaccaactctgggtcccgagttatctctagctgtctgctctctgcaaacttcctgagtttggaagttctttcccaatagctctacatcagcatctgaaaggttgtggaaattgtgtccatgaaaagttctaagtagaactcttgtatctctaaattctaaggaggaagaacaatatacatacagcccaattcccatgagagggacaaactattctattctttaagggatggaagagtttattttttcctgtggttacaaagcttttgatctatatggtaccaagtgaggttctgatgaccaagactaaggagagcaacaggggaatggcttccatttcctttggtttaatgacgaaagcccaagacaagccatgagctcttgtacaaagtttgaagagataaataaaactcccagcctattgaacaccatgcagaagagcaagtgcctctgtaccccatcacaagtgggtagaggcggcactcctaccgcaggggtgctgagggctagagagagaatccacgtccagtgcttgaagagtatctgtgcacagta

SEQ ID NO: 474765 - DNA, 1000 bp, Homo Sapiens; identical to SEQ ID NO: 343541

SEQ ID NO: 474766 - DNA, 1000 bp, Homo Sapiens; identical to SEQ ID NO: 343542

SEQ ID NO: 474767 - DNA, 1000 bp, Homo Sapiens; identical to SEQ ID NO: 343543

SEQ ID NO: 474768 - DNA, 1000 bp, Homo Sapiens; identical to SEQ ID NO: 467040

SEQ ID NO: 474769 - DNA, 1000 bp, Homo Sapiens; identical to SEQ ID NO: 343545

SEQ ID NO: 474770 - DNA, 1000 bp, Homo Sapiens; identical to SEQ ID NO: 343546

SEQ ID NO: 474771 - DNA, 1000 bp, Homo Sapiens; identical to SEQ ID NO: 343547

SEQ ID NO: 474772 - DNA, 1000 bp, Homo Sapiens; identical to SEQ ID NO: 343547

SEQ ID NO: 474773 - DNA, 1000 bp, Homo Sapiens
tcagtgtaggttcaggcaccattaggaacgtttgaccaaacacgtacacggcactgacagaggaggcgccggccttccggtggaccagggcatgtaaaaaagacaccgacacaatggaaaagaaatcctcgaaggtagaacctcgccgcccgcgccgcgccgcgccgctcagggccgggccccgcgcgcctcgcgccgccgccgcagctcctcgcggtagcagtaggagcagtagtgctcggtctcggcgcgcccgtagaacgcacagttctcgcgctggcagcgccgctgcaccggccccgggccgccacggccgcactcaccgttcgagcgcgcggtcggcgcgtcggcgtcggcgaactccaggccgtcgcgcagggcgccgaagccgttggtgtaggtctgcgacttgtgctcggccgcccccgccgtccccgccgcgcccggtagggccccgggcaccgcgcgcgccagcgactcgaccgtgttgacggtgcgcagggcggcggcgcgcgccgggctgtagctctgcgacgacagcgagcggttctgctgcgggtacgtggcgcacggccgcagcgcccccacggccggcgcgcacgcctcgtcccgcgcgcccgacgcctgcacgtggatgacgctctggcgcgctggcgccggggggctgcggccaggcactggtccgctggcgctcgcacgccgcgcgcctccccccggggaggccgtgccgcccgccgccgcccgcgccgcacgccctgccgcgggcccggggctcggccgctccttgagcttgagcaccagctgcgtgggtgggcccggagaggcgcgctccgggaccggcacgccctccgtctccggtctgcgcggcggccgcttggccgtggcggcggcggcggcggcggcagcggcggccgcagtagcggcgtcgcggcgccgctgctcctgctcggcgctgaagcgctcctgcgcgctcgtcaggtagtagccgatcatctcctcg

SEQ ID NO: 474774 - DNA, 499 bp, Homo Sapiens
ttttttttttaaagatttaaaacacattttattttttcaattgtgctatattttaataagcagtagagtgcttacatgacaagttggttttttaaacaattctgtcattacagcaactgtgatggttactgatgtttccactcttttggggtaactctgccaacaggggataggttccattctattccaatctgagtggctgtaaacacccatgtagcaacacagaaagcagttccactggctagcacagcattaccatatttatcatgaaaatctggtgagtgttttacatggctatgtcttgccatgctttgcagaatgctttgaatcttgagactgcttagtgcatttctggccaagggaaacatcatgaaggattgcagttgccttcagctactggtctattttgttgcaaagaggctgttagaaatctgaagctcaaatgctctcctcagaaagtttcagattctgcttccaatgtcaaagaaaagatgatcac

SEQ ID NO: 474775 - DNA, 1000 bp, Homo Sapiens; identical to SEQ ID NO: 160638

SEQ ID NO: 474776 - DNA, 1000 bp, Homo Sapiens; identical to SEQ ID NO: 343549

SEQ ID NO: 474777 - DNA, 1000 bp, Homo Sapiens; identical to SEQ ID NO: 343550

SEQ ID NO: 474778 - DNA, 1000 bp, Homo Sapiens
ttttttttttttttttttttttggcattcagagagcacgtttatttacaaagcgctttacaaacatcagcttatgcctccccacagccccctgcgaggtaggtcagtagtcatatctacagtttacagatggggaaattgaggcacggaatgggggtgtggcctgccccattttaaagagaccttcccacccacccacccaaaaataacaaaagaaacaaaaaagcactggtcctacctcttcctctgaactccagagggtatgaccagccctgctctaacactgcccctccccacaacgggcagcctgaccaggagcacaggggcctcaaccccaggggctgttgttcagccttgcagattgtcactggcccaagctgagcaggacaggccagtgaggcctgaagattaaaggaagaggggggcgaggtgacttcattctgcaacagtgggtcaggcagggaaggagccccccatggggcacagcagtaataggcagatcctggttcagggaagctcagagcacatatcagggaagcaagtggggagggatagtgagcaaaatatctcaggggctgcagggggcagtggggaggagggcgctgcagttcccctggggaggacagtcagtgtgccccactggctattcagaattgagacctgcttccccaggaccttcaggggctgggccagatggaatcctaaatgccaagtcccagtacatcctctacccacatgcagagggggcaggctgagtgggaaccttggcctgggatgctctctgcagggcctcactcatccctgccaaaagccaggatggtgccaaggggcttggcctgagtcccccagagccagccgtcctgagcctttgtcactctgccaggcagcaccaggcctctcagcacaggcctgcaggaccctatggaggtggggctgggctgcagacttgctaagctcctccttggcccaccacccgcccatgggacaagcgaaaggccctg

SEQ ID NO: 474779 - DNA, 1000 bp, Homo Sapiens; identical to SEQ ID NO: 160639

SEQ ID NO: 474780 - DNA, 1000 bp, Homo Sapiens; identical to SEQ ID NO: 160640

SEQ ID NO: 474781 - DNA, 1000 bp, Homo Sapiens
tttttttttttttttttaaaggacagcagtttcaagtctctctcacgggtgttctctcacgctcgctcgctctcctcatatacttgatttctttgaaaacgtaaacatattggaagggccttgtctgaggtattgaggtattcctcgagggttaaggctgttatcaatgcaggctctgctgggcctctttcagtaagctgtcaaaatccatggcttcatacttgcttttccctgacgcaggaagggcctcttctgaattggaatcgtagtcagtgtatctgggccagcagaagtgccggagccctccgtagctcagctggaaggagggctcgttgcgcttcctcagggcagcgccctttgtcaaagagagggccgcgtgctcagaacaccggtaggtgatgaagccgtacttctcgcctctcctatttcttgtcagcacctcgcactcctcaatctcaccaaacacttcaaagcgcctcttcagctctcgggagctcatgtcgctggagagattttgaatgtacaccacgcggccttccccaatggccttttcccgccgcttcctggcgtgccggatgcttggcgttctgtctgaacacggccctctgctctcacatctgaagttccttcgagtggctggtgaccaggagtggcagggtgaagagccagagcttgagcggctgcgggaacagagctgccggttggccttgcttggtgggctctggtaggggcagtggtcagagcaagtggggctgacccctgagtcctcttcttcatcgtcctcctcctcctcctccccttcttcctcttcctcctctgggaggaagctgctctcgccgctgctgctgctgctgtcttcaaagacagtgtcatactcagggctcttgcaggaggccaggtcttcctcctccagggcggtctccagcagcccaaagtgtttggtgaggctagcacggatctcatggtctctcagcagcgtgctgtccttgggtggggcacc

SEQ ID NO: 474782 - DNA, 1000 bp, Homo Sapiens; identical to SEQ ID NO: 246575

SEQ ID NO: 474783 - DNA, 1000 bp, Homo Sapiens; identical to SEQ ID NO: 343554

SEQ ID NO: 474784 - DNA, 1000 bp, Homo Sapiens
ttttttttttttttcttgaggtggagtctcgttctgtcacccaggctggagtgcaatggcgtgatcttggctcactgcaacagctgcctcctgggttcaagtgattctcctgcctcagcctcctgagtagctgggacgacaggctcacgccaccacgcccggccaggcaggttgtgttttcttttcattctctcctcacttggtgaattcactaaatacctaatcacatctctacaacaccagaacaaggtggaatcctaataagaatgtgtgcagcctggccaggcgcggtggctcacgcctgtaatcccagcactttgggaggccgaggcaggtggatcacctgaggtcgggagttcgagaccagcctggccaacatggtgaaaccctgtctgtgtggtcccagctactcgaggagctgaggcaggagaattgcttgaacctgggaggcgaaggttgcagtgagtcgagatcgtgccactgcactccagccttggcgaaagagcaagactctatcccggaaaataaaatgaaataaataaaatgaaacaaactgagttagcccttctgttctccacagactaagttttcaatgaaccctgtctggagaactctagcgaggaagtgaaagcggaaagtgtggtggggaagcctttctctctccactgtcctggagtgagagcctttgcctctcttcacttcactctcagtgcacgtcttcatattcctgcccggtggcaaggccctggacagccaacccagacacagggctggactgggcggtacctacctgtgaccacaagctccaaggcattactggggaaggaccacaggtaggggctcctgttgtaccaaccgtagcacctgtagatccctgagacattgaggtccacaggacccaaagagaagttggccgggtgttccccactttggtgctgtggcagagaaagttctccctccttggccagtgaaaatctatcaaatgggatgtgtgctgagc

SEQ ID NO: 474785 - DNA, 1000 bp, Homo Sapiens; identical to SEQ ID NO: 343556

SEQ ID NO: 474786 - DNA, 1000 bp, Homo Sapiens
tttttttttttttttttttttttttttttttttttttttttttttttttttttttttttttttttttttttttttttttttttttttgccggtggttgtaaacagagttttattgatggggagggggctgggggaggcaaactccagagagggcagaggacccagccagccacgtggcatgcatggtcagctggaggtcagaggggggaggtcacaaggggacgggtggcatgggactctctcaccaccctggggccgtatttacagaggggccccacccaccttcgccgccccccaggcccccaagccctttagacagctgctgccgatgtgacttccgggcaggccctcctcgtgtctcctgcctgaaaccccggcattgtccccgcttccctctgcagagtggggggggttcaaactcctaaccggcacctcggagacccccgggccttctggaagccccagcgtcggctcccgggaccctgcgccctgcgctcgcccaggcggctgacgctcagcaccgcctcgcccgccccgtgcgccaggatggcctccttgtccttgcgccgggccagctcccgccgctcacggaggcccacgaaccagcccacgctgaagccggacaccacggctcccaccacgaaggccgccaccgacgacgttaccagcaggttcaccgacaccagccccgcgcggtcctcggagaggctggcccgcaggagtcctgtgcagtcccctaagcctgaggtgctggccccggacacgtcctgctcaaaggcggctctggtgcccgggctgaggaagatgcaggagccgtcgggggcccacccgcagtaggggtcctgactgccgatacagttcttcatacaccccgagtactgctggcagcgagccacaggcactcggaccacgcagcgggggaaggcagccagcaggccccccgaagctgcgtccagctccaagctcagcagccgctgccctgtctcgccaccgccgggcc

SEQ ID NO: 474787 - DNA, 1000 bp, Homo Sapiens; identical to SEQ ID NO: 343557

SEQ ID NO: 474788 - DNA, 1000 bp, Homo Sapiens; identical to SEQ ID NO: 246576

SEQ ID NO: 474789 - DNA, 1000 bp, Homo Sapiens; identical to SEQ ID NO: 343557

SEQ ID NO: 474790 - DNA, 1000 bp, Homo Sapiens; identical to SEQ ID NO: 160642

SEQ ID NO: 474791 - DNA, 1000 bp, Homo Sapiens; identical to SEQ ID NO: 343561

SEQ ID NO: 474792 - DNA, 1000 bp, Homo Sapiens; identical to SEQ ID NO: 343562

SEQ ID NO: 474793 - DNA, 1000 bp, Homo Sapiens; identical to SEQ ID NO: 343563

SEQ ID NO: 474794 - DNA, 1000 bp, Homo Sapiens; identical to SEQ ID NO: 343564

SEQ ID NO: 474795 - DNA, 1000 bp, Homo Sapiens; identical to SEQ ID NO: 160643

SEQ ID NO: 474796 - DNA, 1000 bp, Homo Sapiens; identical to SEQ ID NO: 160644

SEQ ID NO: 474797 - DNA, 1000 bp, Homo Sapiens
gcttattattatttttttatttttacaatgagcattcttttttttttcttttttacaacaccagaaaaagtcacattctcagaagaagaaaggatttgttttgggtgcagtggtctccccaccaggctccttttcatacctggtggctgcagttactttccagagcacagcagaaccaacctgaggcaactggagtcctcttgtctacttttcagattcttgaatggctggtcttcagctcatggaaacctggctttaaatggcagcccccaaattcaagagaaaacaccaattgcaagcaattctaaaagtcaggccattgggcccttgggacccagaaggggagtgaaactccagagcaaaaggaaaatgcaatcgctatcccacacaccctgggaatgggctggactcctgaccttccccatcgcccccagagagagaggcagggagagctctacagcaatgagaggctttccttcaggcttcagctttagtgacccccagtgacatcttagcagccagcttctcatgctgcatccagtgcaagaacaacttttccagcctagagcagcagttgcatgaaacctaccattgactgagctcttattataaatgtgccctgcactgtgttcacaacaaacccataaaggaggttttatacttgtcctcatcttacacttggagaaacagaggctcggagatgtgaaatgacttgctcaagttcatccggctagcagtggcagagttagaacctaccccatccagtctgactcccaagcctgcactcaacttctaaactccaaggcagggcatcacagtcagatgatttcagagcgagtgggcattgaccacccagtgcactgaaaagagacatccactggaatcagattcccatttggtgtctgcccctggacaagtcacttcctccttttggcctaaatatccacatctgtaaagtggggacaacaatatctttctctcagggttgttctgagaatta

SEQ ID NO: 474798 - DNA, 1000 bp, Homo Sapiens; identical to SEQ ID NO: 343567

SEQ ID NO: 474799 - DNA, 1000 bp, Homo Sapiens; identical to SEQ ID NO: 343568

SEQ ID NO: 474800 - DNA, 1000 bp, Homo Sapiens; identical to SEQ ID NO: 343569

SEQ ID NO: 474801 - DNA, 1000 bp, Homo Sapiens; identical to SEQ ID NO: 343570

SEQ ID NO: 474802 - DNA, 1000 bp, Homo Sapiens; identical to SEQ ID NO: 160645

SEQ ID NO: 474803 - DNA, 1000 bp, Homo Sapiens; identical to SEQ ID NO: 343572

SEQ ID NO: 474804 - DNA, 1000 bp, Homo Sapiens; identical to SEQ ID NO: 160645

SEQ ID NO: 474805 - DNA, 1000 bp, Homo Sapiens; identical to SEQ ID NO: 343575

SEQ ID NO: 474806 - DNA, 1000 bp, Homo Sapiens; identical to SEQ ID NO: 343576

SEQ ID NO: 474807 - DNA, 1000 bp, Homo Sapiens
gaagtttctatctgaacatttattccacagtcatagaaactgaagatggaaaagacctgaggacatctaatccatccatgtggttgtacaagaaaagtggctggagcaaaacagcccgttcacttcatgctcacaagacagcatttccgttcttcctggagcggagcgattgcaaacacattaaaatgaagacacaatgcaaatactcttcacaaaccttaagaaaatacttataaatacattattttcataaaatgattagtaactaaaaaaaaagagtgagggaatcctggattagatggatagtttaggtgggtaaagaaaggaataactaaacagtatagatagtaaagtagtattaatgcctagaaagcaatttctgaagaactggatgggttttctgtttttcctatcaaaaatatgagttgggagaaaaagaggctctaaagtagtttctttcccctttattctttacccacaccaaggaagtgcttaacttgctctaaggctctaacagacacagcaccaacactgagaagtctgttacccagatgataaggtctgttctgcttggcacttgctccgcttaccacttttctggctggaagggaagcagcagctcttgatagggtttgtgcaatagcaagattcatgaatagcagagagtcatctccaggcacattaaagacctcgactgcttgggtccctgtggctgcttcacttggctgtcctggttattcttccaatttgtttttaaattttgggagattcccctttctcctccacctggaagcatacacactctggggccttgattattcttatttacacgaaccaggtagctatatctgttccagctcctctgagcatgctttatcatgtgcttcctgtgccagaaaagcaaggtagcgtcccttatctctttcttctttaccagaataccaccctctatctgaaggcttctgatctttgtgttttttttgagcctcaaaggagttga

SEQ ID NO: 474808 - DNA, 1000 bp, Homo Sapiens; identical to SEQ ID NO: 343578

SEQ ID NO: 474809 - DNA, 1000 bp, Homo Sapiens; identical to SEQ ID NO: 343579

SEQ ID NO: 474810 - DNA, 1000 bp, Homo Sapiens; identical to SEQ ID NO: 160646

SEQ ID NO: 474811 - DNA, 1000 bp, Homo Sapiens
tttttttttttttttttttttttttttttttttttttctttaaaaccatttacttacaaactttaattcagcaaaggtccgtgtggggagactggggtggggtcgggggaatagtccccttggagtggatgtggacccccagagtcaagggagggaagctggtggcccagttggctgggggcaaggcccagggtcacctcaggtcgacaggtcctgctggtgggcgggcccagagtttatcttcatggagtgctggtttctggcactgggctggaaggaggccagctccagggatctggccgggggtgggcaggcagaattcaagaattcatcttcaacaagcgagtgacagcagaggctccgggagatgggcacaatgtccgactcccacagacagacagcaggggactggcagagaaagcccatctctgcacggaggcccgggtaggagggggtggtggggccggttcgccaagatgaaggctttccccttctactgtccccagggtggagatcctgggtagggtggcccaatccctaggccagagctgtttggtccatagtcaagctcccagagcttggcatctgtggctctggccagcagggcctggggcccagcttttaaggcatcagaaggggagggggctgcggcagggaccccgggccccacggctggggtataggccagatgggcaggcaggggcaggagacagccatgcctgcagcaaatgtgggaaaaacagctgtttcaaaccgcaaggtgtggaatggtggcccggacaggccgggccttgaaggaatcagagctgggggctgtccggggtggtttgaaaaataaaacttagaaaaggaaacagaagtcagttgtcaaagttaaaaaaaaaggagacagtctctgtatcttcacgggaggtcagggaaacctccaaggcactcgaaaggccaaaattacaggagcaatgaggcaggagggctccggagagacgggcacagcggagga

SEQ ID NO: 474812 - DNA, 1000 bp, Homo Sapiens
tttgcggggaatcaggtaggggcctttattggccagcacacatctacctcctggcatctgtcacaagcatttgcaggagtaggcggccccttcctctccatgtccccatccccaacctgagatgcgggagggcctgggggctcagagggaagaactgaggcaagaagcccccggtgatccagtcagaggattgggcagcctgacctcggggtggggagcccagcactggacaacaaggagggaggggcacaggagggctccccgaggtttggtcggggagggggaggaagactgccccctgccctgtcatctctgcatgtgccgagccccagctcctgactccctcagtgcctttgggcctggatgctcagacagcagatgagacgaagccttgtacctctatccctccttgaaggcctgcctccccccacttcacagagggaaactgaggcccaagcctctcctctcagcccttgctcagcctcagacatgtgcatggtgccaggactgagacctgcttacccctaaggcctagatggcagaagggaccctgaggacattaataaatatggacgggcggtccctggaggcagctggccgagtccaggtaggaggggaagcctggcctggtctgcctcaggggccgccaccaccctcagcctctctcgtcccggctcctgggggccacgatccggtagttggttgcatgtccgcccctcttgccccgaaggaggctgggggtgcctgtgccggcagggcccgccccagaccccagctctggttcatagagcccaatcattgtttccaagattaaaaccctctcagctaaaatcttcaaagcctcgcgtagctggtgcaacccctccccccagtggctcttctcaccagggtctcccttagggccaggttccccccgctgcccagcagagccttgggggccaggctccccacgcagtcctctctcgcccttctctcctgggtggccagagattcctttggg

SEQ ID NO: 474813 - DNA, 1000 bp, Homo Sapiens; identical to SEQ ID NO: 343581

SEQ ID NO: 474814 - DNA, 1000 bp, Homo Sapiens
tcacttcctgctgctggcctggtccacgctcttctgtccagggtcgggcccaagcagggcagcaaggaccccatcgggttgggcgccacccctcttcatcttgaggttggctctcagggcagcatcctggccagaacctccctctggggaggccaggggatcgtggatcccaatcatgtgctccaggatgaggactcgctctgccaggatcttcagggcctctctcagctgctgcaccccctcgccctctgcagtggcggctttctctccttcttcccccttcacgccaggttcaccggacggccccactgtgcctcgctctccagccaggccctgggatccaggtgttcctgggggtcctgggggacctcgaggcccagggggacctggtggaccagggggaccccggggtcctgggacacctgccagcactgtgtccacgatggcagaggccagccttgagtctccattgtctttgtctgtaggcggctgcagggagtagagggcgccctgggggctgtttggtgaggggcctgggttgcctgctgggccgggtggtcctggggggccggggcgccccatctctccaggaagcccacggggccctggaggccccaggagcccaggcggccccgctggacccttctctcctgtctggcctcggtcacctttagacccgggggggcctgcaggccctggtggtcctgtctgccccgggggcccggctgggcccgtgggccttctctgtcgtggcacagggtgagcaagagggatggcgtcggggaggaagtcctcattccaggtcggcggagtgctctcgggggctggcaggtcgttgtccgggctggagggccgttctgctgcttctagcaggaggaccttggcctccagtgtggtcagtcgctcactcatgtcactgagccgggtgcagttcatgcattcctcatcacagttgctcccggtgaagccagggcagcatctccactccagcaccgtcacc

SEQ ID NO: 474815 - DNA, 1000 bp, Homo Sapiens; identical to SEQ ID NO: 160647

SEQ ID NO: 474816 - DNA, 1000 bp, Homo Sapiens; identical to SEQ ID NO: 343583

SEQ ID NO: 474817 - DNA, 1000 bp, Homo Sapiens; identical to SEQ ID NO: 343584

SEQ ID NO: 474818 - DNA, 1000 bp, Homo Sapiens; identical to SEQ ID NO: 343585

SEQ ID NO: 474819 - DNA, 1000 bp, Homo Sapiens; identical to SEQ ID NO: 343586

SEQ ID NO: 474820 - DNA, 1000 bp, Homo Sapiens
aagacaagctttgtttttagtatgaaatgccctaattttagatagtggcaacaatgtatacacacacacacacacacacacacatgcacacacacccaagcaaattgttataacagcttttaactgttgccacacagaatgtttacactccaattgcaaaaaaatgtacttgctacaggcaaaattgttttaaagtagaatttttgcaaaccaaaatccatccagaatagctctgtcttcagcacatttccttacccccagcccccatctattttcctaggactgttactctcacggctgagatggctcaggtgcaagctctctggcttctcagtcctgttggccaatgcccaaaagaaaaagagttcccttgtccgattaaaatactccctcaaggaaaagtcgtttgaacttcactgacccattcctagttacagcatttgagggattcctgcacgaagttttcaaaaagtatactgcattctcactaagctagaagtccagcatcctaggaaccaggcttgatggagtgtacccgtaatgtcagctactcaggaaagtgagatggaaggatcacttgagcccaggagttcaagaccagtctgggcaacatagtgagactccatcccaaaaaagaaaaattgaaaaaaaaaaaagaaaaaaaaaagaaaagaagtccagcatcctgaatagtggtattgtattttttactagagaaacttgaaagtaatgacaaataaaaaaaaataacttatgtccacagcttcagagattatcaggataccaataaaaaactaaaaaaccaaaaaaggcaaaaatcattaatcccatcccttcattctgctggtgacgaaaataaaattctgaaaggtcaaatgacttgtccaaggtgtatacagcaagttggttggcaaactgggacagaatccaagttatgtgactgcagtcaagttctctccatcacactacatggtagtagaagaaatcagagagaaatccc

SEQ ID NO: 474821 - DNA, 1000 bp, Homo Sapiens; identical to SEQ ID NO: 343588

SEQ ID NO: 474822 - DNA, 1000 bp, Homo Sapiens; identical to SEQ ID NO: 160648

SEQ ID NO: 474823 - DNA, 1000 bp, Homo Sapiens
caatattcatagaacatttttatttcaagtcatctcactctgcaagagcttagttgaagaaccaattgaaaacatcccatgtgaatgaaacaggactgctctcattgaagcacttggtaaatcctcattgtgcccaatcattagactaagccattgctcagctgtagcctgtggcctaaaaaagaatatgcaggccaaccattcagctgatttcctcaccctctcccatcagagatggctctttgaattagtaaacccaagtaattttctgtcctctctgccctccctttcttcttcaattagaaatgagaaaaatgtacagagattaagctaatccccagctaaaggaatgccacacaaacttgtaatcaacccacccaagatgatgaaaccggctcatgcagaagagctttcatcattcacccatcctggctgccatgattaagtgttgggaaagaggccggttagcctcatggggagaataactcagtccttggatgaatcatgagctataaataaccatccacaattctcccttctccatcatttcccttatgctgccctctttcaaagatgagaaccaacagtgaactgaaaagggatttaaagctaatcttaaggaatctgttcgttttacagaaggtaggaaccaccaggcaacgtcaactgattttccctacccctcctgtcagggcagagcagggaatcaatgagattacaagtaggaaagtatttgcaaaccctcagtgcctcccattactgcccaaagtctcctagcctgttagtggcaggggtctagttttcccgattctcaaccctgctcactatactacatggcctctttgtgttacagataagcaaaagtgagacccccaaatgcttaaataatggggatagtcacaaaccacacttagatcccaaagcacctaagtcaaagtcttctttccaagggcagcattgaaacaatgacctgactacctcaggctgcagatacgagggt

SEQ ID NO: 474824 - DNA, 1000 bp, Homo Sapiens; identical to SEQ ID NO: 343590

SEQ ID NO: 474825 - DNA, 1000 bp, Homo Sapiens
ttttttttttaacacaataacaatttttatttcaaaaattaagttcacacattatcttaagagaattttaaaatttactgcattttattgcacttattacataaatatacagttggcaaaacaatttactactaaaattcagattctctctcagtataacgcaaagtattactctgaacacctacttcaggcatcactcagtaagtcaaccactaaaagcctctctgctcagattttcctggtgcatcttttatttctcttctctttcatgtagaagtctatgaataatgcccacctaatgcaaaggagtttctcatatctctgacgcagcaacaatttatcacatgctttcacataaatgagaatgttgaaatagtataattttagagttgaattatttgcttttgaaaaaaatttttacttttttcaagtgaaaaaatatatttcgaatatatctcttcaaaaacctacttttcaacttatatacaaggaaattttctaacaggttcaacttttgttatacttaatactctgatttattttaaagtctgaagtgttagttccttagttctttctactgtaaatcctctgatgtttacatagtcttaattttagcctaaatatttcttcacatttactgcacctacaaattatattctagtaaaaattctctggtgtttcttttctttttatcttgttttgagacagagtttcactcttgttacccaggctggagtgcaatggcacgatctcagctcaccgcaacctccacctcctgggttcaagccattctcctgtctcagcctcctgagtagctgggattacagccatgcaccaccatgtcctgctaatttttgtatttttagtacagacgaggtttctccatattggtcaggctgtccttgaactcccgacctcaggtgatccaccctccttggcctcccaaagtgttgggattacaggcgtgagccaccgcgcctggcctctggtttcttaacct

SEQ ID NO: 474826 - DNA, 1000 bp, Homo Sapiens; identical to SEQ ID NO: 343591

SEQ ID NO: 474827 - DNA, 1000 bp, Homo Sapiens; identical to SEQ ID NO: 343592

SEQ ID NO: 474828 - DNA, 1000 bp, Homo Sapiens; identical to SEQ ID NO: 343593

SEQ ID NO: 474829 - DNA, 1000 bp, Homo Sapiens; identical to SEQ ID NO: 343594

SEQ ID NO: 474830 - DNA, 698 bp, Homo Sapiens
tttttttttttttttttttttttttttaaatacaaaacctcagcctttattttacttgaaaatagttcttctatttagaaatatttaagccacatatttgtatatatggaacttctgtttggaattccagcagatcacttcagaaaaataaaatgaggaagctatgtcacgcatcagcatttaaatgctgctttctgcagaagcaatgtctacctttggtagtttttctcttgctattcctgaaatcactttatcttgtggctgatcaagagtcaaattattctttcttgtttcactgtcttcaagcagaggaacacagccataattgttatcttgagtggaattcacaagaagtaactgagattttagcttgtcaataatagtctgttgaagtgacagctgttcctgttgttcacgtattctctgctcatagttctcagtcttttgctgtaattcttttactgcagaatctctatccatgcatgcctgccggaaggcttcatacgctttattgagttgctcgccaatgtttttatccattcctcttcgtcctgtagcatcactataaaggatggagtaaatgacaggtctcttctccaggttacaagtcttcctttgtagactattcctctgtaaagatgaagacagttacacagttgtaaagtgttttccacaggctctaacaatgctgctcaaac

SEQ ID NO: 474831 - DNA, 1000 bp, Homo Sapiens
ttttttttttttttttttttttttttttttttttttttggattccaaagctctcagcttcattttattagttacgttaggtaagggggttcaagggtcatggtcctcatcacacacatgtcatcagggccctctgcactccacatgatgaggtcagacccacacggtgcaaatctttgggtcagtgagctcctggagaagagaggagacatgtcaggaatagattaggcacccctcttccttaatgaaatgtggcagtcctctcaggggtaccccacctacttagggatctgagttcttcagttcctcacccatagctcagcccgggctccctgatttggtcttcaatctactattcattccgtccccacccttttcttcttgatcttcctcagaccctttcccaaacccctctccctgggtctccagccacttacccctgcctcacttgccgcagcccagtgcctcctggctcccgctcctggtgctactgccccttaacaggctccccagggcataagcagctgcatcctgcacactcacaaacagctgatctggagtcaccctgtccaggagtcctacccgggtcagtgtcccctgcaccaaggcattacactgagccaggaggaggcggatcctagcatctcgacatcggctggccagcctctccctcacctgcaccacttctctggccccagcagcatctgcaaaggtgacaccactgaagtctaggaccaccaccctgacaggctcagcaactgcaaccattgggccatctggctttgaagtctccttttctccttctccgagccccaggtgccactccaggttgcagcgaaactgcccacgggtcccaaagtacagtggtgttggatagctcaggatgcagagccccgggacctggaggagaaagtccactcggctgatgtgccatagttgtggaagttcctgcatctggcagaacacctggcgcatgctggagatgttgatgcaagccagga

SEQ ID NO: 474832 - DNA, 1000 bp, Homo Sapiens
ttttttttttttttttttttttttttttttttttcaggctcttaaatctcatgtttttatgctgtagaatgaaaaaatgcctatgattggcattgtcatcttctccatgggaaaacaagctgtttaaaggtccaaatattttgtgggtttttttagggccaaacttttgtaggttggacaagacacattttattcaacccatatttactgggatcctactgtctgtgaggcatgggctggttctccatttaagtcttttctatctggcaagttctctgatcctgttgtcttgccctgggacatatctttaagcgaagagaacttaggtgggctggcaactgttaggagccaaatagagcaagcaccatcttacgtatgtgtttagtttctctctctgttgattacaaggcaagctccaaacattaagatgatgggcagccctgggggagctcggtgctggagaggagtgattttttaaatcaggaaacaatctaattctctgtttgaagctttccaataaccctctcaaccaaatgctaggttcttatttcacttctcagaccatctggctcccgagtggagggagggtgtctcggggtctcctgtaactccctgcaaaggggacgaaggtgtgggcaagcagcactttttactctggcctcctggggcagagtgacttacagatcagctcatctgtgagtttcccatccagtgagactggcccagacactgagcactgcagggaaactgaggccggggacctttgcatcattggcatccttactgtggagctccgaggaaaataaatggcccatgcctcagtttcctcatctgaaaatggagtggggatgcccaggagaatgttagctcaagaaggcagggattttatgtttttgacctgctctagggcttagcacagagtggtgttcagtaaacacatgttgagttcactgggtgagtaaaccttcgaggtgatgttacccatttcacggagtgggag

SEQ ID NO: 474833 - DNA, 953 bp, Homo Sapiens; identical to SEQ ID NO: 343595

SEQ ID NO: 474834 - DNA, 1000 bp, Homo Sapiens; identical to SEQ ID NO: 160650

SEQ ID NO: 474835 - DNA, 1000 bp, Homo Sapiens; identical to SEQ ID NO: 160651

SEQ ID NO: 474836 - DNA, 1000 bp, Homo Sapiens; identical to SEQ ID NO: 343600

SEQ ID NO: 474837 - DNA, 1000 bp, Homo Sapiens
ttttttttttttttttttttttttttttttttttttcggggaattgcctttttatatttttaagagcaaaacagagatgaagaagagtatttcatttataagcttatttccacccagtaactcagagacagagctaaggaagagtgggcccccatctaacaaatggaaaggcagagacaaaagaaaaaaaaggcagcagcagcaaaggcaagttagaggctttcccggcttggccactgcgctaggagggagcacaggacacaatggtgatgcacaggattatccatccagtcgccagcatgcctcatcagagatgctcccagccagggtgaacttggtttccaccagaaacatacacgttagaaataagggaaggaaacgtggcaccagtatgaatttctgggtcctcgcaatgcagcatcctctttcgcctgtggtttatatgcttacagagagtgaggccaaggaacccaagatgtctcttctggccagcctgagaacgtctgtagtcaccagtgccaggtggcagtaaacagcaggcgttactgggaagaaaagttgggaggggtccccaatgcttccctgtttcccaaacaacagcacaggtcatgtctgatcaccctgtaatgtggcactctgctctgaggtcccccaggtcccaatgtctaccatctcctggaaacctgttggctgtcgggaagatttggccagacacgccatgcgccggccgcctgatgctcctgctccctcgatggtgtccaggagaatccgagtgctgggcacaaagctccaggagcgtccgagggcaggtttgagcctcccgctgtccctgtctcgagttatgtggttggtcaccaccactgccatgccaaggtcccgggccagggtcttcagctctcgggccagctgcatcatcaaggccaagccttccctctgctgacctcccagaagtggggaaaccaccgcagtgaccgagtccacaaccaccaccttcacagtt

SEQ ID NO: 474838 - DNA, 1000 bp, Homo Sapiens; identical to SEQ ID NO: 343604

SEQ ID NO: 474839 - DNA, 1000 bp, Homo Sapiens
ttggatttaacaaagctgatttctttcctgcaggaattccgaaagcctttgacatatattatatacaatgcgtctccaaaaaaagaaatacaaacagcggttcctaaacatatttggccatggggcccttttgaaattgagtaacctaccaataccttgctgtacagagtttgtgaaatgccaaactagaagtgactatcattgcacttcggatcctatgtcattgatctgttgattctctctggttcccaacagatccataaaaaggaaacggcattcctggtgggaggccagagagatcaaacagtggtggaacagaatgggtacaggagccctaacctgaccctttccttgggaagtccagggcctctttctcctttgtaaactagtctttattcctacaataacctgtgatctgcccttggctgtccaaataagaataatgctctgagtatgagtggcattacaagggcccccctgtttctgtcgtgttctgaaagaccccacttgtcatacagggtctggtttctttcttggcctcaggaccccactagtggccgagtgtgatgggggcctttgcctgcctggtctaagggcgggtcttgagcgtggatggaactagcgtgggcaggtggcgagttcccctggctgggatttttctctttttgtttgtttgcaaaacactgttaaaagattattgcctcctatattgctgaggtctgactacagtgtctgcgtttgatggaggtggggcaaggcctagagggggcctttgcccaaaggtgagccaaacactagtaagaatgtgaaaactagccactcgcagacatctcacttggttatctggcaggtaagcaggcacgtgggtaggcagagggtgtgatgcccatcgctcaggcctgttttgaggaacctggaggctctcaaaggcccacctcacagtcagacaatgctggaatgtcacggtgaaggaaaatgggaacaaatatagataatcggt

SEQ ID NO: 474840 - DNA, 1000 bp, Homo Sapiens; identical to SEQ ID NO: 343605

SEQ ID NO: 474841 - DNA, 1000 bp, Homo Sapiens
tttttttttttttttttttttttttttttgctgtataactgaaatgtattttttcatttataaagtataagttatctttaataacacacatgtacaataaataattcatatatgaaaattctcatcagatagcttcatgctttgtcagtggaagaagccacagcaccagggaaatcagaaggcaatcttagtaactcttctacctcttcttgcagggcttctgctttttcatgcaacagcatctttgctgatgaaacaatttgcttggcttggcgtcttgataaatgatcaattgtccttacgagcacttcaggatttgcattagctaagtgcattagacttttgtaacctgcactgtataactgttttgctcgaccctctaaaactccagtaacttccatgagagggattaattctgcctttacacagtaagtcagcttcttggtaagttctaccaaaagggctctgtaaacccaaaactcctcaagctcctcacagaaatgtaacacacaagatgagaatgaggcagttccagtgagaagattttgtatatatcctcgaggcatattaaatttttcagatacagtccaaatgttggtctctttgagcaaggtataaagaacaaaagacagatatagcctgttgacaacgttcttgtccaccttctttccgatggcttggcctgatgctttcttcccaataaagctttcagagactccaagaatggcagctacattttgttctgctggactgagttggctaaactgcctgaagtatatcatccaatcagggttacactgtgaaaccagatcatagggggttgttaggtagattagatgaagaaggctttcaagcacaagtccttcaagacctttcttcaagtctctgtacagaatgtcacaataagctaaatctatagttcccttaaatgaagcacgtcccaactttgtaatatgaaaattatattggacctcttcttcagacttataaatagtgtctt

SEQ ID NO: 474842 - DNA, 1000 bp, Homo Sapiens
ttttttttttttttttttttggcatcatagaaaaatcttttatagatcacaagggagtacaagaatgggtttggcaaagttaagagaatgaggagcatgtcagtccctctccaatcaataagagaaggctaaggaaagagtccttccctatgtagactgtggtttaccccattctttccattcccagtctaccatttcttgggactcaggttccagggtttacatttgaccctaaactttgggcttctaaatctgtctgggtgctttggtgtcaccctgagggataatctaatgtgatgagatgaacccagctccattccataggcaggcaggtcactgcaggacacagggatctctgaactcctgggctgaggatgatttgctccctgctgtagaatctgccattccttcccttagctggttcagaaggtctctgctctcactgggaggcaagttactcaggaagtatggaggggccaattccaccagcatctgtggttgaatctcagaaacaatggagaggcagttgtctttggatatggtgaaattgtggtagagcacccatggtgggggtctggcaggagctctgcggcttcggtagcagcagtatgaggagagctgggccacatgcttatgggttaggagaaggtaatttccagtcccgtctgtgtctctggccaccttgagaaagtattctgacaccagtgctttctgaaggtctctgcgattctgctcagagccaaaggctggtagggacaagggaagttcaattcgttgcatgagttctaggagttctccccgaagtttatgggcttggcacaatgctgcccaattcagacctcgagcctggcaccaagcctcatctgctccactttgtataaaggcttcatacacctggatcagagaactgtggtcaccatccgtgtgttccagggcccgacgcagggcagcttcttctgcactgagtggaggacgggtaaacccaggggcagctgtgagc

SEQ ID NO: 474843 - DNA, 1000 bp, Homo Sapiens; identical to SEQ ID NO: 246579

SEQ ID NO: 474844 - DNA, 1000 bp, Homo Sapiens
ccaaggaagggtcctaattcagccaggctgacctgagggcccaggacaagaaactgggttcccaaactgctcggaggtgactgaccctgttaggaccatcccatgaaaatcaaagtgccaggtttttttctgtgagctttgactggagaaatccaaatcagagccttccctcctaggctcacccaggcatatcagagtgggcagttagaggcccatgtcccccgagtgttcagaagggaactgagtcctatgaggtggccaggccctgccagtagctgccgcaaaggcccgggtgccccaggtctcagaagtctttggcctcctgcctactacttgctatgcagccatagctgctcaaacgaagcagaagaacttcttccagcggcagcgggagagggtgcgcacacctttggcattcagtttcttctccagccgggctttgtgctcaatggcactgagaatagccgagtcaaatacttccttcaagttcttctgcgtcaaggctgagcactcaaggtagcagcaggctcggatcctctcggccagaccctgagcctggggttggggcacggggccctcccggcccccctggtccagctgaattagtacgttgacatcgtccctcaggtcggcctgggtgcccaccagcagcacaggcgcctgggggttgtgcgtgcggatctcgggcagccatttctctgtgatgttttgaaaggagctgggctgcaccacgctgaagcacgccaggaagacatcggtatccgggtagcaaagggaacgaagtcggtcaaaatcctcctgtcccgctgtgtcccagagctcaatgcgcaccggagctccatccaccaggacttgcacagagaaggtgtccagcgcagtgggccggtagcgcgcggggtacccattgcaggtgtagctgacgatgaggctgctcttgcccacggcgccgtcgcccaccagcacgcacttgatgcccagctctgggggcgcgctacgccgc

SEQ ID NO: 474845 - DNA, 1000 bp, Homo Sapiens; identical to SEQ ID NO: 343606

SEQ ID NO: 474846 - DNA, 1000 bp, Homo Sapiens; identical to SEQ ID NO: 343608

SEQ ID NO: 474847 - DNA, 1000 bp, Homo Sapiens; identical to SEQ ID NO: 343609

SEQ ID NO: 474848 - DNA, 1000 bp, Homo Sapiens; identical to SEQ ID NO: 340113

SEQ ID NO: 474849 - DNA, 1000 bp, Homo Sapiens; identical to SEQ ID NO: 343611

SEQ ID NO: 474850 - DNA, 1000 bp, Homo Sapiens
tgagaaaaacaagttcaactttatttgttttcattgtttcccctcctttgcctgaccccgatcaccaaaagatgtgcagtgtgtggcgctccaggtctgtgcagggccatataaagtgtctcggttaatttttttgtttgtttttcatgtttgtacttcagacattctagaagtgcttaggtgataacatttacccatcaatttgcattgctggctcaaattctgaagtgaacaactccttgtataatggaggaaaatgaagtcgcacaatgtctgggtatattgctttaaatgccattagcttttctgtatgtcgtccacataaggctcttaatgtagacaccttgcatattaactttgttagtattccatcttctcggtgattcttctgtaggacgtgttgaagagctagctgaattttctgttgcagtttttcaatttttaccttttcttgcagccatgagcgatctgctgacatcagtacaaatgcagaaaataatgcaatttcatcttcagtcaggtgcatagaacataaactctttccaaattcaaacacaaagctaataaagtcttcacaacctaaggatttgaagacgtcggggctggcatacttcccatcaaagtacacggtgttgttctgagagtcaaaggcacggcacattctgataaacaccacctctagagaacctgcttttagaagcacaatttgatcattttgacacagttccataaatccatcaatgcgtttggcaaactccaccacatactgtatagcttctgtaattttgatggcacacaattgccacatcacctcccgctgcttgttttgatagttctcaatttcttcctgtaaaaaggtctgccacgttatctgctggagctcttctctcaagtattggcaggtttccagatgcgatttagatatattctgtgcaaggtgttctaattctgccatggacacagttggggaagtctcgccgttggtgaacgaacagtaggg

SEQ ID NO: 474851 - DNA, 1000 bp, Homo Sapiens; identical to SEQ ID NO: 160653

SEQ ID NO: 474852 - DNA, 1000 bp, Homo Sapiens; identical to SEQ ID NO: 160654

SEQ ID NO: 474853 - DNA, 1000 bp, Homo Sapiens; identical to SEQ ID NO: 343614

SEQ ID NO: 474854 - DNA, 1000 bp, Homo Sapiens
gaaacatctgagcactatgaaaagccaatttatggtcaaggtgggttacatctcacacctgaaatggggaagtagaaacagttgcgtttgagcatccctaattgaaatgctctgagatcagaaaatttctgagcactgacgtgatgccagaagtggaaaattccacacgtgacctcgtgtgacaagtcgcaaagcaccaggcatacaacagtttatgcagcgaccctaagagaaaaaaaaacccagccctcttcagctgcagtgtatcttcttatacaaaaactctgtttcatgcacaaaattatgtgtatgaggcatatacacgaaacacaggtgaattccacgttcagacttgggtcccatccccaaggtctcattatgtgtatacaaatattcaaaaaatgcaaaacaattctggtttcaagcatttcagataagcaatatatatatattctattttgttaataaggtatacgatttgctttctcaaaaatgccttttctggccagacacagtggctcacaccagtaatccctgtattttgtaaggcagaggtgggagtatcacttgggcccaagaggttgtggagagagctgtgtttgcaccactgaactccagtcagggcaacacagccagaccccgtctcaaaaaaaaaaaaaaaaaaaaaaacaaaaaacagccttttttcgtggtcttagatgattatttccttccttaggaaaaaatgtcagtcttgaaacaatgcaggattgtaatgtcataaatccataaattatttatattaaatgaagattgtagcctggattgatacaaagtagtgaaaagccttgctccaacctttttcctgtcgtgatccacagtgcttaatgtgggcaacattaaaggcatggaccgtaaaggaaagaaggcagacgttatgcaaaacaactgaatgtagacaattgctgaggcaggtgcttaggaccaagtctggcctatattgcttgagggcaaggagcca

SEQ ID NO: 474855 - DNA, 1000 bp, Homo Sapiens; identical to SEQ ID NO: 474854

SEQ ID NO: 474856 - DNA, 1000 bp, Homo Sapiens
tttttttttttttttttttttttttttttttttttttttttttttttttttttttttttttgagcagacaaatctttattcctgaggctaaaatatgcaccagttccctccctgtaccgcgccactgccagcctgactgcatgcaggccctgtcccagacctggagcgctgaacttggagtcccaggacctccttccctgagttgtgtgtgtgtacatggaggggactcctgggtagcacctggaggcggcctaggggtgaggggcttctcaagggtgccctgcacctccagaggtgcagtcttgggcaggatgtagcatgttcagagtctggtgaccgaaacagggctgtcggggacaggcctcgggtgttggagggcaaaggtgacagcatcatggacagaggcaaagagatgcttcttggtgatggatgcatcgaagaagtgcccagcctcaagctggctgaccacagggctgtggcaggccgccatgtacacctccacctcaatctcccggaagtcatggaaaatattcttcaggctcttgaggcacacagtgtccacaaaggagagggcacccaggtccaggatgaggctgtggaagtctggctgaggcaggcccagggccttcagtgtggacccatctggggccttggagtcttcttgaccattggctgttgcatcttccatcttatctcctgagctcacctgctggggagccagacatgcagacaaaaggggccctgcctgtttccgaagcttctcctctttctgcagttgcttcagcttcagctgctcctgcttcttgagcagtttcttcttctgggagatgaggaagtcgacatccacaccacacctctgcttcagcgcatcactgtagaactcagcattggcaaagtacacggtggccgaggagcggaagaccttcaccccccggacttccttggcctctgagtactctgccacatctctgtaaatatccgtgtctggcacctgccccag

SEQ ID NO: 474857 - DNA, 1000 bp, Homo Sapiens; identical to SEQ ID NO: 343617

SEQ ID NO: 474858 - DNA, 1000 bp, Homo Sapiens; identical to SEQ ID NO: 342745

SEQ ID NO: 474859 - DNA, 1000 bp, Homo Sapiens
ttttttttttttttttttttttgagaccaagtttcataaagtttttacttggaaaaaaaagttttacaaaatatctttccaaagaaattttcccatagagtacaattaattcatgtagctttcttccttaaagattacagtatgacattcagaggggcgaggtttcttgaatagccaactagccgcaaaacctacaagagaagtagatttttttaaagtgcctttaaaatgtgaaagcaagtaatgtaattgttgaatctatttgaaattttaaaattttctttaaaatggtccatatggtatgcacaatatcacagctggcacaaaactgcctgtatttagtttgaaacacaaaaacaatgcatatgaacagtattctttgaaaagtaattcaaaatgctgccactgcatcataaaggcaaacttagataagagtgttgacagtattcagagaattcacaaaacaagctgatattaaagtattcagacagttaccttgatttttttcaaataccacgggtaagggtaaaagaacttgttgccaaagtaactcaggataccttatttcaaactacatgtaacctattttgctatagatactctaaacaaatgaacaactaggttttaggatgtaaattcccatttcctagacagggcctagtctttctgttgcaatctggcagctttaaactttgaaaccctctttccagtttcttcagatgcttccaacagaacttcctttcgttctggaatagtgggtagtgcgggatgagcaatggctgggggtggtgttaaggaaggtgatacaaattctttttctataacagttccagaaaaagcctcaggtgttactgataagggcaaaagtttcttttgattttcttgtggttcctcttccaaaatgctctcactggtgtcactgcaagtggcttcttcgcagctgatactcctcaaaactccccgcctatcatcaaattcagcagcactgctttcactagtg

SEQ ID NO: 474860 - DNA, 1000 bp, Homo Sapiens; identical to SEQ ID NO: 343620

SEQ ID NO: 474861 - DNA, 1000 bp, Homo Sapiens; identical to SEQ ID NO: 343621

SEQ ID NO: 474862 - DNA, 982 bp, Homo Sapiens; identical to SEQ ID NO: 343622

SEQ ID NO: 474863 - DNA, 1000 bp, Homo Sapiens; identical to SEQ ID NO: 160655

SEQ ID NO: 474864 - DNA, 736 bp, Homo Sapiens
tgatcctttacagtttaataacagccagtgcacaactcaatcatatgagccctcatctgaggtttctgcccacatgctcggcctccagacaggaattgttccagagctggaaatagtttatccagggcatggtgtatatcaaagactcgcaaattaaactctttctcagcttcttgctttgcagggggcaggaagaattgctcgtgtcattcctcttgcatttggtccagccaatcttcacagtgactatatactccactcccgtcgtcagctgcatctgacttcgaattagcctctggactcgatataagtaggtgtcgttgctggcattgttgtaggattgaatgaagaagttgagtgttgaattcatgttcttcttgctcatgagcttctgctggaagccctcccacctttggaagtgacccagcttggctgacaggaccagggcaatcagcagcagcagggggtttctccagcatccgatccccatgtctacagcctcagaaactttcttcccaactgcaccttccagggtgtggtggtgccaggctgcagttcactcattctcccatcataaccctcaccaacataggctttcctgggggatggcctgccttccttgggttccaactgtcttacaaagccaccacctgttccctgtgcttcctttacagacacgttctccttgctcacctgccgcccgcccaccacagatttctgcttgcaggatccccct

SEQ ID NO: 474865 - DNA, 1000 bp, Homo Sapiens
tttttttttttttccttcagcaagcctcttttaatgatttaaaaaagaactactaacttttacaaataattgtgttcagagacagactttcaatctaaagaaaagatcaaggacctagctctcgtggcagaatgcagaaacagaagcctccagattgatctctgcagatgctaacgtggcccactttgtcctcatattcagcctgatcctaaagcccttacaactaagccaatacctgcttggattcttctgacaactggcaaagatgtcacgttccacttcttatctcaccacctcttaaccacaaattggccccagtggctttcaaaagggggaaaaaattgtgcgagtttgagactgtttatgtattcatgactaaaaccaaatctgagatctttggaactcttagctggccctggggcatgcgagccgcctgtgcatccctttggtccacctggaggcccgtgaagaccttcagtggaaggaagagtgggtcagatgagacgtgtccatttcatcagtcagccatcggtgacaggctgaattcagagacccaggccagagtgtaccagctacaaaatttatccaaggattccaattatgctttaaaaaattctaccagaagaagtaaaaaacgatgtttatatgttaagaaatgtaacagagtagctctcatttgataatataaaatagctctgcctctattcaaaacagttgattttaaaagtaggtatatagtcgctatacttattattatttttagattgctttaaaaagcatatgcgtccctatctctttggcaagcacccagcggtgagtcacgccctgcacccgcagcagccgatctgagaggctcctcagggagcctccgtgaacttttccaaaccctccatgcgggccgcacacaggatgcccgtgccgggtcgtttcccatcagcttccagccacgctgcttgcttgtagctaaaagcaagccagggatgcccgtgtcagatgaagc

SEQ ID NO: 474866 - DNA, 1000 bp, Homo Sapiens; identical to SEQ ID NO: 343624

SEQ ID NO: 474867 - DNA, 1000 bp, Homo Sapiens; identical to SEQ ID NO: 160656

SEQ ID NO: 474868 - DNA, 1000 bp, Homo Sapiens; identical to SEQ ID NO: 343625

SEQ ID NO: 474869 - DNA, 1000 bp, Homo Sapiens; identical to SEQ ID NO: 343627

SEQ ID NO: 474870 - DNA, 1000 bp, Homo Sapiens
tttttttttttttttttttttttttttttttttttttttttttttttttttttttttttttttttttttagctttctttatatttttattattatttttatataatataatataattcatcactctttccaggcttcattctacaagtttcgttagaaatcagcctctacccttgtgaacaggttcggtcaaactgccatttttctccaggatgttagaattatacagagtggcaagctcaagtgtgtgagatggaggtaagggtgggagaggcatctggggtcatggggcatctcttcacacaagtggctgatgagatgtctagtggccagactcaaatggcttcctcagaccccacatttctcagcttcctctatgccatgctccaggcatgggaatatttgttttgctgctggtggctctgtctcctggaagtatcctgaagctgttccctgtctagaggttgatgtctccttgtgagtttggcagggaagctggatgcaggtactatttctagaatcccatagacttctcctgcttttattctccaacccccagccccaaacagatctgattctagaaggcagacaatctttctctgttcatgtttctgatgcagtttcctttctatgtcccaatcttctcctcaccctgggatcagcattcatgaacaaactccaagaagacttgagccacttctttttatgttgctactccccatcccttcaggccacagttatgtgctttctttggagtgggataagaaggataacacagaaaggaaaaaaatttgaaaaatatattaaaataccctgccacagaaggaaggaaagcagcagaggaaagaggaagggattcttttttgaaattaaactaccctttcctccttttctgaatgaactggctatacagtgaaagcacaagggtttgtagcaacctgcaggatatattgatcttgttctttctctcaaggttatttatttacttattttaaggggcg

SEQ ID NO: 474871 - DNA, 1000 bp, Homo Sapiens
aaatttacaaaataaggattttacttcaaaaatcttatttaaatattagaatgttatcctggtctctttcatcgcttttatgagacctgaaagaaatttcacaagatacaaggcttttaatactcagacagattcagtaaaacaaacaaataagacaatatgtaactctagggcaactggcaaattaaccatttgggagaaggctggagttagaatcttgtcccacatctgaactctccgaatggtgattatgagtaacagtctgatgacagataaaccttgattttcatcctggtttcccatttacttgttacgtgaactggaaaaattaacaaaacttcttcgtacctcagctcttctcacctgcaaaactaggatgtctgctaaaattggctgttgggtgggttaagcaaaacagggtccatagtgcctatgcaaggtaccaggctcctcagaagtccttgatgtctgctggctcagcagcttggtaactagaaatgtccactaagggactctcttctgtccttgcctcccctgtgttgttggatgttttttccagaagggggagttgtaggctgtcggacaaaccattaatcttcatcagaagttcgtctaacagatttgcaaattcatccaagtagtaattgtgattctcaaccatctcagcctcttccaactttggtgtttccagtctcagaaaggtgaggaccttttcccacatataagcagtgacatctttaagtctcacaaaagatttactttgaaaagattttcttttttggggtaaagtcatgagaaaacctctcagcattccaaaacacagtgtggcagagactattaaaaggatcccaaagtaacaagccatggcccgctggtcagacttggaaaggccaaggaggcagtctttttggcttcttctgggaaaatgaaacagcagcccggggaaggcgtctgtgaaggtgccaggtggtagaacccacatagagagcagaaatcggtg

SEQ ID NO: 474872 - DNA, 1000 bp, Homo Sapiens; identical to SEQ ID NO: 343628

SEQ ID NO: 474873 - DNA, 1000 bp, Homo Sapiens; identical to SEQ ID NO: 160657

SEQ ID NO: 474874 - DNA, 1000 bp, Homo Sapiens; identical to SEQ ID NO: 343630

SEQ ID NO: 474875 - DNA, 1000 bp, Homo Sapiens; identical to SEQ ID NO: 343631

SEQ ID NO: 474876 - DNA, 1000 bp, Homo Sapiens
tttttttttttttttttttttttttttgcttggaaaaagaaaaaaaatatttaatggaatctgtgctcaaataatatgttacaacaaaaatatacagaatgtacacaatacaaaaatacttagaaacaaacattgcagtctgtgttttgttttttccacttactcaagtcctcggaggggcagttcactgttgggcactgtttttaaggcagaggagaaccgtgctttccagccagcacggggagcaacatgaatgatgccaggaaaggctttcacggcacccagggaatctgcattacgtatttgcaaattaaattggacgctgggggaagatcctggtgtggtgagcaacagctcccctaatcctctgggcaagaatggttctcatggaaatcgagagtcctattagctggcaaaagagcctcattagggagcttttcctaattaaaaaacgaatgatgaatggtgtcattaaagcgaaatttctcctttgaaggtttgttttcccttccccagtttctgtgattcctctcccgtttaatgagagccagtgagtctatggctgctgtttggggattccccagctttcagtttctgtatcctgtggataaaaggccaacctacctccaccagcctgaagatttacacaccaccccctgggctggcagccacctcagacaaggaaagaggcacagaggacacggccagccttggccatggggaagtgctgctgagagggtggtgggacctgctgaggagaaagccagatgccacaaagagaacccctctgaccagacagctgcctcctgacctggggagaggcctgggtcaggtgaagtgaccctatgaccccaccctgtggccccgcttggaagtcatggttgggagaggggatggaggtgggtgtgctgacagagaacagctggggctggtggtctaaggtgtagacgagggtccttggcagcagaggacacacttaacatggtgggagacacgattc

SEQ ID NO: 474877 - DNA, 1000 bp, Homo Sapiens; identical to SEQ ID NO: 343632

SEQ ID NO: 474878 - DNA, 1000 bp, Homo Sapiens; identical to SEQ ID NO: 343633

SEQ ID NO: 474879 - DNA, 1000 bp, Homo Sapiens; identical to SEQ ID NO: 160658

SEQ ID NO: 474880 - DNA, 789 bp, Homo Sapiens
tttttttttttttttttttcgcaaatcagcagatttattgaggcagcagcggcagtggggagcaggggtgtggggagggggcggggcctccccagggtccatgaagtgctggcctttcccaggcatgcagtgtgcgcagccggagggggatgcgcagggactgcgctgtgggcgccgatggtcagccatggtcagtctgtccgcagccagctgcccttctcctccacctccttggtcactaccagcagcacctcgcacaggccctgggccagcgcagccgccaggaaggccctgactccgtcctcatcccccagggcctcgggcgcccgcagcttggagtccaggttgtagtagacaccgtccacctggcgcagggccacccagtgccgccggcgcagcggcagtgacagcagccccagcgacacgggcgagggcaggttcaggatcagccccagtacctggggcagggccagctgggacaggggcctcctcctgtcccaccacacggcggccaggcccagcccctgcagagcggccatgatcacattgacatcatagttgccggtgcccaggaggctgcgatgagggttcagccgggagtctggggccaacctcttgcagatctcatcggcagcctcctggctaaagagctgctgctgcagaacgttgttgagggcgtggacagcacacagctccaggcgctgccgttcgtggtacacggtgggtgggctcggctgtgctcccggggcctgggacatgccgtcctcggctcctgcccagccacggcgc

SEQ ID NO: 474881 - DNA, 1000 bp, Homo Sapiens; identical to SEQ ID NO: 343635

SEQ ID NO: 474882 - DNA, 1000 bp, Homo Sapiens; identical to SEQ ID NO: 345646

SEQ ID NO: 474883 - DNA, 1000 bp, Homo Sapiens; identical to SEQ ID NO: 160660

SEQ ID NO: 474884 - DNA, 1000 bp, Homo Sapiens
ttttttttttttttttttttttttgtgattcaaggttatagctttactgcaactcaggacagtgagcccaagccaggtgttgggctgggccccagaacaaggctcaaatgcggacttggacacacttcgaaggagggctgctctgcccctgctgttcgggcgtggggggtggggggcgggggccactgagctgggccttctgtcctcctccctggatgtgcagacatgggccatggcttctgccaggactcacatgtgagctgggccttctgtcctcctccctggatgtgcagacatgggccatggcttctgccaggactcacatgtgagctgggccttctgtcctcctccctggatgtgcagacatgggccatggcttctgccaggactcacatgtcctcctcactgaacaccagagacacctgctaacttgggaagacgcagggtgaggatttctgtttctccagcccagcctgtcaccctgtgggaagcagcgagtgggaagggaaaggggaagtcacatgtttctcacgccgagttccttccagaatcccaaagaaggctcagaaggttgtgaaggaagaacaaagtcagctcaggtgagacaccccttccccaccctctacactggtgacacacccaggatttcggggataaaatggggccatgagggatgtggccaagcctcccaggaaccagcaaagagcacgcctgagtccagcagatgctcgcagggctgtgacgtccggtgcaagggcacgtttcagcactttttctgagggccaaaggctgggcgatctgattagctgctcccaccctagagacagcccgacagcctcggcacaagagcagggctgtaggaaagccatcatcaacaaagccaggcccagagccatcccacctttccctgcaggcttagggttttgagctgagacaggggcagactgtagcccccagtccctgaggttgctacttaaggagatgcttttgcagtgagggg

SEQ ID NO: 474885 - DNA, 1000 bp, Homo Sapiens; identical to SEQ ID NO: 343638

SEQ ID NO: 474886 - DNA, 1000 bp, Homo Sapiens; identical to SEQ ID NO: 343639

SEQ ID NO: 474887 - DNA, 1000 bp, Homo Sapiens; identical to SEQ ID NO: 343640

SEQ ID NO: 474888 - DNA, 1000 bp, Homo Sapiens
tttttttttttttttttttgaaaataaagcacatttattaaggcaaaggccaagctggccgctcagaacatggccaaggagcgtgaagggattgctccactttaccaccactcagggcacccaggccccaggggtcctgggtccaccccaggccagcagaagctatgaagcttacgcataagcctggctctccctcttcacgaaggcctggaagaggccgcccagctcccagaggggtggggcccactcgccggccagcagcccctgtgtggcctcgaggccttcctgctccagatcctgctgtttctgctggagctgctgcccccgatcctgatctctctccatcagccccagggctgcctggtgtccacggtagagggtatgccgacgatctacctgagtctggaatcggggcagggtccgaacagggtcttgtgctccaaaagtgggggacagcacctggggggcctgggccacccccaccccgaagatgaaaggtttgaacacagacctggatgggtctggcgtggcggtaagaaagtgcacgcagggctgcgtgggatcctggggcaggacagacaccatgctggccgtggtgcgaaagcctcccgagtccatacagataccactctccttgtctctgaggatgcccatcatcacctctgccgtgatgcccccttgccgttgccgcagcagctcccgccctgcctggaagcgggccttggcagcctccatgcgcacaggctgctgggtcagggagaagatctgagcaaagtcaaaggcaccctgcccatcccaccagcccttggcctgggcatgagtccgcagctccgggtgttgggccgagatgtccgtgccaatgctcagctggttggagatgttgcgggccccctcctggatcctctgtgcagcccagagcctcccagctgtctccagcacccacgcctcagtgcggtcagccagcaggaaggtgctatggtaggagaatggcgcagcatcc

SEQ ID NO: 474889 - DNA, 1000 bp, Homo Sapiens; identical to SEQ ID NO: 160662

SEQ ID NO: 474890 - DNA, 1000 bp, Homo Sapiens; identical to SEQ ID NO: 343642

SEQ ID NO: 474891 - DNA, 1000 bp, Homo Sapiens; identical to SEQ ID NO: 343643

SEQ ID NO: 474892 - DNA, 1000 bp, Homo Sapiens
ggcgatgattttgtttttttattctatacaagaggggagagagtccctggggatagagggacagagatccaccctcctgggggaggagataagcccccacccagaagctctctgcagagagaggtatcgaggcaggcactgacagcctccgtctctccaggtggctccctctgttctagtccctgcctccagctcccccatgcctggtcctgccgtcttgcccctgtaggacaggggctggcagggggccctggggactgggggtggataggggtctgagtccttgcgaggcacatgtcgagggctgaggagggtgttgtggcagttgtcagtctgttcctggctcactggttcctgtggggtcaggaggccgtcttctatcaggttccagcttgtcacaggactgtgcccgccgtgtcctcttgggcttcaggggggcagtccgccggcctggatcagggggcccttggacttcgggctcctcttggtcttgctgtgagctcagcctcagccggggtttgttgactcctggagctgcatctccagcctcagcctcctccctgacccctggctcctggggaggctggcggcccctgggcacagccactggcttgggaggccatggagctagagcggggtcctgtagcttggcattcctagctggaagtgtcctctctgggaagagggtcccctccttctcctcttccccatcttgggaggctgggctgggactctggcagctgtggttgggggcactctcttcagctatgtgccatgtggcctctgctctgcgcatggcgctgaagcttggtttggtgctttggggcggtggtgggggcttccaggatccaggccctgcgtcgtctgaagagcgccgtttctgccaggcctgggtgctgccctcctggtctgggcctgggccctctcgtttcccatcgaagctccaacccttggctctttccaacccgggaagggcaacaccgtgaacccttggctgctg

SEQ ID NO: 474893 - DNA, 1000 bp, Homo Sapiens; identical to SEQ ID NO: 160663

SEQ ID NO: 474894 - DNA, 1000 bp, Homo Sapiens; identical to SEQ ID NO: 160664

SEQ ID NO: 474895 - DNA, 1000 bp, Homo Sapiens; identical to SEQ ID NO: 343646

SEQ ID NO: 474896 - DNA, 1000 bp, Homo Sapiens
ttttttttttttttttttttttttttattatgaaagataagccatttattgaccattcacttttctaaaaaaacacaaatgtgagaataaaataaacatacctaagactcactggcccctccaggacaggaagcagccctggacagagagcctgcaaacgagtttccttatgcctaatgtctgaacttctcatacattctaggatttcatgtttcgttacaaaggaaaggaaactggctagaagattcatgtacaagaaggtcacaactttaaagctatctgacgctaatgacttgtacaatctggtttgcaaactctgagagacagtatcaaataagcactgtcaaagactactcccagctaatctttactgtcatttttctttgaaattgtctttgggactggctatgttctcactgtagcttccgtttatcccacagcacaaaccctaaagtccatgtgcagtctccatgttcaagtataaaagtctgtttcaggacaaccctgggttgctgtagtgtttctctctctgtagtgtctacttggtgtcatgcccttggacaggctggccaaatggcagcacaatgcagggggtgacacggtcaactctcccactgccgaacttgctcccctttcaatctggtcactgcccatggtcaaggttgaaatcttgagatcagtgacgaccttggcctatcttcagtctgaagttgcactcttatgtaaccgaatccatttcttcaccaaaaattagctttcaaaaggtgtctggcgtattcttaggaagtgtcctgagatggagctggagggtcctggccttcgggctctggagggggtgctggcacagctgcttttttctgggccgccaggaactcatgaattgctcgttctatttgtggcctgaagatgtggttaagttttggatccaccacctgagaaataatcctgtctactccagcttccaacatccctgactgaaccacactctgcctcagaccat

SEQ ID NO: 474897 - DNA, 1000 bp, Homo Sapiens
ttttttttttttttttttctgtgcaacttgtttatttccattttatttttacacaaaggcaaagagaataggagtgaggaggcaggaataacgctgggtcactcccaggaagtggggaagaggctgcagccaagaagaatgagtcaggctgctcttccttggctttcttggtaacagcaatgaacaaaaggaagacgaggcatggactccaggcttaagttaacaaggtcagtctgttcaggccaagcaatggaaaggaagtgtcagatctgtccaatccatgttcataaagaggaaataaggcctaggtccgtctattgaggccttggctcaggattggctggggcccttctctttgaaggtcgaggccgctgtccccagggcgtataggggccacggggacgatacctgccaaaacccctatgtaccactggggcaggccgctgataacggggtgtggggaagaagggcataggcagctgaggaccaaccataaaattgtcttcgacgaagaaacctgcatgggctgatgaggggacatctgaatggcaatagaattgatccgactggaaagtatggtctgaggaaaaacaggcatctgggggaccctgtgggaaccggggcattccctggtgatggagaatgggaggaggaggctgtggggacaggagcgggagcagcggcaagcgctggggtgggaacccaagcagggggcggtatgtgggggaaggtaagggtggggacagaggtaaggccgggtgatttctgttggcctggggcggcccttcgactctcgggccaggttttttcttcttgatccactcgcccacggggtggcggtggggcagctccacaccccaggcgtcggccacgtgggccagcagcagctgggagaggcagcggtgcacacgtccattccagtgcaccccgtcccagtgcaggttctccctcgcgtggcggaagtggaaatgcaagtccagtacatcgaagttatgtttac

SEQ ID NO: 474898 - DNA, 1000 bp, Homo Sapiens; identical to SEQ ID NO: 343648

SEQ ID NO: 474899 - DNA, 1000 bp, Homo Sapiens
tttttttttttttttttttttttttttttttttttttttttttttttttttttacaaaaagcaacaagagtttaattctctttttacatggccacaggctctcttcagtcaggggaacttcagctggtgcctctctcttgcagctatgaggcgacagtgtggtgacatgcctcatacagactgtcccagtaagccaggacaagtcaccattaaaatcttgcatgaacagccctgggcacgtgggaatgttaagaaagagccaccgcctccttagtcagcttaaccacagctccaaacgcagtttgtcccagctggcaaacgcctcaaacaccaatcatgcgtcgggctcctattctgggtttttataaaacacttttatatagcgatataaatagcacagtaaatgtgcttctgatgcactctaacatagaggacaggaatacacactgtggggcgccgccccagccatctccacagtggagaaagtgcgagggttaaatacacgtggcggggtggcagacggcaggaagttacagagcgccacgctccacgtccttccacgcgactgactcatccaacactcagaactcgccttctttatccccttggtgggtaggagcagtaacaaaacaatgtcagtcattttctaagggtggaggatgtcaaactgtctggtaccgagagagcaattcttatccagaaatcatctagaaataattgttgaaggtcagcctgacccatggccccaggctaagggctgctctgtaaagggcgggactggctctgggggtctagggctgatgcagtatctctcagacacttgcacattcacacacccacacgccccaggggaaagtgcacttccaatgctgatacaaaaatagattggcacactctttgacacaatgagggtatcttttaaaagttttcccccaacttctgcagactctcttcccccgtatgctcaagcccttcacactccaagttggaacagatctgg

SEQ ID NO: 474900 - DNA, 1000 bp, Homo Sapiens; identical to SEQ ID NO: 343650

SEQ ID NO: 474901 - DNA, 1000 bp, Homo Sapiens; identical to SEQ ID NO: 343651

SEQ ID NO: 474902 - DNA, 1000 bp, Homo Sapiens
tcaaagtattcaagggctttattggggccgccctggctgcccctcacagtgttgcaagaacccgctggtcttgctgttgcctttgctctttgggggcttgagaggaaaggcagagggaggaccaacttatctgggagagagaaggcccatctttggggctaagaccaggtggtgcggaagcagatttagggaggggagggcctacttaggggctggaaggggatggggctgcctcctggagtgtggtggtcacagagtgttggctttgtgggagggaaaggaaagggaggcacacaagaagtcaggaagagtggatgggcggtgcttcctgggcactgaacatgtgcactgcccagggcacgagggccaggactaggcatggccagagggtgtacttgaggaaattgaaaatgtagaagaggctgatctgaggggggtggcccagccagtccagggggcccagcagccccatggccagcacaaggcaggctatcttctggccatttcccagctgtgcccgacgcacctgggcatagcagggagagtgcaaggcaatgcccaggcccagggcagcccctgagtcacggctcagggaggcaaagggccggctatccacgtgtatccactcaggccgctcacaccacttgaaggctaggctgatggaccaagaaagatccaggcccagtgtaaagagggtccaatagatgaggctggtgcctagcatgagggccagtgcagtcaacccatagaagcttagctcccgctccataggcactcggggagtcatcagccagcccaggacagcgccagttattaggccagccagcacctggtgagggaaatgtgctaagatgaagattcgcgacaagccaaccgccaaaaggaaggtgcaataagccaggctaggcatcacccttacccagcggctgcgggcccgagtggccacctgcgaagacagggccgtcattatgggccagagggctgctcctgtgatcatgca

SEQ ID NO: 474903 - DNA, 1000 bp, Homo Sapiens; identical to SEQ ID NO: 343653

SEQ ID NO: 474904 - DNA, 1000 bp, Homo Sapiens
aatcagactttatttttattttctttgtcttcatttaattgttcatatctctgctaatgcaccatagagcaccaagattaacactaaaactgttgggcactttttttttcttgtcaagctaataatagttatttaaaaaaaaaaaaaaagagagagttcctctgaaggtggagctcagcaccatacatcaggcaaatgtcctgggctctctgtggggagcatgacaaactcctctggtttgattcatcgcagcagttctctcaacagctttgttttgagacatgaacaagaaaagagcaccagctattcttataaggacccaaatctccaaattctgctgacctcttaggagttgatattttgaaattagaaggacacccttaggagtgatttttttttttaagttcagagtctgttaatctgtattaatctagtttacactccctacaggccaggtagacacaagtttctcagcacagcaaagatcatgtctgtggttaaactcagaaaggtctgagggagtaaagctctgagtgaggttttgccaaacaacagaaggctaaatctggcttctttgtacttagggctactgatcgctgttggaggaaactttggcagatgcaattcctcccttcctggtctttaatctaggttaaatatcaccacctcgtcccacctccaccaccaggacaaagagttatgctactattataaattgtactctcctgtccactattcctttccaaaaacaaatcacatgacattacagaagcttaattgcaaagtacgtgaggtgctaatatcgatgtatagcatattcaaagtatatgtagctaatatctatatataaattctctgtgtaagattcaggcctaaataaataaatgaataaacaaatgaatgaataaataaataaataaaaccatattagcagtttgggggttctgaatgtatttaaatgatcattgtgaggcaaagattctgacttgcctaccaagat

SEQ ID NO: 474905 - DNA, 1000 bp, Homo Sapiens; identical to SEQ ID NO: 343654

SEQ ID NO: 474906 - DNA, 1000 bp, Homo Sapiens; identical to SEQ ID NO: 160667

SEQ ID NO: 474907 - DNA, 1000 bp, Homo Sapiens; identical to SEQ ID NO: 343657

SEQ ID NO: 474908 - DNA, 1000 bp, Homo Sapiens
tttttttttttttttttttttttgcgagaaccgggtagtgtttattgccaggaggacacccgcacagcctccggaccccagagggttttgacacaaatgacttaaaggcactggcttctgtccagctccagccctgcccggcagggcgtgggggcggagaccccatcaccacgcagcctcgacccgccccctcctccagggctgcagctccgcccagtggctgaagatagcaaacgccttgcagggcgaaggttcccaggatgcagtgagtgggggtggccccaggatgcagtgagggggggtggccccaggctggcggggaggtggagtaagggggctctttccgcggaagggtgagggactatgagacgctggggggcaggcgggcagccgcggtcttctccaccacgaagccgtagttatactcctcctcaatgtccgccagagacttgatggtcaggtccccaaaagcagagaaggccagggggctgcagctcttgccctcaaatcgtgggtggagtgtgaagggaaccccatccatggctgagatgccatagaggctggaggcctcgtagatggagtcattcctccgcagagtggatgcccgagagcccagccttgacgctgtccgctccaggaggccgcccttacttggctggctggctgcatccagagagaggccctgcatgtcccggctgagacctcggggcttgggcactggcctcggggccttggccttcttgcaccagatggcaaagccgcccatgtcccctattcgaaggtatccaggcactgtcttggtcttcccactcagccggacatcaaacacagccgtgtccgtggctcccaggggcaacagcttcacacacatgcgtttcttcttggacacagaggccttggaatccatggggtcgcagacgggggagaagcccagcggcagggggctcttgtccaccacgatctggatatcggccaccacgttctcctgcgggttctctag

SEQ ID NO: 474909 - DNA, 1000 bp, Homo Sapiens; identical to SEQ ID NO: 343658

SEQ ID NO: 474910 - DNA, 963 bp, Homo Sapiens
tttttttttttttttttttgacaagctacagcagcaattatttttatgtaacaactctaaaaagttcttgacaagttattatgagaaacatttcatctaggagagtgatttctaaggcagcatttgagtttccataaaaacagaaccttctgtctcagaaggtatatcaataagaggaccagaatcttctatttccaagtgcattggtttctcctgttcacaactcaggtttgaactgtcgttcatttgaatctcttcctcttccaattccaaagatttatctggggctgaagctaccacttcttcgtcttcattttcatgtagaaagttacaaatcatgttgggtcgataggagaaatcattatcctttatttgcagccattccaccccacctatgttttcttctccttccttcttctctgtcaggagagttcttgtcatgctgagcttcttcattgtatggcatttatattttagcactgttttattattgccttctgtatcagcatgttcaacattttcttcaaatataacacaggtccctagagtgtcttcatactccccagcaaagacacagctgtccacttgcagaatgggcctctcagtgtcaatgcccaaaaccttgcatttattttcacattttgagaggaagtctgaatcaataattcctgataattccaccagaaccaactgctcctcctcttcctcgtcttctccgtcctctggactccgctcgtccgccgccgccgccatggtcccgcggcgcctcgccttctagtcactggccacgcccgcccggagccgccatcttgagtacgggcttcagctccgaggcgaagcagcttattgggttcctgccgctccgctcctcgccgcgcaaattgcttctgccagaactcgagatgtcggcttccggcgggcgggtggctacgggcgccgagagcgccggtacccacgtggaga

SEQ ID NO: 474911 - DNA, 1000 bp, Homo Sapiens; identical to SEQ ID NO: 160668

SEQ ID NO: 474912 - DNA, 1000 bp, Homo Sapiens
ttttttttttttttttttaactggccgagtcaatattttattaaaaaacacacaaacacatgcacactggtaacaaaggcagagatggagaggagacacaagatctccttggggacaggctgaccacatagtgtttctacaggcacgcctcacttcaggaaagagggtatctctaagaccggactgacaagctagataaattaggacagggctttgtttcttaaggcacttcactcccctgaggagtgaagtagaagggatttaggcgggagtattcacaaaccccttcagctgtgctaagtggggttcatcagtacctgaggtggttctagaagcaggaaggcagaaaacatttccctggaggctgctttcctttcccagaatgggagggatgttctccccggaaggctggaggaagagtttccggctggctcaggagctcagggagctggcttcctgggagagcaggaagagggtgcaggcctttcctggtgcccaccagcctgacaggactttggcacaggaacacaggtccagaggcctcgcctggagtacacgtcctcctctctgcaaagctcctgaggggcctaggggttgtggcctcatcagacggctgcatctgtggactgggttacacacgagatcttataggacagccatatgcttgccatgcagaggaaggtggccatgaaaccaaagatcgctccggctaccagtccgctctggttgtaactcttggaagctgccacaatggaggcgatgaggaggagcagggtaccgattaaatagtgcagaagttccgacaggggccagctgatacaggtgagcacgcggtagaagcggaagaggtggaccaggtaaaaggcgaggatcattatcaagtcgcaaatggtgaccacttcaaagtagctgtaggcgctgtagttggtccacagggagctccgcacacagatgaaggcaatcagcagggtgaccatttgcgccactttcagcagggccg

SEQ ID NO: 474913 - DNA, 1000 bp, Homo Sapiens
ttttttttttttttttttaaatgagcaagtttgagagtctgcagtttggactaccatgagaattgataggaaggtgggagtcccaggcaatcccaggtcctgtagcagcagctggtggggttcccactccatgccgtgcagagcctgaactcaggatgacacctgcacctgctctctggctgggctctggcacaggaagccctcagcaaacacccccggcacagccatgccatagccagacaacagctcgctgtaccacaccatcatgggagacagcagttattctgagcatctcactgctgaagaaaccaaggctcagagaggaccatgcatgcacaaggtcccacagggacccaagaatccaccaagtgtcagacaacttgcccatgctcttcacggagcaccttggaaccctccccgacaggcaccgctggctctcctgacgtggcctgcaagtgcacggagccccttcctcctcggccattcccagtttagattcccaggggaagcatcagatggcccctctcccctgctggcagcagagcagacggaaccagccagagcccagggcagtgctcacctgcaggccagtccactgcggccagcaccgccccctagaacctactgcgggcatggcggccgccagtcctgggtctcccggctcaggtagtgccaggaagctgcgggcatggcggacagctgtcctcggtctggaggcgccatcctggctttcaaatctgctccagaggttatctggggaggggctgctccctcacagagggagcctctaagcccaccaggcgggcactttcagcccaaagcctccgggccacctcctcatcctcagcctcgggggccggggccttctgtttgagtccatcgaagtactttccggaaacatccgccagttcctccgccacggccaggtatgtgctgggctgggcggccagctcggggctcttgaccagcagccagaagatgggcccgagtgtggtgctgg

SEQ ID NO: 474914 - DNA, 1000 bp, Homo Sapiens; identical to SEQ ID NO: 343660

SEQ ID NO: 474915 - DNA, 1000 bp, Homo Sapiens; identical to SEQ ID NO: 343661

SEQ ID NO: 474916 - DNA, 1000 bp, Homo Sapiens; identical to SEQ ID NO: 343662

SEQ ID NO: 474917 - DNA, 1000 bp, Homo Sapiens
ttttttttttttttttgactattttaaaagattttattagaggaaataatctagtagataactttcttacttccacaaaaacaaagtttctcaaggatacaaaccaatggatttatctgtgaactcggtcccagaatagaaactagcaaaaagtcagtacagtactcaaaaaatacttttgtggtatgaaaaaagggcaggtgcagatgtagaactgtaccatcttcagtttctgttcacaattgttttaaaacaattctcatctatccagtctgctctcccacgcctcagatgagggaagccaatggtcaatgctctgtgatagcccaagtaggatccaatctaggtaatccctgtccaccttagctctgtcctctgagggatttgccaggttgcaccacaatagttctccattctctttagtctgaacttatgctgtaaacccaaggcctggcacaggggtatgcaggaaagtttgagtgaatcagtcacaacagctctagtacagtactgcatcgatatgctctggagacctgcagcctatttttcccagagaaataaagtggagtggagatcagaagccatggcttcccccctacctcctctggtcagtgcaggctctggctcaaatactgaagaaacatgttggccagttgcggcaagttctcattgttgggatgcattttagtgtacgaaataaactggcgacgaaggcgactcagttctgccatggtcaagggccgggtaaaccgcaagtgctctgtggtaccaggaagcgtgagcaagtccccggggacagcgctcttctgcgcttccatcaatccggccagtacttgactcgtgacctggtccaactggtgcagaaagctgccggaggcgaggggctgggactgcgtagactgatggggtggtggggcccggttctcaaacagggcagagcggatccccgccaggggcaacggctcctctaggcccaccaaagtgaataaaggccggtccc

SEQ ID NO: 474918 - DNA, 928 bp, Homo Sapiens
ttttttttttttttttttgacagtttctccactttattagcctggagctcctccctgccagccccaggggctggtcgctggtccctgggcacagtgagcagggctgaggtcagacgggttcggcccttggccatggcagcttggttgggacagccgggccaagggaaaaaaaggtgcaaaagtccaaatgctggcacttcaggtgtggccggcacccagccaggcgcagtgggtgggcagggcgccatgcttctctcctggcgacaggtcggccgtgtagcagcgccccctcccagcagccactaggaacagctggtgattctcgccaggaactgctgcgcccaccactcgtctaggtcaatgggcacaaagttctgcagccggggattgggggtcctctccacgtactgcacaggccttggcccgccctcaccggctgggccaccatccagctgctgttgcacctgctgccaggcttcggacacaaagcggacattctcctcgtgggccactgtgtaggtctcctgggtcccctcgaaggatggggacgtggagggggcccgccggccattcacacgattgaacacaagccttggccctggactcgacaggggccagggtcccggcggctgcgcaaagggctgcgcccgcgggggctgcgaggtcggcggcgcgggctgccggcatttcaggagctcgccgagccggccctccacctgctgctgcgtgggacctgtgcggcgctgcgcgaccagcttgctgggccccttggtgatggtgtacatgacgcgccgctcccacaccgccgccggcccccggccagatccggcccctgcgccggggctcgcacttaacggactgcgggcgccgcggggagggggcgggcccgctacacgcccccggcccttaaagggcccgcacgggctcg

SEQ ID NO: 474919 - DNA, 1000 bp, Homo Sapiens
tttttttttttttttttttggttttgggctgtttattttcccatcagagcagtttcccggcccgcgagacagaggggacacaaacgcagcaagggcggccgcagaagggcaccgctggcacggggtggccccaatgaccgagtccaggaaagctcgatccgcacggaaggcagcacccgtgctccccgctggaggcggtatgtgtccctgaaatccacggtcaggcttgtgcggaagaaatcgaggcccggaagtccaggaggggcgccccacggccgggagcgggaagggtccggaggcaggagggcggcgcctacgtgtcggggtccagccagcggcactgctcctccagcaccccgcggaacacctggaagcggtggttgaggtcgggccgtgcgtggatgcggaagcgggtgcccagggcgccgtcgggcgagggcgcaccgtagaagacgcgcaggatgcgtgcgtgcaccagggccatggcgcacatggcgcagggctcgcgggtcacgtacaggtcgtagccagtgcacaggtaggggaggccgtcctcgtctgcgtccagtttacgcacggcgcctgcgcggacggcctggggggcagcggccggggcgaaggagcaggcggggaagggtctgaagtcgtaggtgccgcggccctggccgcgcgccacgaggtccacgcacaccatgacggcgtgcaggagggggttgtccgcgcagctgcagtcgtggccggtggccagcacgcggtccgaggccgggtccactaccacggcccccacggcccgcaagccccgcgctgctgcccgccgggccgcccacaccgcccgctccatgtggctctgcatggcggcgcgctcctgcgtggagaagagccgcccagccagggcgctggtcacctgcttgtcctcgtggaaggacgtgggccagtgggcccgggcctcctcgaactggcccctggtcagaggcggccgggcgggcacgggcaccaggaa

SEQ ID NO: 474920 - DNA, 1000 bp, Homo Sapiens; identical to SEQ ID NO: 161031

SEQ ID NO: 474921 - DNA, 1000 bp, Homo Sapiens; identical to SEQ ID NO: 343664

SEQ ID NO: 474922 - DNA, 1000 bp, Homo Sapiens; identical to SEQ ID NO: 343666

SEQ ID NO: 474923 - DNA, 1000 bp, Homo Sapiens
ctatttttactgtttattccaaaacgcaggaaaagcttcatataagatattcgttgcagtatctaaacgagtgaccaaccagaaacaattcaaatgtccagcaatatggaaattgtccaggataaacttatgtcatactcccacttgatagacaattatgttgctattataaacaactacagccaggcacggtggctcacgcctgtaatcccagcactttaggaggccaaggcaggcagatcacaaggtcagaagtttgagaccagcctgaccaacatggtgaaaccctgtctctactaaaaatacaaaaattagccaggcgtagcggcgcacacctgtaatcccagctactcaggaggctgaggcaggagaatcgcttgaacccaagaggtggaggttgcagtgaaccaagatcgcgccactgcactccagcctgggcaatacagcgagactccatatttaaaacaacaacaacaacaacaacaaaaaaaaactacagactgccaggcacggtgcctcacacctgtaatcccagcactttgggaggccgaggcagatgggatcgcttgaggtcaggagttcgagaccagcctggccaagatggtgaaacccctgtctttactaaaaacacaaaaactagccaggcacgatggcgcacgcctgtaatcccagctacttaggaagctgaggtaggagaatcgcttgaacccaggaggcagaagttgcagtcagccaagatcacgccactgcactccagcccgggtgacagaatgagagtccatctccaaaaaaaaagaaaaaagaaactacaggccaaggccggaggatcacttgagcccaggagtttgagactagcctgggcaacatagtgagacctggttctacaaaaaaataaaaaaattagctgggcatggtggcatactcctgtagtcccatctacttgaggagctgaagtgagaggatcacttgagcccaggaggtcaaggttgcactgagccgt

SEQ ID NO: 474924 - DNA, 1000 bp, Homo Sapiens
ttttttttttttttttttttttcacaggcacatgtggctttattgaccactccagccactcagctcaaagaaaggtgctgggtgctaggtccaggtacagaacgggaaaggcagagaggatgagcaggagcaagaagcagggatgtggccccaacccatcagccaggcctccggccagagtgcccagcagcagcttccccagcagctccagcgtggccagaaggctgtagtgtgtggcctgcagggccctgggggccagctggctgcagcgcatcatcccagtgaaggtgactgtggtgaccaggcctcccaagaagtgctgcagacataggctcagcaaggctgaccctctcaagattgtgccagcgtccatgctggcccccagggtgtccaggtggaagaccaaggcagtctgacaggctaggcccccgaggcggaagcgcagcaccgacctcaacagaggcagcagtttccagtgcttggccagcaaggtcccacccagggaggagccagcgatggagcagaccacagcacccacaccattccacagtcccaactcgggagcagaaacgccgtggtccagcaggagaagaggaaacaggctgctggcaccctgctcacccagcttgtaggtgagcacaaagcctgccgtccacacggtccccggcacggctagcacgtcccgcagaaggtgcgcggtgtggggacgctgctcggaagggggctgctgtgggagccgccgcagggctggtgcagcccaggccagggccgcggccagccagtaggtggcagccaggagcagaaagagttgcggccacgagaaggtgggcagcagcgccagcagcgcgcccccagctagcgcggcccccagcttgtacgcgaccacctgcacggtattgcccggccccagttcggccggctccagcagctgcacagccagcgcgtccagggccacatcctgcatggcggcacccaggttcaacaacagcagcaaccccgc

SEQ ID NO: 474925 - DNA, 1000 bp, Homo Sapiens; identical to SEQ ID NO: 343668

SEQ ID NO: 474926 - DNA, 1000 bp, Homo Sapiens
tttttttttttttttttttcaaaataatcgacaacctttaaagcagaaggggaaagttgtccagaaacaagagcaggaagttccgatcccagccccttccctgagccccggcctctcaggcccatcccaggagggtctccctggagagcagcgaagcagctttggttctctgcctgccactcagagtgaggtctgcagccggtcctcagggggcagagtcaggatgaatggactgaggaccccggtgctccccaaggggaagggctgcagctccttggcctggaactgggcagtccccccagagaccgtgaaggtggcagtgacctgggggttgaggcagtaaatggtgttgcccagggtggtgcagtgcagtggggcgggggcgggcaggggcagggaggcagccctgctccaggagccggtcactgtgttgtagcgcatcacggcggcgcccacgccccgcagcaggtcgaagcggtacaggaagccccccagtgccacgatgtcgctggaacgccggtggctggcactgtatgggcactcgtcccaagcatccttcacggggctgtacctgagcaggcggtagaagaggtgacccccggtgacgtagatgtccccacggcaggccacagcctcgtgggccacagggaaggtgcctgcggggagtggcgcgcgtggggtccaggcgtctgttcgcgggtcgtagcactccatgctgtacaggcattcgccaccgatggcatagagcagcccgtccagggccaccagcttgagctgggctcgggcctgctgcatgggccgaacctggctccagatgttggtcagagggttgtagcagaagacctcgttggagcagacggccttggcaccggagccacggatgccccccgccagaaacaggtagttgtgcatggtgcagagaccgcagccccgaagcggggcctcctcgggcacctgggtcaggggccgccaggtgttctcccgggggttgaacacatgc

SEQ ID NO: 474927 - DNA, 1000 bp, Homo Sapiens; identical to SEQ ID NO: 343669

SEQ ID NO: 474928 - DNA, 1000 bp, Homo Sapiens
tttttttttttttttttttttttttttttttttttttttttttttttttttttttttttttttccaggctcagggccctgccctcttcccttttattccaccaatctcttgggtggggagtggcgtggggaaccagaagcaccaggaagcctgggaaaggagaagccactgcagctgccccagacaccccaccccataaaggtttaaagaatgggccctcaccccatctggcaatcagcggagggggtggggcacaaaggcgagcagacactggtcaagcttccacttcatgtaaacaaggaggccgtggcactgacccctgcccagccaccgacagtccggtggaggcgtgtgactgagatgcttcggaccctctcatttgggatccagcgtccctgaggccaggacggaggctgcagggcagaaggccagttggcgtctgatgtgcaaactggtgcagtgtgcgacctgcgctctccacagcacagggcagggcaggcaggcatccacacgtcctgcccaccaccatcccgcagctcaggaaatcacacagttgctaggcttggcagaactgggacttgttttacctgagatgtcagcactggaattctcgttgggcctcttccccgtcagaaactccacttcagaggtctcggtggagacagagctggccatgccattgggcgccgcaggcctcttggctcggcgactgaagagcctgctgctgaagcgcctggcgggggcggcctccccccgggccgcttctcccatgccgtttcggctgggtgcctctcgggatttgggcttcaggtctctgtgcatgtgagagaccatcctgccatccttctggctcagctctcccaaggggatgggctccacggggggcagcacctgctccaccgtaaccaggtctttcaggaagctctccaggcgccaggccgactcgccaccgctggcgccctcctcctgcccctccgggttgccgcccgcctcccactgt

SEQ ID NO: 474929 - DNA, 827 bp, Homo Sapiens
ttttttttttttttttttttttttttttttttttttattattgaaataataacttgcatttttattttttaatattgcaaatggcataaactccaggattcccacttcccaagatgtgtttttatttctcactgattgtatcctgaaggaatcacaggtcttggcaaggtcaagtcaccatcgctggttacacatatcctggatatgtgcaggttccctgtgtcaaggccttttgagccacttggagatgtaatttaaaaaggcaaaacaatgcacagaacaattggggaaaagttacaagtaaaataattttatgcagacagaaatgtttttaaagctgttcatgatttagtagaaagaatcaggagcttgaaacaattacttctgttgctctttttctgaggtttcattccaatgagagttgcacactgtcagcttggttttgtggctgctgatagtcgtactttcttgaaatggaatacatttccagttgttgtcttaaacgaatcttgcttatcgtgtcataaaagttgggctctgacaaagtttcctctgtaggtggcacactgaatatcctcataattctccttttgttccttttggcatacatgaagagaccgaagctaacaaggataactatcaagtaaacattggtggcttcattccaggcttcgtgaacagtataatcaatagaaccatcgtcacccatcactccataacccccagccatgggggctgccggctccggaggcggcacgcggccagcgctgctccgctccggggctctttaccccggagtcggggccgggcgcgcgggaaacggttac

SEQ ID NO: 474930 - DNA, 1000 bp, Homo Sapiens; identical to SEQ ID NO: 343670

SEQ ID NO: 474931 - DNA, 1000 bp, Homo Sapiens; identical to SEQ ID NO: 160670

SEQ ID NO: 474932 - DNA, 1000 bp, Homo Sapiens; identical to SEQ ID NO: 343672

SEQ ID NO: 474933 - DNA, 1000 bp, Homo Sapiens; identical to SEQ ID NO: 343673

SEQ ID NO: 474934 - DNA, 1000 bp, Homo Sapiens
ttttttttttttttttttaagtttagggcatttatatatctgcaacccaataaacccctggtaccatgcagctcccccaaattcagtgcaaccaaagctgctgaaacaagtccagccccagaaggtgtagtggcactgtggtgttaccttatttttatatgacccttcaaaaaggacactgaaaacccagtgcctgtttgcagagatcatgtgtggaaattgaaaccctgtctttaaggaatgaccaaattcatgctacttaacctgaaaacttgggggcaaagtggttgtgattatctgaagggctgctatgtagatgaagtattaaacatgtcgtaggcaaggtttagaggagaatgtggtacttaaccttctatagatcccacaatgaaatgacctgccttgtgaggtagtgagctccctgtcaagagagattttcaagcaatgggtagaagaccacttggcaggagtgttgcaaaaagtgggctaaaccagatttttccaacctagtatggaggaagaggcagagtaggggaaggtcctgcccctatgagattctcctgattgcatgcaagatgacaggtaatccctgtgtggacagactagaaaagcagacagcccctaaaatagatggggagaacttttagccctgatatccacacaaactattttaggatagggtagcttggaaaactttaagcaaatgacgtcacctctcctaatgggactgttccagacacgcacagggaggcagccagcgcattgcaagatacaaagttcagctctgtgcagcaggagacccgggtttagttctgactctgccctgtatgacctggggctcctccttcccttttctgggaccctccataaaatgaaatgaacgtaggcagtccttccccttctaatgggcgttgcccctctgactggagcccccgatagcagatctagggctacagtttggggccttggggctacacttgtggacagccagagaccacct

SEQ ID NO: 474935 - DNA, 1000 bp, Homo Sapiens; identical to SEQ ID NO: 343675

SEQ ID NO: 474936 - DNA, 1000 bp, Homo Sapiens; identical to SEQ ID NO: 343676

SEQ ID NO: 474937 - DNA, 948 bp, Homo Sapiens
ttttttttttttttttttttttttttttttttttttttttttcagggtagctaagccacaggtgcgcgccaccacaccgggctaacttttaattttcgtagagtcagggtctcactctcttgcccaggttgatctcgaacctctgggctcaagcgatcctcccgccttggcctccccaagtgctgggattacaggcgtgcgggggtggggtgggggtggaggttcatcaacaaaccccactcctctcctccaccctagcgggtcagaacagccccccggccccgccctcctccccaccccctcccccggggtcgcgcccgcctcgcgccgccttttccacgcggtacttgtggcggcgcaggcactcggtgaggctccgtggctcctggtcctccaggtcctctggcagctggaagttgcggtccagcacctcggccgcctcctgccagttggcgaagcaggcggtgcccaggcgctggatctcgtcggcgccgtcgcgagtgagcacgtccccgtccggcttgagcaccacgaccgccggcaggcgctccactgagaactggcgcccgaggtccctcctcagatcatcctcaaagggcaggaaaagccatttctttggcatgtccttgaggaacaggtcctgctgctcctccgtggagtcctgggacacgtacaccagggccagctgagccgcccgcagtacatagaactcatctgtgagccgcacgaagaagtccttgaggatgggcacgaaggcctggcactgtggacaagccccagcaccaaagaacagcagcaccagccggttctccagcctgcgactgacctcagcctccgtatccagctcgtcctggtcgctattgttgcggatcaggatgcggccagagaacagggaggccatggtaacctgggttgggtgctggggacagcgcggcgtgtggtccccgg

SEQ ID NO: 474938 - DNA, 1000 bp, Homo Sapiens; identical to SEQ ID NO: 343678

SEQ ID NO: 474939 - DNA, 1000 bp, Homo Sapiens; identical to SEQ ID NO: 160672

SEQ ID NO: 474940 - DNA, 1000 bp, Homo Sapiens; identical to SEQ ID NO: 343680

SEQ ID NO: 474941 - DNA, 975 bp, Homo Sapiens; identical to SEQ ID NO: 343681

SEQ ID NO: 474942 - DNA, 1000 bp, Homo Sapiens
tgatgattccacccctttactttgcctttgtggacacaactcccgtgcaggccgcgctccacggggctcccggcggcccaggggagaagcttcgacaacaggacagtttttagtcacgtggcctgaccgtttgccatttaaggattacagcaaatgattctatttgtaatttctacccttcccattgcctcccccccaaaaaaaactgtacatgagtttacaaacatattaacatataaataatgagaaccgtcctggtgggagcctcctccgttgtctctgctggagatgaacactgaggggcgctgtaaccacacagactgcctgtgacatcgggagtctcacggcagctgtcctgggcccgcagctggcttttttggcacctccaggttcaaccaccagtctgtctctgctgtgcccagggtagagcccgggggctgtgagtatgtgtggctcccctgcccgtcatcgctctggctcaagctcatgctggaagggacgcttcctctcccgacagtgcttcttgtgggcaggccagtccttctgctggcactgggagccgcagtaccgggccacctggcagcgcccacagatgttgaactcccggagctgcttctcaatcactgtgcagggagggtagtggcactcatagtaggtgcaagagttctcctcctcttccactacatccccgttggcattataataccgggtcacatttaggacaggaaactgttcttctatagggtctgtaggcagctgctgaattgcaagccaatacaagctttgctccctctgcttgctggaggtctcttcagccttgggccgccagccccacggcaccagttgcaggttgtccaggcgattgtccacggtcacagcgttgaggtgcaccacctggaagcccggggccacgcccccccggtgccgctcccacagcagctcatgaaggagtctcccagagccccttcctcggttcttgtcaaaggcataggcaaatatc

SEQ ID NO: 474943 - DNA, 1000 bp, Homo Sapiens; identical to SEQ ID NO: 160673

SEQ ID NO: 474944 - DNA, 1000 bp, Homo Sapiens; identical to SEQ ID NO: 343683

SEQ ID NO: 474945 - DNA, 1000 bp, Homo Sapiens; identical to SEQ ID NO: 343684

SEQ ID NO: 474946 - DNA, 1000 bp, Homo Sapiens; identical to SEQ ID NO: 343685

SEQ ID NO: 474947 - DNA, 1000 bp, Homo Sapiens; identical to SEQ ID NO: 343686

SEQ ID NO: 474948 - DNA, 1000 bp, Homo Sapiens; identical to SEQ ID NO: 343687

SEQ ID NO: 474949 - DNA, 1000 bp, Homo Sapiens; identical to SEQ ID NO: 160674

SEQ ID NO: 474950 - DNA, 1000 bp, Homo Sapiens
tttttttttttttttttttttttttttttttttttccgactggggcaggcgggctttattccgggtgctggagagctgtgggccccactcctcccccagaatgccaccgggttgaggggctgagcctcagcaggggtgagcgctcagagcaggaaggggatgatgggcatgcgcaggggcgggtagtcccggaactccttcaggtagctgcggtgcttgcccttggcccagatggtcatctgggtgaagcccaccagggagaacagggccactgggagacactgcgtcatgatggcgaaaccgatccaggaccccacctcgtaggtgtagttggggcaggacaccagcaggaagagccacgtgaaggggttcttggtggggtatgggatcttccgcgtcttggacccagcgggccgcaggtcccgcagggccatgtggatggagaagttgccgagctggcagatcacaaagatggcgagcgccagtttcacctgctgagctccgtaggtagggggagtgtagagagggtgattgatgtaataggccatccacgcggcgaagccccagtagtaggtgcagttcttgaagatgttgcgcaaaggcatagtgccatgggagaagcggtgcacgaagagcgtctccagcaggcgcttgatgtagtggaatgagtgacagatgcaggcgaggtgcaccactgtatgccgactggacgtaaagtcatatttgtggccatagatgaagggcactcggaagtagaagagcaggtagatgaaaaggggccccgcgtactctgttaggaagaccgtcacccagctgatctgggcccccaggtcccggaagtacagtgtggccgtggtgcccacgggcagcttctgcagaacatcctcatccttcagggacttgcccttggggtccaggcggagggactggcgggcggggtaccactgcggatgggtcttagtgaagaggttcttgatctccgcaatggtggcgtggggct

SEQ ID NO: 474951 - DNA, 1000 bp, Homo Sapiens
ttttttttttttttttttttttcacaatttgcaacttcctttttattgaccatgaaacattgacataactgaccgtatactatactagtccaccaagaaagcctcaatacatttaaaaaaccagagatgtatgatccacattgttacaacatttgggaacgttcttactaaattagtatgatgcaatctcttgcccattacttttaattgacagtgtaatttaaatgactaattttacattaagatatctatggaacacatagaataaaatatataaattatacaaatttttaaagataaagcagaagattcaaagaaactgcacttaatgggatgactttgagttgtctcctttctccctaatcctcaattcttttaggggaattgggcccaaaattttgtgaaaaattatgtgtatttattttcatagttcagtaaaatctagtcagtgaatccctactaaaatggagttaatagacaaagaaatttctcttacaatagcatttaagagcttgggtcaggtcttcagaggaagatttttagaaagcaggcatgtcctgattttcctcaggacaaaagaaactgcctattcagctataccctgagcttctctggacaaaggctgagtcttacctacttttctatccccattgtttggctgaaggcttgttccacagtaagtgctctttaaatgtggactggacatgtaatgtaagcttcctcttacctgttggcaagtaagatggatttaaggacattgaacttccccacttctgtcatggtttagccccaactaaccctcagggagtaattagaggaacatgtctactcctaggaaaaatcagtgcattcccacgtgcagtgggttgcccttcccactggtgtttatagggttctgagtggaaattgagtgagagggtgcctgcggctctagcttgcagcgggaattcaagaatcgatttgacatcccctgttcactttttcctactttgtttcttcc

SEQ ID NO: 474952 - DNA, 1000 bp, Homo Sapiens; identical to SEQ ID NO: 338034

SEQ ID NO: 474953 - DNA, 1000 bp, Homo Sapiens; identical to SEQ ID NO: 343689

SEQ ID NO: 474954 - DNA, 1000 bp, Homo Sapiens; identical to SEQ ID NO: 343690

SEQ ID NO: 474955 - DNA, 1000 bp, Homo Sapiens; identical to SEQ ID NO: 343691

SEQ ID NO: 474956 - DNA, 1000 bp, Homo Sapiens
ggcaggagaaggcgtttattgcagtggtcctgcagggcggcctgggcaagtgcctgggctcagcggggagacagaggcatgtggtgcattcaggagtggggcaagggcaggcgcaggcgaaggcggggctgcagggccagcatgcggtccacctccctggctggccgcagggggtgccgctgggcaatgggccgccgggcgtgggccagcatgtctgcccagtgctgcaggggctgccccgaggcccgggcacccaggtgcaccttgcctacgggctcagttcggagcggcaggctgcggtcccagacagccagcaccaggtccacattctggacctggctgaagggcaccaggaaggtgaaggcctcattgaagtagggggccgccgtgccctttttggtggctgtctttctcttcttccacttcctctggttcagcatgagctggaccttcacgtagggctctgcaagtcctggacgcaggcctcgagcctccagcaccaccacggtcagccggcctgagctgggcacgtaccggagagagaagcacagctccccgacctgctcgggctgagtggcagccggcgggcccagcaggtaccagtgctccagaacatgctgcagatccacggtgcccagtggcagacggagctcacccaggggctcatgccccgagaagcgcttgaagttgaaaagctgcacctgcagggtggcccctggcagctccgcctgcgggatctgaggcagcggcgtgagccaggccctgctgccctagctcaggcccacccagctgcccaggcccacccagctgcccaggcccacccagcccaggcccatccagccgtccaggcccacccagccgaccatccctgactcacgtggaagcagcaggtctcgtcaaacacggggcagagcgtgcctcggtgcacttttgtctcatgtctgtgtccggcctgggtggagacgctgacccgggcataggggtccacggtgcccccagg

SEQ ID NO: 474957 - DNA, 1000 bp, Homo Sapiens; identical to SEQ ID NO: 343694

SEQ ID NO: 474958 - DNA, 1000 bp, Homo Sapiens; identical to SEQ ID NO: 343695

SEQ ID NO: 474959 - DNA, 1000 bp, Homo Sapiens; identical to SEQ ID NO: 343696

SEQ ID NO: 474960 - DNA, 1000 bp, Homo Sapiens; identical to SEQ ID NO: 343697

SEQ ID NO: 474961 - DNA, 697 bp, Homo Sapiens
tttttttttttttttttttttttttttttggttcatgatacgagttacacaagcgttttatttaagaaataaaggattagatttttaattcttttacctagtggtgtttcattttctgcctttgtaaaataaaaacaatgatttggttcactttgacgtttcttcagtgttgttcatgactgtggtgggcactggtactgctcgtctctaccaggttgatatcatactggactgaactggctctctgaaagtggcctttcctgcaaaggaagtagaaggctccaatgataagtgttactaggaccgccaatgccacaaaagcttcaaacaggttacttttagtttggatgctggagcctgggagaaaaacctcttcacaacgagctcctgtatagttttcaacgcacctacaaaatgggctgggaatagtaggtatcacataacaaagccccccattcaggcaaaacgacttgtgactgggaccacagggctcttcgtgatctgttggcatcttaatttgtaaatagtttcattcttggtcaagagagtagggttgaaaaacagtacattcacacaaaaaataaattttgttggacatgcagtgtttcaaaagtttttgaataccgcagacaacagcagctgtgacttgcattttataacatgtcaaaaatctgatttatatggctgcagtgtcccc

SEQ ID NO: 474962 - DNA, 1000 bp, Homo Sapiens
gctttaatcaactggttttatttcctagaactgaaacattctatggttggttctcagatcaaacttccgaaactgcagtcaacaatttttcatcagagcccaagggagaggggaaggggtgaaagagacaatagatggagaaaggcataatgaccattaggaagagggtgggaggagacacatcttcctctgttatcagtgagctacatactagacctgttgatgggaccaggtgatggtacctgaatggaaaatgacactgtgacgaacagcaaagcctgactacaagtcataaaacttcaaacagaaagggagccttccagtttgtctcagcaatggaacagcaatgggaaagctagggccagcgtggaggcacacctagaggtagttcttaaaaattcttcttggaacttccttttattaaaaagattttataaaatatgtgtcttttcttctacgcctgagtgatatatatgacggtagggtggccttgaggctgtggggagagaaagcggcagccaaggatcttcccagggcatcccatcagtggccccagagatctaaatgggacagatatttctcacggtccccaaccaggatattgggcaaagttaagttttcagatctcacaaacaacttggaagcccccaaacgttttgatgaaaaacggcaactcccagaacttcctgggtcagcaaaaggatttgtggaaggcggggggcattccccacatgctgccccttttccctaaatgtctgaagctggcaggtatggcaggcatggacaggagctcaggaagatgtcgctctcctgcccgctaactaccacagcttgaagactgctcatcccaggccctgcaagtgccctctgctctttatctgccaggcctttcactcctacccatattcctaagcagaggttcataatgcctggggaagcaggaggggtggagaggggtgtctagaggtgaaaacagcctgcctgaaccccaagtcggaaa

SEQ ID NO: 474963 - DNA, 1000 bp, Homo Sapiens
ttttttttttttttttttttttttttttttttttttttttttttttttttttttttttttttgttgtttcaaatttgcatttagtgagatttggccaacccttctgactgtttcaggcatgtaaccgtagagctggccctgccccccaaggggccctctaacgtggctgcagccctggagctccttaaagaagtggctgattgcagggtggtggcagggaaaacgcaacctgaacccggatcattctgtggtgctgagagtggggcaccagagcaggttgagggacaagggccccccgagggagcagcccgagcagcaacgtgactcagctgtggcctcgacccagaggggagcggacaccccgagccgtcacgctggcacacgggtgggagcgcccacagatcagcaagtgaaagaggtcaggaccccagaaccacaaaatccccagcggacaacagcggcgggatgctgcacacgatgtagcggatgacgttggcgtgacagatgaagatttcgtaactgtcctcctcctgcctggcatctgcgcggtggatgtagttccggaaggcggcctcgatccgggctccgtcttcgtaatactgcacagcttccggcttccaatgagacacgggcgggtctggctcgatgggggcgccttcccgcagcagatctgtgctgactttgcagacgcctggcaggtgccggctgatgatatcggtggtctctatggcgcgcgtcatagacgaatggacgattttattaaacttcaaccccaagcttgccaggcggagcccagtgagttcagcctgctcccgacccagcggggtcagagtgcggtccttctccagggagccatccacgtggtactgggaatgcctgatgaggaagatgtgccgcgtggccttggctttgtagtggtccagcttggacgccagctcttcttccccagattccacgttcctcttccgcacgttgatcagagacagtggttctcgcctgt

SEQ ID NO: 474964 - DNA, 1000 bp, Homo Sapiens; identical to SEQ ID NO: 160675

SEQ ID NO: 474965 - DNA, 1000 bp, Homo Sapiens; identical to SEQ ID NO: 120119

SEQ ID NO: 474966 - DNA, 1000 bp, Homo Sapiens
tttttttttttttttttttttttttttttttttttttttttttttttttttttttttttttttttttttttcctttgcgtttttcttgactgaaggtgagatgttatttgtggcatgtgaactgtggcaggtgggaataatcctgcccttgagagaaaggatctccagcctcccagaagcctgctgtgctttcgtcccacagctttctgcccattgtttcttactagtttcttgaattgttcttgtggacttttcctcagggatacattggcctgcaggtcccagttcacatgtagtcccctgctcaccattggagaatcagctcactgctctctagaaacgtggcgttggtgaacggaccatgcttccgtagctctgacctgggcagcttggacctggtcatcctctactgccatacctttccctgggggctggacatctcccccgactccccctacttggggatcctcctccaggactcgaagcatctcgatggtgcaggctggatccagcacagtgtcagagtcgcacacctggatgtagtccaccgaatcgccgagggccttgaaggccgtgtacatgacctcgcgcttgcctccccacttctgcatgatgcacgagaaggtgctggcccgcaccacatcccgcacacggtccatgccctcctgcaggctggcctccgtctcaccctcgcctgcctcatggaagttgctgcgccacacaaagaagccggcctgctcggtgccgcccagcacctcgtggaagatgtccagcatgtaggcgtcctcctggcggttgccatccaccaccatgaccaccttgaggtcagggaaggagatgcgctgggccgagcgcaggcacttgcgcaagtagtcagggtcctcctggtatgcggcaatgcacagtgccaccgagccccgccgcggggagggcagcttcagggcctggccggcacgtcgcatgcgccggtgctccaggaaggcaaaaaggctctgaatga

SEQ ID NO: 474967 - DNA, 1000 bp, Homo Sapiens
ttttttttttttttttttaaaattaacccaaaactttaataatgtgtctgtaaccaagaaaatattgatagcatcatcctaatgaaactaaacatttattttaaacttattaaattgactcttaaactaagtttttagtctttaattttttaatatcaaatctgtctctgaccttgtttcattatacataaggagactttgctgtcatgagcgtttctcacgtacaaatgcaggcaacagtgagaggaagttgtcttgtttttgaacaggccttgtttttcttggatgcttttgcttaaaatccaacagccaaatgaggaaacttccagaaaacttggtcatcaaaatatttagccacatgaggtgctttccatattttgagatttaggagcaaacctgtcaggagaccagacgtgagagctatcacgatggccaagctgagttccccaatgctgaggaggacctggaagccaatccggcaggcacttggctcccccgatggagatcagcccagccacaagacccagcaccatggcaagccacggagaagggatcaggtgacacgaggtacccacagccacgcctcctgccaacaccgcactgtgcacataagtcatgctgatcttcctttgggggtgagccaaggatgaccctgagatggctgtcaccacactgactgctagagcatagtaggtgttgaacatggcattcttcctttggattggacttctcagcagagcagagttgacacttggccagaacatccacaagaagagggcgcccagcatggcagacaaactgggtatcgttgctctctgatcattatcctccgttcccttgggtagaggctttggcaggcaccaggccacagtcagcccaaaataggctgcgaacacgtagaagtgcctcaggttcatgtggtagtctgtgttgaagatattactgatgaccatcctcagggtgcctaaagctgtcacctccaccagcaccatcaccacca

SEQ ID NO: 474968 - DNA, 1000 bp, Homo Sapiens; identical to SEQ ID NO: 343700

SEQ ID NO: 474969 - DNA, 1000 bp, Homo Sapiens
aagcacgaaagtctacatttatttgggacacagaactgacattgtgactcttcacagccgtatctcctttgtctcctagcctcctggcacggtggaaattccccaggaggagaggaaattaagaactgcacagacagaacagtatgcttcaagcggaaaaaaatacggagaaggtggaggaaagcagcacaggtgatttaggtgcatcttctgaaaaagaaatgcacgcgccggacagccaaggaggatgccaagggacagttggcgcccagggcgggctgcaggtatctttcctttctgggaaaaaggtgactgcactccatccagggacaatcaaggacagccaccggagaccaacagaaaacctaatgtcagccttaaaatcaggtggcttagaaactccattttccggccattcggtggtacttcttatcaactcgtcaacataatgatggtattaaaagcaaggttcctttcctctggcttagggtgagttcttcacgtgcaaagaaggacgcctcttctggaatgtgaaaattcctgaaacactgctgttctttcctcctgctccatgccgccatgcagccgtaggaattttaatcgcatggaggcagatggcaactgccctgatgccggcgcccctgagctgctcagcagggtctgtaggaagaggctgtagtggaactccaccagctcgcaacttgagaaaaagacaaccatcttctggtcttcctcaaacttgcatttctgaaggatgaaggccgctaggcagacaagcctcagtttgctgggaaccacagtcacatgctgcttgagactctctggtattgcaaagctgtccagcttgtcgccagctggtggaggacagacctcctggaccgctttgtcctttgggttcaactggtcatggctcttgtccaggacagaaatactgactggatcatgcaaactgatatcagctagccgcgttacaccttctgtgagtgtcgctgatagcaag

SEQ ID NO: 474970 - DNA, 825 bp, Homo Sapiens
ggagatcctcagacttactaagtcttcacttaggatggtagtgtggaccaacactgcagcaacacagtttatccaaaaggtcaaacataaatagaatattttatacattcagaaaattactcatgcaaggaaaagcgctctgaaattactttaaatcaaagctgctctgaagcagatcaagaatcttgcttaaaattgaattcacgtatctgagaagcaaatgtccttgttcagcacattcgggcagttccttggttcagctcagcacacatcccagtagaatcttgttccactaaatcagcaaaaccttgccgtcacctaatacaatggcatcttctgatctaagaacaccttctcttctcacccccagctatggtagccttgataagagaatccaactcttcatcaccacggattgcaagctgcaagtgacgcggagtgatacgctttactttgagatccttagaagcattacctgccagctccagcacctctgcagtgaggtactccagaatcgcagcactgtacacggcagcagtggcacccacccttccatggcttgtggtgcgagtcttcaagtgtctgtggatgcggcccacaggaaactgtagcccagctctctgtgagcgagatactgccttagccttggccttcccactgtcctttccagctttgcctccagccatgttctcggcgccgactccgcctccgctcggccgcgcgccctcccgctgccgacccgcgccgccgccgccgctctcgcagcaccgaccgccgccgccggagccggacaataccccgtgcccgcctcgcgctgctgtggcc

SEQ ID NO: 474971 - DNA, 1000 bp, Homo Sapiens
gacaccctctccaaggtccgcctggtggatgggtgagacaccagagtcctttgagactgggagctcctcaggcatctgagaattccagtttcacatccctggttccagggaggggagaatcttcagtactctggagagtacgggagttcatcccttcttatcagttcctgggggctgtcttgaggcaacccccacttttaggatgatatacacgttgcaagaattcccgctattttccggcccccagtacctccccagagtccacatgtctgcctggacccaccctcagagcagaggaaccagtctgtgccttggtgtaatgactctgggaaagaaggatgggcagagagaaagcagggacaacggcctgggggatcatccttgagggtaagactgacagcaatgactgtcctacaggcaggtggtgaagctgggcgccgggccgggaccggagccggaggcggagctttccacctcgctggtgagtggcgggtcgatgcggggagttcgacgacgtccccggtactcgatcatatctggatgataggttgggtggcggcgagcatgcttggtcaggtggtcgctccgggagaactgcttggggcagagggggcaggagaagcgcttctcgcccgtgtgcgtcctgtagtggcgggccagctcgtcggaacgcgtaaacttcttgtcgcagtcgagccagtcgcaggagaaagggcgctcacccgtgtgggtgcgctggtgggacttgaggtgcgacgacttgtaataggctttggtgcagcccgggaaggggcattggtggcgcttggcagcaggtgtgacagacctcctccggggcgcctgatccgcggcgggggcggggcctgcccctagggcccctccagagaacccaccagaggctgctggtgcgcccggggcagcaggcgcgcttgggacggcgggcgcatcggaggagctctcgggagcgcagaccgccgcggcgccggaggcgggagccagc

SEQ ID NO: 474972 - DNA, 1000 bp, Homo Sapiens; identical to SEQ ID NO: 343703

SEQ ID NO: 474973 - DNA, 1000 bp, Homo Sapiens; identical to SEQ ID NO: 343704

SEQ ID NO: 474974 - DNA, 1000 bp, Homo Sapiens; identical to SEQ ID NO: 343705

SEQ ID NO: 474975 - DNA, 1000 bp, Homo Sapiens; identical to SEQ ID NO: 343707

SEQ ID NO: 474976 - DNA, 1000 bp, Homo Sapiens; identical to SEQ ID NO: 343708

SEQ ID NO: 474977 - DNA, 1000 bp, Homo Sapiens; identical to SEQ ID NO: 160677

SEQ ID NO: 474978 - DNA, 1000 bp, Homo Sapiens
ttttttttttttttttagagttatacattttatttgagcttcatctctttggagaaaggggaacagggatgagaggattaagttagagatggtctggcacaaagcccagagatgtggggtgtgtgaagaaggaaattcatgactagaatatatgctgaaggtgaaatgaggggagcctggatagggaattcagagataattgttggcatttagtaatgtgatttgggagtatgatcccagcgcagagcaaggaagaaggctggcaggtagtaggagtcacagtcaggaaggaagtactgctagttcgtatccagtctaggtctctggacaattgacccctttttgggtaggaggatttgccagcattatctgaccccttatttctagttcatctcctagacatcttcattgctgttgccctctggtgagtatgaatccataggatggcgtctcctctccactgaccatgtccgagtctgagtctgagactgggtggaagccatagacggatgatacataggccagtaacgctgctgaggaaaagtgtgagctcttggcctagatttggggttgggctccatctcaggctcagtctcaggctggggctccatctcggtctgggtcttggtctcggtctcagccttgggctccatttcaggctccagctcccgatccaggtctaggtccagacccagcccagcctcttgttctgattccagctccaaatccaactccgactcctcttctacaggctgttggatcttgatgaagcctggacttacatttttttggcttcctagaaaactgctgctcattttatatcttgaattgtcattcttgtctgtttctgagtaggtttcccgtatcactgtctcggattcatcgatgcttaactcagaggagcctatgaccttccttgacaaggcaaacagcacggcgtcgtgaacgctgaggaacagctgggtcttggtgatgccagcgtcaaagaaatcattcctct

SEQ ID NO: 474979 - DNA, 1000 bp, Homo Sapiens
ggggaagtgcagaagtaggtccgatttcttcacaattctttttttcttttcacttctattaggaagcagaaatccgtaaattcttcaaactcctcttcacttaaagcctaatctactttctctgtctgatgacatgaattgtgtgaaagggtggaagctgtgagtccagagatggtagttgaagagtaggatttgacagcagtgcaaacaatgaaaaagcagtgctctctctctgccgggtatcttgtactgaacttgaggctgctgccaagttagggactattcccaaatgcttgtttggggcttttggacaccttggggtgagtcagtcattttttctaattgtgttctgagaagccaggtggggtgagagtgaagctgttcttcataaatgcctcaggtatactcagaactctgggtccaccaccactgctcctccagagaagtgccatttttatcttggtctttgctgactcctcccattctttttcctttctttccaactgatctcctgaatatttcagcagctcaacaattttggctagtatttgttcttcttcatctttcttagaacttgaagctacaggcacgtggccttggagctggaaggagagaccctcagttacaaaaatctctttggacttgaagcctcctgcctgggtcgcttgtggtggtggccaggagtaaacaatttcagctactcggttggcaatggaaatgactttggggtccacagcttcatgctccaagcactgctccacgttagaaagacacctggaccactgctggctgtgcgaatcttggtattccaacgtcctttgaccctgagcagagaccttggcaggcgtgctctgcgaatcttccttctccactactccaaagaatgctttccaagaagactttttcttgccaaggtttatggccttctcactggattgggaatttctgcaaggccatgacacctctgtccatgactcatttgctgaacaattccccaggc

SEQ ID NO: 474980 - DNA, 1000 bp, Homo Sapiens; identical to SEQ ID NO: 343711

SEQ ID NO: 474981 - DNA, 1000 bp, Homo Sapiens
tttttttttttttttttttttttttttggaacaagcagcaaaatgagaactttatttggtgcagtcagggctccatttagttccctcactctgcttctaatcaccccttctcccagccctcttctatttgatagaggtctgtccctcagatcagcaatgtcttagcccctctcctctcttccattccttcctgttggtactcatttcttctaacttttaataaacatttaggtataatacattacagtaagtgctatttagatacaaacttaaaacatactatatattttaaggatctaagaatcctttagagaaggcacatgactgaagtacctcagctgcgcagcctgtagccagtttttttaatgtaaaagtaagaatgccagccttaacctagccctgcagataaaagctaacttttattaataccagccctgaataatggcactaatccacactcttccttagagtgatgctggaaaaataaaatcaggggcttcagattaaaaaaaaaaacaaaaaacaaaaaacaaaaacaaacattgcctggccctgagggtctgtttgcaaaacttcttgtagatctaatttctgaacactcactgcttcatttctattcctcctgttgcagggagtaatttcttctcctttgtctcacttcccttatcaagaacaccaaccagtaagtctttgccaaattctcagacccactcaggacacgagtctctacatggcttaacagaagagagataattaggatttttttttcctcagtctttctgaggtttttatttaaatgcactcagtggtcatagggcagaagctcaagctagctggggcgaagggaggacgccagggagagtatgtttctcatccctgggaggcattcagcctagctcctgcagccaaattacagcaccagagaacaatgtgatgcattcctgggcaggtcggtgggaccctgggcgcctgggccttgtggagagaggtgccagacaca

SEQ ID NO: 474982 - DNA, 899 bp, Homo Sapiens; identical to SEQ ID NO: 160680

SEQ ID NO: 474983 - DNA, 1000 bp, Homo Sapiens; identical to SEQ ID NO: 343713

SEQ ID NO: 474984 - DNA, 1000 bp, Homo Sapiens; identical to SEQ ID NO: 343714

SEQ ID NO: 474985 - DNA, 1000 bp, Homo Sapiens; identical to SEQ ID NO: 343715

SEQ ID NO: 474986 - DNA, 1000 bp, Homo Sapiens; identical to SEQ ID NO: 338011

SEQ ID NO: 474987 - DNA, 1000 bp, Homo Sapiens
tcagtagagtccacagccccgcaggtttttggcgatgatgacgtccgtcacagcatcaaagacaaactggatgttgttggtgtccgtggcgcaggtgacgtggctgtagatctctttgtgggctgacttgttcttgctctcgtactgggcctggatgtaagccacggcttctgtgaaggcgctggggcctgtatattcaggaaagcagatggtgagcggggacttcttgatcttctcttcaaatatgtccttcttgttaagaaacaggatgatggacgtgtctgtgaaccatttgttgttgcagatgctgtcaaaaagcttcagggattcgtgcatgcggttcgtggtttcgtcttcgtggagcacctggtcatagccgctgagcgcgacacagaaaatgatggccgtgacgtcctcgaagcaatggatccacttcttgcgttcagatcgctggcctccgacgtcaaacagcctgaagtggaggttcttgaatgtgaagtgggtttctacgatgccagtggttttgaccctggttcggaggatgtcctgctcagtgggctggtagtcggcggccccaatccgatccaggctgtccaggtagtatttggcagagtcgttgagttgatactcccgggaccggttgaagcactcttggattcctgagtcgccccagagccgcatcatggcagaaagcagctctgcagagaagggctcggtgtcttccatccgactcaccacatcacacaccatcttggcgtcagcctttctctccttatcaccatattcgatgcccaaagtgtccatggcccggacgatggctgccagggactggatagtgttgctgtagacaacaggcttgtactgtttcacgtcttctccggagaagccatcttcatggatgatcttcatctgcttcacaatggtgctttttcctgattctccagccccgagcaggagtaatttcacgtctttggcggcgctgatgccatcctctttgagg

SEQ ID NO: 474988 - DNA, 1000 bp, Homo Sapiens; identical to SEQ ID NO: 343717

SEQ ID NO: 474989 - DNA, 1000 bp, Homo Sapiens; identical to SEQ ID NO: 343718

SEQ ID NO: 474990 - DNA, 1000 bp, Homo Sapiens
tttttttttttttttttttttaggttgaatcaaagcaagttgtcttcagagactgggatccgagatagaaaacacacagtgaagtttaatcaggaacccaacctccggtcctctgctacaaccacggaaacggctccaaacttgaggggggaccccccaacgcctgcttttggcccaaagctctgccttccagccctcctcatacccactggccacctaggaccaggaaaggggggtagagccctgagaattctgggtctggggtcaccagctcccacacctgtgctccccggccccacacacatgatgcccaggggtgggcaatccctgacagcggtggccggcacttgggagctcctgctcagccacctgccacggcccaccctgggggtccggcaggagccagggcagtgcatggcagcataaggccccgctgcagatcgactgccttcagaaacaaaaagtcccggcgcaaaggcgttcccggagtggcagcctggcctgcaccccagctgtgctgcccctgcagagccccagcagcgaggcacacccaggtcaggggagggggcttgggtaccaggggcctcactggctcttcaccaggaccctgtagagtgagaagctgaggactgcggccacggcggccccgacaacccccagcagcccccggagccagaaggaagagggatgcagctctgcgtggaccaaatgtgggaaggcggccatggtggcgagctgggtgaagatggtggtgctgggctcggctgggccagcacaggagaacggcacgggagcgggtagccggtgcttgcggcaaaactcggccggtgatgggccagacaccgcgacaccttcgggcaggtcggccttggaggagacaaagaggcagggggtctgcccgtccatgtaatggtgcttgtagacgctggcacaatgtgcaaaggactttgggtcactgccatcaaacatcaagcaggcaacgtcacaggtggcgtccagc

SEQ ID NO: 474991 - DNA, 1000 bp, Homo Sapiens; identical to SEQ ID NO: 343719

SEQ ID NO: 474992 - DNA, 1000 bp, Homo Sapiens; identical to SEQ ID NO: 343720

SEQ ID NO: 474993 - DNA, 1000 bp, Homo Sapiens
ttttttttttttttttttttttttttgccagagcaccagaaatttattaaattccccactttcccccaaaacacaattacccacacgcagcaagggggtgcggaggccccccagcctggctcctgcagcctgggccaggaggaccagcatggggacacaggagctatcaggcaggagtcaggctgggggacgaggggacacgggatggggtgacagacaaggtagtgcaagggcagaggcttctggctggaagtcctggacccccagcataaaggaggggaggaaaggaagggggctcatataaagcaggagaccctgagccccgacacaggtggcgtgggggaggacacgcagaatgacgaggataaaaccggctcttaggaccgtggcttctgtcctgggtctcagggcacacgcgcgcacacatatacaacacaagatgcttctggcatgaggggcagggtcccagagaccccaccctcattcaagctaaaaactgggaggggctgagcaggggctgggaccaagacccatgttttaccagtggggcgagtttttttggtttttctctccaaaagggaaatttaaaaatctacaacaaatcacaccaaattcattaaaagtgataaaaacccagcctccccctcctcacttgagcttcagaccgggccagaaaagctcaacgatgaagaaacaggaacatgcccaggtcaggtctccccacccaaacacaagtcccggagtgggaagcttggagctgggatggcatgggcagccccagccgccagcgtctgttgactgccaagagctgcgtgaggagggggcagagtgagagagaccaccccaagcgaaaaaggtttccgaggacaaattctaaaaatatgaaagatattttagccgaaggtatcggagggcttgatggctgggcgaggtggcagcggggtctccgcggggccgccatcagctgtgctgctccaggtaggcggacaggagcagcccc

SEQ ID NO: 474994 - DNA, 1000 bp, Homo Sapiens
tttttttttttttttttaagtgagcatttcttctttatatatgatgtgttcaggtaaataatcaggccttttgaagaatcacacaccagtttccttgatcgtagtagctttgcagaattctgacatcactcacagtcctgcaggcaccttccagttctccctcacggaacacatggtagtaacgatgaaacacaggacttgggtcctgggatcctatgggaccaaatggctcaacaggtttgcctttatcaggatttcccttaaggtgccagggaaccagtacatcttgagaataaaaagaagtcctgttaacatgaacaggcagcttggaattagaaacttgccttgaattacatcctccttcctgagagtcattaatgcgggggacagaagatgccgagtctcgactgcccatgtcacgcatttgctccacaagtgacctctgcactgaggtatcactgttcatctcctctttctttccttggctatttctgtttcctctaagatacttggacttctgcttattatattcttgttccattgcccagacataaatgagtgccttcccacctggtctcaggagtcgaacaatttcttggagagctgccactctacgctctacagttacaaggtgtttgcctcactttcctaaatgtaaatgatgttcgtagtcccctcttgcttaaagttaagtctccaacatcactggtgataattccacttttaagactctcagatgcttgaacagtatcaaattttctgcacgtgattccatgggtccaaaggtatctagattctcctgtcatcaccagcaaactccgacgaggcaacataactggcactgcaatgccatctgggtgcttaaaatccatgacaatcttgcccaggttcatactgatttatggtcatttgatcaggtttatgtttaatgtaacctttcctcaaccatttctccaaaaagctttcacaaatgtcaggaagacccccagataatggctta

SEQ ID NO: 474995 - DNA, 1000 bp, Homo Sapiens; identical to SEQ ID NO: 343724

SEQ ID NO: 474996 - DNA, 1000 bp, Homo Sapiens; identical to SEQ ID NO: 160681

SEQ ID NO: 474997 - DNA, 1000 bp, Homo Sapiens
ttttttttttttttttttttttttttttgctttctcgctctttaatctcactctgctctcttgacacagttccagcaatgcagccccaggcaccagctccgagaaggatgcggtggggcggggtggggaacctgcccagggggcccagctctggggcggggcgggggcgcctccttccggcccgcggtccgggcggccctcgcagctgtccaggccccggcaagcccgggcgtggtgtccgagcggacgaataaataggggcggtcagtggtcaggtgggtcaggtgggcttgtgatccgggtggcttttgagcgtgtggaacttgacgctgtccagcttctcgaagcgcttcccgcagcgatcgcacgtgaagttgtactgcacctccgcagtgtgcttcttcatgtgccagttgagcgacgcgcgctgccggcactggtagccacagatctcgcactgcaggggggtctcgccggtgtgggtgcgccgatgtacctccaggtggttcttcctcttgaaggacttgccgcaggtctcgcaggtgaattcacggacacctgaatggatgatcatgtgccgccgcaggtggttggataaatagaacttcttgccacagccaggatgagggcacactttggtctttcctttccgatgcacaagattgacgtggttctggaagctgctgagggccacgtagacttggctgcagccctcgtatgggcagtggaacatctcgagcaggccgtcagcatccatcacccgcgaccgcttgctccgccgcctcttctcaggctccttggggatttcatagatgatggctgacatgtcgctgccgtccagctcctccccgtccgcctctgcctcaggctctgcgctctcaggcaccgttgttgccagctccggggctactggctcctccttctcctccttctttagcaagcacaggtcctccttctctttcttggtctcgatgcctgctactgcggtggcgtccatggt

SEQ ID NO: 474998 - DNA, 837 bp, Homo Sapiens
tttttttttttttttttgtaggtttatcttttattctaatgttgctagaataagaacaaaattaaaataagcacacacacacaaaatgcctctgtgaatcagtcacaggatttctctaagtctgggctggtgtcctttctcttctgctgcttgcatagctctttgatgttctctatctctgcaggactaaacttggaggttagcatcacattgtcataatcaaattcttcatcaagtgaaaaaagttgaacttcatctccaagtatctcttccgtctgtttgtccattcttttaacactgggctttggcttcacttcacaggtaggaggctgggccacaaaagggatacaggaaggaatgctggtgcttacatcctgctccacttctcctggaagcagcagcaaatcctcactcatttggggtttaatctcttcatccatgtccaaatcttctaaatctaggaaattatctacctgttcttccaaacattgtgatgaagtacgaagaaagatggttttatttctaagatggtagtcatctgcttcatttttatgagtaacttttgctgaggtaaaaatgttttctgaagaatcagttccaaacactccccttttggacacatgatcctcttgtgaaagatgagtaaaagtgttcagaaattcttcatcatatgtttgctcatgacaattaaggaatttatccaagacgtctttgattaattgatcttcatccattatttccaatcctgacatatgggcagacattcctattcatgaggccacagtatcttcggctagtctttattcacagacacattgcaggagtcccctctcccag

SEQ ID NO: 474999 - DNA, 1000 bp, Homo Sapiens; identical to SEQ ID NO: 343727

SEQ ID NO: 475000 - DNA, 1000 bp, Homo Sapiens
ttttttttttttttttttttttttttttttttgaagccacgagttttttttaggcctggcctgtgggccaggagtcagggaaggggcttcctggagggctccctggaggaggtggggctcagggggggctggactcggaaatcagagagcaggcgggcggtttgcgacgcccgggcggtcgcaggcggctcctggcgcagtgcggacccgggctgcttgcgggaggaagcggctgaagcccaggccggggtcagaggggagggcgcgtgcggggcggggtcgccgagagaaaaagaggcccccctcagccctgccaaacgcagtcctggcccggagcctgtccgtccaggccgacggcgtagcgcgaactccagtcccgctcaaagagctgccgcagctgctcctgcaccgtggcccccgcgggctgcgcgccagggctctgggtgaccaccaagcccacccccgccgtgctgctgaagtaatcctccgaccagttggaggtgcctatgtaggctgccttctccgtgaccatgaacttgctgtggttcaccctgctgaatgggatgttggaatggttccccaccggcacgatgaagactttcacgtccacagagacgttggccgcggggttgctgagcgcctgcagggaccgcaggtaggggaacatggtggggtccgtgttgagtccgcagccgaccagcaggcgcacgcgcacgcccttgccgaaggctgccgcccgcagcgcgttgtccagcaccggccagtacctcggggggtggctgaagcgcgtggtggggaaatactccatcacggaggcatagatgaactcctgggcgctccccatcaccgccagcagcgcctccaggtcccgggtgcggccctggggacagagtgctggtggcgacgctgagaagtaggcagtggtgggcaccccatcaaagaggccgtggaagggctggaaacggttgaagtgagatgagaagttctgaggccaggtttt

SEQ ID NO: 475001 - DNA, 1000 bp, Homo Sapiens; identical to SEQ ID NO: 343728

SEQ ID NO: 475002 - DNA, 1000 bp, Homo Sapiens; identical to SEQ ID NO: 343729

SEQ ID NO: 475003 - DNA, 1000 bp, Homo Sapiens; identical to SEQ ID NO: 160683

SEQ ID NO: 475004 - DNA, 1000 bp, Homo Sapiens; identical to SEQ ID NO: 343731

SEQ ID NO: 475005 - DNA, 1000 bp, Homo Sapiens; identical to SEQ ID NO: 160686

SEQ ID NO: 475006 - DNA, 1000 bp, Homo Sapiens; identical to SEQ ID NO: 343734

SEQ ID NO: 475007 - DNA, 1000 bp, Homo Sapiens
ttttttttttttttttttttcacaaaagaaaggcaaagttgttttaatagatgctatgatttctatgtctgatatttcaaacattttagaaagtagtaattattattatccatatacatgttttcaaagaaaaatgctctttacatatagaatttgaggatgagctctatattttaaatacagtagactccatgtcctttcttggaggtttttgaggactaatttttggtaatatctctttagcataaagtgttctatgaagtccagcttctcgaagtgctaactcgaagcgaagtctagggtcagaaattatctgctgttcattgtatgtattcaatgtgaagagtggcttttgaagaataaattcttcttcaatttcaatgcccattctagcttttgatgccattgtatctgacatcattctaacaggatcaaattgagcaacaacagcaacctgtttcctaagggcttctagccgccgtgctctctctttgtcttcatgagcttcttgaagggccacttcctttttctccatcaaacgcctttccaataattcttgtctatatttaaccctttctctgtcttttagtgactgttcagcgattaatttcttcagttcttctagacgctgaagatctctcatttccatttcttgccacttctgttttttcttggcccagtatttttttattttttttttcttctctgctctttgcaacaattccttcttcttccacagtttctctttctcctcttccttttctcttcttctggcagaaatttccatttccagtcttgctacctcttcttggtgggctcgccattgacgaaccttggctttcagatcagcacacaattcctgttgctttttcttgtccttagccaacatgctctccatttcatgtgttgcacaagcctcagtgagtgtcagcacagccttctgtataaagtctttcctatttttattccaatttgatatcaggatattttgctgctctat

SEQ ID NO: 475008 - DNA, 1000 bp, Homo Sapiens; identical to SEQ ID NO: 160687

SEQ ID NO: 475009 - DNA, 1000 bp, Homo Sapiens; identical to SEQ ID NO: 343736

SEQ ID NO: 475010 - DNA, 1000 bp, Homo Sapiens; identical to SEQ ID NO: 343739

SEQ ID NO: 475011 - DNA, 1000 bp, Homo Sapiens
atactggagagttacaccttccaaagtttattatttggaattccattccagtgatctactctgtgataaaaagtgtgtacactatatctccctcacttcagacactcccaattgcattacatattaaaggctatagagaacccagtgaccaaggcatgcaactgacattgttgctccgatttccccagtattatttcaccatgtaaacttttacttcctgtcataatgtaactagtgctgtacagaatgcagttggaaaaaaattctctaactttagcccagaatagttttaaggaggttacaaccaaatgacatgttggtcataaaattaaaataaatattcacaaaatacttaaagaaattcctcttgaacttccacgatagactatgtttaaaatctacctcttggcacattaaatgaattgacttgcatatgggagttagccaaactcttagagaacacactccagaaatgaagatttggggctctgtaataactgataccaagccatcctttcttgctataattagaactcaccagttgctaattaaggccattgctagatcttcagtaaaataattttatctgcataaaagaaacagttatgtttctcaatcagaaggttaagggtaagcaaacaattcaatttgtaatgtgtacatgcagagagttttgggtttcatttttttcgctgacttattttctttacatgtttacataaaggaacagagtccacatacttttaagacaatatagtttttagaggtgtccatccctcaattaactaggtgtttgggttttgtcttttctacctaatgctactatgtacaaaaatttacataaagggacagtgttctcatttttattaagatactataatttgtatagtcattcattaattattgatcatttgagttctttccagcttttcaattttttttggtgaaacaatgatgtaaactttgttgtacacattgctttttgtgattttggaaaatt

SEQ ID NO: 475012 - DNA, 1000 bp, Homo Sapiens; identical to SEQ ID NO: 343741

SEQ ID NO: 475013 - DNA, 1000 bp, Homo Sapiens
ttttttttttttttttgccaattgcagtgactttattttaatgggttttcagacatacagaaagggattctttagatggggctgtgtcactagtcaaccatcttcactgtggagtcctagtcactatgattttgttttgtagatcatgaggattcattcaaattgtctcctcttccactccttcgtaataggttacatgatctgaaagtacatccctcctttagtacattgtattcaaacaggttgctgctacttctctactgtcattaatcttttcatcatcttcttattcctcttagcacagtcggggcataacatattatcttctatgcctggggatgggaaaatgcaggcaggtaacaagaagagagaaatcatcctcctgtgagtggtaggcacccaggcctgacctgcatgaaactgcaggcgtacccaaccctttgtgtctgccgagagaagtctgccatggaccacacaccacctgacgccagaggcttgcatcaaaaaggcctcaacagaaacgggaatggaacatgaattcaaagccttaggctgaacagctcttgcagcaattcttgcccatgatgccaacatggctcccggtgctgaagttatcacttcgactgtattggtctcttctgctctctcattcatctcataacttctctgaagccttgctctcttggtcactgccttgcgtttcctcgaacatcgctgtaatctggtctcttgtgacatttcaggcatatcttgccgttgttcagggtaagcatgcctatgaagcctcagataaacttcgattttcttgccattagtactcaaaccgagttgttgacaccagtcccgcaaagtgtcccgacacaccttattaatgggaggcgaaatggtcggcaagggaagggctggtattttgcatctagctttttgtggagctgtaaattgctcatttgtttgaagtagatgacctggattgtatttcttaggcttctccagtttgaca

SEQ ID NO: 475014 - DNA, 1000 bp, Homo Sapiens
ttacaggtgtgagccaccacgcctggccggaaatttcctaatacatcaagaggacataaagttactagttctttcataatttcccctccttccccagggaaaaattataccaaaagcaataaatggagttaaataaaggaggacacggaaaaatgagcttgctcttttccgtagtggtaggggaaagggggttgctttgttttaaatcaaagggtgacattgccccaggaagattaggagaggtgatttattatcatttacttactacttttaaaaaggctaaggtgttagttaatttcatgatttcaggatcagatactgtacaaatatgaacaaattggggaaaggtgaaccacctaggctggagaacagggaaggctgaccaaggaggcccaaaggaagcctcattcatcagagtccaagtcactgtccccagcaatggagtggaaatcctcactgtcctcctcgtcctctgacaggtggacctggcttagtacgctcggcccagagcgctgctcttcctcctcctcatcttcttcctcctctgatacctcatacccaccgatgctgctgaagcttgtgtcttgggtgttcgacttgggatcaggctcctcatagctcccataactgatgttgctatcctccaaaccatgggaagcctccccaccgtctccctcataggacatcatgctttcttcattttccatgtccatccttgtgttctcctgaagcatgcggggttgtttgggtcttattccaccagatcccacatcagagtcacttccactttcactcagctggatagcagagaaaggattgtctccttcttcatcactcccagcatcttcctcatcatcttctccttcagacataagcaaatcctcatacaggacactggcttgaggctgttgtacagttccttcctcttcatctgcaagatcaccatctccatcttcaccttcctgtgttacctgcttttctggagtggcactgggaatat

SEQ ID NO: 475015 - DNA, 960 bp, Homo Sapiens
ttttttgtattttttttttttaggaaagatgaggtcttgctctgtagcccaggctggtcttgaactcctaggctcaagcaatctgcccacctcggccttccacagtgctgggattatagacctgagccactgctcctggcagccactgcgccaggcaaaggactttgatttctaaatgaaccagcacagtccagcccacccagggggtcaggaagggaccctccccaggtagcaaggtggctccagcagccccttcccacccccatccaaggtcacttcctggagacccatggggaacttcaggtgggcgcacctcaaacatgatggtgatgtctgagtacttggacttcatcagctccccccaggaggtgaggttgcagtaggtgaggacgccccccggcttcagcaggcgaaaggcgtggttcttgatgaagttgaactggtgtgtgtgccaggtctcctccgagagtgggtacgtgtcgtacaggatcccatcaaagtgaccgtcaggcagggtgggtgccacatcctcccacaggcctttcaaggggatgaccttgtgtgtctgccgtggggcccagtcccggagccgctggaagacgccgtcattgcactcgatgatccaatgctcatcaatgggcgcctcctgcacctttgacgctgcgatggccatgccaaagcccacctccaggacccggccccctttggaggaggcggcggcggccagcgcgtgcatatagggggtctcccagcgctccatcaccggcttgcccaggatgcgcaggtgcgtgtccgctgcgtcgtaggccgcgggcgccgccccccacgcggggctgcagttctcgccgggcgcgaagatgggggtcgcgctgggggcgctcatgctgcaggctggacggcgacccgacctcgatcgcgcgccgcccgggcccgctccctgcaggggcttgtgggccgggg

SEQ ID NO: 475016 - DNA, 1000 bp, Homo Sapiens; identical to SEQ ID NO: 160689

SEQ ID NO: 475017 - DNA, 1000 bp, Homo Sapiens; identical to SEQ ID NO: 160690

SEQ ID NO: 475018 - DNA, 1000 bp, Homo Sapiens
tttttttttttttttttacttcatgattctataattggtataagctatacagtctctggaaaggcatttctttaggaaacatattatttatgatcattggggaccgagttagaggtttatttcttttttttttttaatagagttttgtgtgtcttattcttaaatttaaaaaagcatcttcagaaggtgccatatccatcccctcgggcagtcactgcaaaagttgggtagacctcataggttgtatatgctgctaagtcttgtccaagggttaccgcttgcttgagctgggctgcagacacgggtgcagttgcattagggacagcatatcctgggaaagcagtagcagcagcagcagcagtagccatggtgccatcgcctccatcagtggggatgcccagggtctgcagggtgtattcggctgcatacgtctttgcttcatccacaaaggcactcagctttggaggtgtgaaagggtggattgcaggattctggctggctagagcaggaatagttattttgtacaagaatagctgtctttggtcttgtccaatagcagagtgcagctggtacactggctgtccccagttatttttctgacaaatctcttctaatatctggggagcgagtttaattccttggggttttaatgtgacaggattcattggggtgagctccatcccaggtaaaatgtcatagagtttgtcttctcttttgtctcctttgacctggtatcctcgacccaggcctgtgtatgccaaatagccacggccgcccagtcctctcactcccgcagcccctacaggtacattcatgtaaatttctctaacagaaggggctcggataatggctctgttgctgagatgtcctttggtggctgggaaatgaagactgggaattgctgcataggtctggggggcatagaagacaggagctccaaggtaggttgtggtgggatcataaacttggcccaaagagtaggtatactctccttgcagca

SEQ ID NO: 475019 - DNA, 1000 bp, Homo Sapiens; identical to SEQ ID NO: 160692

SEQ ID NO: 475020 - DNA, 1000 bp, Homo Sapiens; identical to SEQ ID NO: 157694

SEQ ID NO: 475021 - DNA, 1000 bp, Homo Sapiens; identical to SEQ ID NO: 343749
